United States Patent Application Publication US 2020/0377945 A1 - sequence listing, part 4

SEQ ID NO: 627 - DNA, 21571 bp, Unknown
  gut microbiota DNA sequence
ccactatgctgaacaggcttaaagcctaacaaacacaaaagacatcgcacgaatatttgtatttcatgcgatgtcttttatgactactattggtaactataaataaaatagttcctttttatttgatcattgtcaggatccgttctctacatcccagaccaataccattggcctgttcgatgtttttctctagttggtgttcaaagtgacggaagggaagaaagatgccaatctcgctgctttgttgttcaaatttgttttcatccattacaccgtaatacatgaacgctcttggtaattgttcttccaatctcatcataaaatcccaaacaatgctgtagacttcgttatcctctatcatttcttttacttctttaggtagtttaaataatagcaggattccaatatgttccccaatcttcattgtgttaatttcgtttttgttccgataatcgtgtttttcacgaaatccataagcaagacagatttcataatccggtatatcgtccgcctgatctaaaatctgctgaaacattttatattgtttttgtgaaatctgtttgtttacggatgtttgtttaatcagctcgccctctgcatctgttaatcttacaggatttgttacacctttatcattgaatctcataggaatcaaaaacgcatttcttaacagatcaaacatactgtttccacagattcccatcaagaaagcggaaagatccctattttgatatgcatcaaatagtgctttcacaaactgtttttccgaaagatcacgatctccactgttggcaaactcttcataaaataactctctcaatcgttcacaggcatcattattttccagaatttttttaaatatatgctctgcattttcttctcttggaaaaattgtttccacgctgatcatccctttcttgactttttcatcaactgtattatactttaggaagaatgatatgtaaaatatatatatcatatcattaacatacaaattttatataactaggaggtcaatcatgccttttgactattatcgtatcttttattatgttgcaaaatataagagtttctctaaagctgcgaaattcttacataataatcagccaaatatcactcgctgcatgaatattatggaaagtgaacttggctgcactttatttatccggtcacacagaggaatcaagctgacgccagaaggggaacaactttatgctcatgtagcgattgcgatccagcagatttcttctggaaatgatgaactaaatcgaacaaaaaatctgaaatctggaactgttacgatcggagtaagcgaaactgcacttcatttatttttgttgccgaaattagagaagtttcacaaactttatccacatattaaattaaaaatttccaaccattccacaccacaggcaatcaaagctttgagaaaaggattcgttgattttagtattgtgacaacaccattgtattgcgaacatccattacaatcgcaacgactttgctctttccgtgacattttaattggcggaccttcttatagggatattggtttttcaccgaaaagactacgtgatctgcaggattttccttttatttcattaaatgaaggaacagcaaccagaaatttttatgagaaatatttctatcagaatcagttagttttttctccggatatggaaactgctacaacgaaccagatcttatctctggtgcagcatgatcttggaattggtttctgtccggaagctcttgctaaggactatcttgatcgtggtgaaattatagaaattcctgtaaaggaacatgctaatccacgagacatttgtctccttaccgattctacccgaccaattggaattgctgggaaaaaattattagaaatacttatggattcggaggggtgatatatatggaggaagaatttcataatcatatgcggattccttggcatgattatacaagaaaaagtattggtcgtccgatcacggaagcttcgttaagtgagaaagcctcgatcatcggtcgtactggaattatgcttctatcttgcggaactggagcatggagagtacgaagttctatgaacacactggctagagaacttggaattacttgtactgctgatattggtttattatcaattgaatatacttgtattgatggtggtaactgttatacagaatccctatgtctgtttaatacaggcgtaaatacatcaaaactttatcgaatggaattgtttgttaacaaattttccaaaaactgcaagaagatgtctggagatgaacttcatacactacttgatcagattcatgaaattcatggattttactctccgccattccttggtctggctgcagctgttgcatgcagtgcatttacttttttactcggtggcggaccgattgagatgttttgtgcattcttaggtgctggtgccggaaattttctacgagcaaaaatgaatcaacatcatttaactttattcctatgcactgcggcaagcgttgctttggcatgtattgtatacacaattgccttcatggcattgaaatctggatttcatatttcgatacaccatcaagctggttatatctgttctatgttattcattattccaggatttccatttatcacaagtggaattgaccttgcaaaattggatatgcgttccggacttgaacgtctgacttacgcacttataatcattgctgttgcaactttagctgcatggatgcttgctttagttcttcatttaaaaccgatggatttccttccattgaatttaagcaagtcagaatacctgatatttcgactgatcgcaagcttttttggagtttttggtttctccgtaatgtttaacagtccattacgacttgctgctacagcagggatcatcggggcaattgcaaatacaactcgtctggaactggttgatcttgcatcatttccgccagctgcggctgcattccttggagctttgcttgctggtcttctggcatctatgatcaagacttcgattggttatcctcgaatttctttgactgtgccttccatcgttattatggttcctggattgtatttgtatcgggcaatttataatattggtattacttcgattaataccggtgctttttggtttacagaagctttacttattattatggctttgccgcttggattgatctttgcaagaattattacagataagacgtttcgacgttgttcttagaaatggatatgaatataggggctgtctcactaaaagtgacagccccataaaaagacttatatgaacacaagaaaaaccttatccaatatttaatctgtcaatttcactgtcaatcaatgcaatttcctcattattcaactgccattcaaatgcactgcaattttcatctgcctgtgcaggtgtattaactccagttaatgctgtaccaacaaaactcttttgggtactccagttgatggatacctgtgccaccggtacattgtgtgcttctgcaattttatctaatgtctttaataattccataacattagagaataccggttctttaaagaatggatagaatacctgacgcatgtcctttggatctggttttggaagttcgcgaatagctcctgttaaaattccaccacctagagaaccataagtcattgtcccaattccttgagtttcagcccattccattagttctctttctgactggttcacgatagaaaacggaggctggattacatcaattttagcatatttttgcgcttcctgaattaattctttggaagaattagacattccaatgtaacggattttccccttttttttcaacatattacagactgccattgtttcttcaatcggtgtattttcatctggccaatgcataatataaaagtctatataatctgtttgtaatcttgcaagagattcatcaatttcacgctctacggagttatatttgttatctcttacagattttcctgtgtaatgactgatgtaagaaccaaactttgttgcaagatacactttttcacgatatccatcttttaatgcttgtccaacgactgtttcagaatgaccgtctccatagattggggctgtatctaccatattaactccattatctatcatctggcgaatggcagcaatcgattcttctgtatctacatctccccatgtcactcctgcagagtttgctcctgcaatcccccatgtaccaactgttaatgcagaaatatcagcatctgcatttttaaaatgtttatatctcataatttttctcctttttaacgaattttttctgcttccttatattgtgccataatcaattgttttaactcccattcattttctgtcagaccacaataaacttctatagctttttcaatcccatgttcttttacatagtttgtaatttctatactggcaatatcgctttcatcacggtataaaaatccataggcaatcccttttgccaaataaaatggcagaatatgatgtttcatacataacaatgctggtcctacaaatcgattatctctggaaagttttgtcttaggatctgctgctactctcgtaaaagcatctttcagatttcggtttttaggagcttctacaataaaatcaatccactcctgatggtcagtttcatcaaattgatattccgcctgaatagctgcatccgcttcaaaaaatgctccaagtacacaatcctcaatccatccatcatcataagtatcacgaatgtaagtatagccttttgcttttcccaaaaaagccaacatgcaatgcttcatatttccagtatagacttttcgataaatctgagctttccctttttgaacccctccagtttgtttcacctgtggcagctcacctttaaaaggttcttcatcaattccaatatgtccatctaatttagttgtaactgcaaatgcatcttctgcaattaattcttcagaagacggcattgccgccattcctaccataacctgacagattcctattttttctttaagataacggctagcagccgggttattttgcaataattttgctaactctgtctcaaagtaatccggagcccccaatgcattaacacaaagcagtatgttcaatggagctgcctcttgttctgcacgatattcaatagcttcctttaaattttgacaaatactttgaaaagcaccttcgtatacgcaacaggcaatcaaatctacttttttcatatgttcaatcaaatctactgtatctgaacaatctaaaacatcaaaatcgtcgacaagaactcttcgtttattgttcgcacctacccgttcaatcaaataagtgccttgttctttcaactgtttcatccgttcttccataatatcgtaaatatacaaatggtaaccagattcaaaaaataatccaccgatgacacctcgtccaatatttccagcaccaatcacaagtaattcttttttcatctttagcctcctgcccttaagcaatcgctccaattgcgaataacagtacaccgacagccatagttccaatcaaaagcggtacgacttttacaccttttttcaataaccaatattcaataccaaccaatgcaatttttaacattcccggcatgactgtatctaatgttgtttgcaatacaatgccgccattttttacattcccaatagtaattggtgtactaatgtttacagtataaaatatcatagcaccgattgccattaatccaactactgtacaagcataagatactttatccataatacctgatttctgggattttaccataaattccattcccatgctgtaaccatatttcaggctgtaccatcttgccaaatagtttggaatattataaattaataagaataaaattggtgcaaatacatttccagctgctgccatagtaattacaagtgaggttgccagaattcttaatgttgcaggaaatagagtatctccaattgctgatagcggtcccattaatgccgtttttactgtattgatagttgtatcatcaaactctggattttttgcattttcctcttccatcgcagtagaaatacctagggcaaatcctgcaatattcggagtaatattaaagtattccatatggcgcttcttggccttgatacgttcttctttattatctttataaatcttatcaagaactggaagtaaggagaatgtatatccattatgcatctgtcccggatagtcattcatactatttagtgctaaatatcttcgatatattgtttttaaatctttcttttcaatcttagaactcattttcgtcacctccttcattttctacagctgctagctgattattctgtgatgttaccataactaatacaaacataattcctaatagagttactgcaatcgtcggcatacttaaatatgctgctaaaataaatccgataaagaaatatggtgacatcttttttgtaattaccatctggagtaagagtgcaaaccctactgccggcaaaagatttgcagaagctgccaagccattaataattacttttggaattgcatttactgcagcttccactgctgcacttcctgcaaaaatgcaaacaaaagcataagcaaaatacactacaaaacaggtgaaaacagaacccattatatatattctagaagcacctttagaatcatctttttcaagatatttcatcataatctgtccaaaagctgcattcatcaatttacatccaatgaaaatgaatccacctaacaatgcaattggcaatgccattgcagttgctactgcctttccagctccagttaaaattgcaaaagcagtacatatggctcccgcagaagtataatccgggctgactgctgctccaattggaaatgaaccgataaacattaattccaaaacacttcccataatcacaccttgcaccggatctcccaaaaacagtcctgttaatgttgagactacaatcggacgtccaacttgagggaatccgtaaatccattcacttttacataaacctaatacaagccccactaatattgcttttattaacatcttttttcctcctagctttctaatagtttttcatctacatgtgtaatagcttctgtcggaacttgctgaatgtcaatttctatgttttttgcaagcagttttttcagcgtctttacatcttctgatgttacattaattgctttgcttaatgcttttgtattttcatttgcaggcaatacaccaagattcacataatttaattctggtatttcctttgccaacctctccacatcctgaatattatttacaacaataaacattttatatttatctgtcactcctgatttgattgattttacagaatcttcaatcgatttaattactaatttcattccctgtggcttggaaagtcttaacattgactggcgcatttcatcttttgcaacctcatcattggcaactaaaatacaatctgctccaatatgacgtgaccatgaaatagctacctgtccatgtaccaaccgataatctactcgcaataatttaatcatccacaattcctcctttttaatcaaatactacacttacgcgatatgctccaggtacaattgctgcctcaaatgcctgttccacatcatctaatttatattttgcttctactaattttgataaatcgattttcttttctctcatcagctctgcagctctttcaaaatcacatttgtctgcagaaaaagttccaattaattccattttacgataatgaattaagttagaatcaacatgcagctccggtgcaggataccccgctgcaaacattaaaattcttccatgcagccgtttaatcatttccaatgcctgatcattggctgctgtcactcctactgccaaaataactgcatctacacctcgtccatccgtccattctttaactgcttctaccggatctttttcttttacatcaacaacatttaacccaagttctttagcaacttcaatttttttgtccatcatttctgtaatcatgacttcacagccttctgctttcgctaccaatgcattcaaaacacccatcgttcctgcaccaataacaactattttttctccctgctgtacacgaagtttccgaattccctgacatacagttccaaccggctctacaaatgctgcttctgacggatccatgttctgatttaatttaaataaagaacgataaggtttgattacgtattcagagcaaccaaatcctccgtgatatccatctggagacagcttgtttcttccagcccccaaggtaacacattcactggtcaatccctttttacaaaattcacactcaccacaattatcatatccgattccaaccatttcgccaacttcaaattcctttacatcagaacccatatctactatagttcctgcaaattcatgtccccatgccataggaaacatcagattttttcttgctcctgtatactgcccataatctgtcgtacaaatattacaggcaccatttttaatcaatacttcatcggcttttaacgccggaatttctctttcatgtacttttacgacacgttctgcttccaaaactgcaaatcttgttgtctttctttcactcatttccttctacctctttctattataaattttgccttatgatatgatatgttttctcataaaccttaaaaggctccaaaaagtatttactatctgtatattccaacacaaaatgcccagaaaaacgattgcgatcaaaaatatccaatatttcttttatgtcagcttctccatctccccatgccagatgtgaacggataccatttttataatccataaaatgacaatgatttagttttttcccaaatgtatcaaaataatcttgtatagattccttagcattgtaaattgtatgaatatctgctgtaattgtaaatgctttagaattcacttccttcatcatctgttttaaatcgctgatagtatttactaatgtggtactttgcctggataatgtttccattgtcaaagacaccccatatttttcagcaaatctgcacaattcgccaaccatccagacactacgatcccatgcttcctgtcttgtctcagaataagactgccagccggatgtaatcaaaagtttcggacacgataattcatgtgctgctagaatcatattctgaaaatactgttttgctttttctcttaactctgtcttttttactgccatatgaaatggattcggacaagattgtctaggagtaatgcttactatacggatatcatactgactcattagttttttaatatattttgtatcttcataattattactgtcaacgaaataatgggaaccgcaggtccaaagatccatagaatgataaccaatctctgcgattgatttcatataatcattcagttcataaaaccgatatatatgattcattggggcaaattgttcaattcccaatgtttttaccatctgttctcagacccgaataatttcatataatgttctaactctgcttggaatcctgccacacctgctgcaattgtctgctgcaaattcatctttttcggtgtaaattcatcttttccggaaccatgaacttctgtggaagcaagggcttctcttaatgcctgctttcctgcctcactgacatctgtatttaaatttactttctgaattcctgttcttactgcttttgcaagattttcatcccctgttccagaacctccgtgcaatactaatgggactggtacttccttagataaatgatctaaaagttcaaattccaaatgtggttctcctttgtatactccatgagaagttccaactgcaactgccagacaatcaactccggtttcttccacatactttaatgcttcttctaatttggtaagtcctgcatctcttgtttcttcatattcagcaccctgtcctacatgtccaagttctgcctctaccgaagttcctactgcatgagcgatttttacaatttcttttacttcttctacattcttttcataagcacatgtagaacgatcaatcataacagaactaaatcctgcatgaattgcttttacaatatcttcataagctccaccgtgatctaagtttagagcaaatggtacttctggatactgtttttcataatatcttgcaatatcagcacattcataaattccatgaactgctgcaacatctaaaataatcggtgctcttaattttttcgctgctaaaaaacatgcctcaatagtttctctattaaatacattcggtgctgcaactccatacccttctttttttgcttttgctaacaattctcccattggtatcatcataatcgttattctcctttcggcttttcaaatttcatcactgtttatccggatgtctttatataaaacaaaaagcatgccaacttagtgtcatgcttttgtcaaaatatttaattttcctcgaaaaacctcatattcccgctaaaatatcataaatataaccaatttcagaaattggaattttcacactataagtcttttcaatcacactaaacgctgcctgtatctgacgaatttcctttttgtgaattttttgaaacttatctttctctggataatcttcaattgccgaattacgaatcaaacgttctgtcaagcagcccacatgaataaaaagattaatttttgtactattttttagcttccttcctgtcaaaaactcatactgtttcattgcctcttcaatatgcattaaaattttttccgtgtctaaaattgtcaaaaatcctaataaacggttcatagaaaaatttcgtattaaattatcattcaatttttccatagaaactgcgtccgcaacatttttcaacatattaatcatctgttccgttgctgctccggaaactaattgttccaatggaataaacttttcctgtcctatttggggattttttgtacctacaattcctaagacttcacacttctggtagattcctttcacaatttccacattttgtagttgatcataatcataagaaatcacttgaatatccatttcttttggaatactgttttcaatcaacagacgaatctgctccgccgttcctgtgccggtaatgcaacaagttaaaatggttttttgtttttgtatttgaggatatatgattttatactccgtttcattctcctcttcaagaatccgaacaatatcttctaatttctcttccttttgaatcaattctcctgccataattgccatttgtgttgaaatattattcattacaacgagcggtgattttaaattttcttcaaaagatcgataaatttcccttaaagaacccatatcaaccattaaaataattccatggctgacatcatttttttctacatactctttcatccattgcacgacgtcggatacatttttctcaattggcatatccacagattcaaaaatattttcatccaatattcggttagcaacatctgcaacactgcttgctgtcgcatatccatgggctaaaattactgctcttggtcttttcctggaaagggaaacatttaaaagacttcgaatataaattgtcaatggaattaaatcttcttgtgttgacacaatatccattttagaagacagcatattaagaatccgctttgcaatatgaatttccttcggatactcttctaatatatactgcatcaattcattgggaatgaaaatattttgtttccgaaagtgttgattcatacagaaaaaatacgccgtaatcgcatggagactatttcctccaaactgaacattacaactgtactctacatatcgaaacgcttcctgcacgctgtttacaatatatttacgcatagtattttcattttcagaattctgattataaatcaaacaatccaatacatcattaactgtgtgcatgcatcgtttttcaaactgttcctttgcataattctgactgcgaaattctccaaaaatagcaatcaatttttcaaacagttcttgatgataatcttttccgttcttatctccagataatatttcctgtattggggcgttcggataaatttctaccgtatcataatttccaattttattttccgctttctctgcaatcccctttaacacatcttccggaagatgctccaaatgtatatcaatttcattttttcgtttcttttttgcatatgcagttgcacaaataaattttattttattctctaaatctccaatatttccttgataaagatgatttaacaacgcttcaattacattaccagacactttcatcttcttatccaacaccttactttcttctataaagaaatggtaaataaactgcaaacgttcttgctctcctctctctctcaaagaaggtatctgtacaacaataggtattcttcttaaaaatgtatctagaaaatttgattccaaattttctgtggtagccatgaccatccgcacttttgctttatgccatccttcactttctcccattcttcgaaaaattccttgatccagaaagacaaacagcttttcttgactttcactgtttaatcgatgcacctcatctagaaataacattccaccgtctgctgcctccaacaatcccttggttgttgcataagctccagtaaaagctcccttgacgtacccgaacaaattactggacaataattcaatattatttacgtactgagcacagttcataattataaaaggagcatccggcttaagaattccttcttgcactgcaaattcataaatttttcttgccataaaacttttccctgatccggtcggcccgtgaagaaacactggaagactggtattgggataaaaaatagaagttttcatctgttcaattggtttttttaaacttccattagaaccaatcagattttgaaaaacatcctgttcttctacaaaatttatttcctgtttttcttccttttggatgccatttttccgcttattttcatctaagaggtcattcacactagcataaacatcctttgacactgtaaaaaaatttttttcaaatacttttttatctagaaagcgaaccggtcttgtattaattttaaaaaatgtttttccaatttcttgattcagataatagctgactgtatttctttttacttgaaaatatccggcaattgcttccgctgtcagcacagtatctaattcttccaagctaatttttgctgtattttcttttacatattgaataatggaatctttcagcaactttctctctccttttctcatttttgtagtattattattatatatacaatacttttcatctgcaaccctctaaattttcacactaacacttggcatcattcttgctttataaaaaaatatcatttaaattgaactatttttaataacgaggtgtataaaaaatgaagaaaaaacttttaattgcaacacacagtgtatttgctgatggaatcaaaaatgctatggaacttgtaactggagaacaaaattctgtttctactttatgtgcatataccaatgacatgacagaggtagaaactcctatcaaagaaattattgatgcgttatgtgatgacgaagaattaattgtaacaacagatattttcggcggaagcgtcaataatgaatttatgaaatatctttcaaaatcaaatattcacctgattgctggagtaaatcttcccttactttttgaactaattatgaatcttgaatcggaaaacacagttcaaatgattgaaaatgcaatacaaaatgccaaagaacaattgcaatactgtaatcctttaatacaatgttctattacagaagaaaacttttagtaagatttggagtgtgatgaaatgaatttcagccctaaaactactttagtgcaaacccaaacattatctcaaacacaactacagtctttaaaaatactgtctttggataattttgagttaaataacttccttcaaaatgaatatattgaaaatcctttgctagattataatgaaaattcaaatcttccttcatggaatcaatatgtttcctattcctccgctaaagaagacgaggatatttacaaagaaatccctgacttttcggagaatggaatcaaagaattccttctggatcagttaaaccaaagaaatttttcagatttacagtggacagcaatgcagaccatgattgactgtctagatgactgtggttattttaaattgtcgttaaaggatttcagtcaatggtttggtattgatatatctactgtaaaatactgcttggacatactatcctctttggaaccattagggattttttcaaaagatcttccacactgtcttttacgtcagttagaagcaaggcaggaactgacaccggaactcaatcaaatcatccgttatcatctggatgacattgctgctggaaaaattaatactatcacacaaaaactttctatgtctacacaggatgtccgaaaatgtattgcaaaaatcagagaattaaatccacgcccaatctctggatttcttactaattccacagattatattgtgccagatattcttatagattatcaagacagcagttggattattagattaaacgatcagtggattggaaattattccctctgtgactattatttaaatatgatgcatacttcgcagagtccggagttaaaagaatatttccgtaaaaaatacaatcgtgtgcaattgattatgcatagtattgaacaacgccgagaaacaatcttaaaaattacatctgctgttttagagcgccaaaaagactattttactggaaatagcacattaaaacctatgacacttgccgatatcgcttctgatatttcgatgcacacatccaccatcagccgtggaatcaaaaataaatatctccaatacccttttggagtggtttatttgaaagatttattcacatcttctgctggaaaaaaggataacaacagcccaattaccgtaaaaaaacaattgaaggctataatcgcttctgaaaaccctaacaaaccctacagtgattcgacattatcaaatttattaaaacaaaaaggaatcaaaatttccagacgtactgtcgcaaaatatagagaagagataggaattaaaagtacatataaccgaaaaatatataacgaatagaaaggccgcatctggaatccgcaatgcagaaatggtacgagaaatgataaacgctggagtagaccaattcggaatcagtcattccagcgtcatgaaaatcattttggaattagctgcaattgaaaaatcatcgtaatctttctaatattactgctatgttacgaaactgtattcacagcatttccgataccgtagcaacatgatgccttcatccttgctacggtaacatcacaattatcattgcttttgataatttcagtcaatttttctaaatagcctactgcatccaattgggaacttccaacatattctgactacctgagtacagaatacaatcctatgtcaacaaaaaacagttaacactagacgatctttgtctcatataaaaaattttcaaagaacctcttaatcacgtacttttatgtgtacttctcttaattgctgttctgtaatctcgcttggggctccgtacattaaatcctgtgcagttccgctcattgggaaatcattgatatagcagaagcggtatgcatttttctccagtaaatccaaacggcttcccagttcatctctgatctgccccgcatagatgtaggctgccttttccggcgctgccgatcttgcgtctgtcgtatatttctgagcaacattgtattttaatacatctgctccaaaggttgatcctgccccctgttttgtaccgcttccaacttcctcattgtcaaagacactgcacatcgtcacataatccttagagcttcacgatttattaatcgttaaagcgacaaccccttatttttatgcataaaaaatcccctctgtgattgctcacaaaggggattttgatttattagattaagatcatctaaacaataggtaatgcctatttatcagacatttcttttaatctgttgtatttagcttctgcgtttgctttagcttctgcgaacagtgctttagctctttcagggttctgacgagataatgcattgtaacgaacttctcccatgatgaagtcttcgtattctgttgtaggagctttagaatctaagtggaatggattctttccttcagcagctaatgctgggttgaatctgaacagattccagtatccagaagtaacagctttcttttcttctgtctgagcaatcttcattccacccttgataccatggttgatacatggagcgtatccgattactaatgatggtcctggataagcttcagcttcagcgattgctttaactgtctggttgtaatcagcacccatagcgatctgtgctacatatacatatccgtagctcattgcgattgctgcaaggtctttcttcttagttcctttaccagctgcctggaactgagcgattgcacctaagttagtagatttagatgcctgtccacctgtgttagagtaaacttctgtatcgaatacgaatacgtttacgtcttctccagatgctaatacatggtcaacaccaccgaatccgatgtcgtatgcccatccgtcaccaccgaagatccactgagatttcttagataagaattctttcttagcaaggatttctttggcagcgtcacatccacaagcttctaatgctgctactaatttatctgtagctgctccgttcttgcttccgtctgcatatgtgtctaagtattcagctgctgctgctttaacatctgcgttatctgtagattcagctaatgcaacaactttttcttttgtctgttctcttaatgtattctgtcctgtgaacatacctaaaccaaactctgcgttatcttcgaacagtgagttagcccaagctggtccctgtcctttagcgtttgttgtgtatggtgtagcaggtgcagatccaccccagatagaagaacatcctgttgcgtttgcgatgtacattctttcaccgaataactgagtgatcagtttagcgtaaggtgtttcaccacaaccagcacatgctcctgagaactcaagcattggctgtctgaactggcttcctttaacggaatcagctttgaatttagcaagtacttcttcttttgctggtaatttctgaccatagtcataaacttcctgctgatctctctgagaatctaatccctgcattgtaagagctttttcacccttcttacctggacagatgtttacacaagatccgcatcctaaacagtcaagaactgtaactgtcatagcgaatttgtatcctggcattccagtcatatcagctgtcttagtagctgctggagctgctttagcttcttcttctgtcatagctactggacggattgttgcatgaggacatacataagcacagaagttacactggatacagttatctggattccaagaaggaacgtctactgctactccacgtttttcaaatgcagatgcacctaaaggcatatgtccatctacgtaaggtactaaatcgctaactttaagagcgttaccttcctgtccgttaacgtagttctgtacgttgttgatgtaatcaacaagaggtttgttatctcccttagcttcaacgaataagctttctgtttcagcgtcagcccattcagctggaactggtacttcaacgatagcttttgcaccagcatcgatagcatcgtggttcatcttaacgatagcttcacccttcttgctgtaagaagctgttgcagcgtctttcatatatttgatagcatcttcttcagggatgattcctgataatttgaagaatgcagactgtaatacagtattgatacgtccaccaagtccgatttctttaccgatcttgataccatcaatgatatagaacttaatgttgtgtttagctaagtaagcttttacctgtcctggaagatgttctccaacttcttctggagtccagctgcagtttaacaggaatgttccaccgtcttttaagtcctgaaccatgttatattttgttaaatatggtgcacaatggcaagcaacaaagtcagctttgttgatcaggtatgttgatttgattgggtcatctccgaaacgtaagtgggacattgtaacaccaccggatttcttagaatcataatcaaagtatgcctgagcatatttgtctgtatggtcaccaatgatcttgatagagttcttgttagcaccaacagtaccgtcggctccaagtccccagaatttacaagctacgatgctgtctggagctgtaactggagtttctcctctttcaagagataagttagtaacatcatccacgatagataatgtaaattcgtttttatcaacgttttcgaatgtagcgatgatatcagctggtgtagtatctttagaacctaatccataacgtccaccattgattgtgcagctttcgaattttgttcctcttaatgcgttaacaacatcaaggtataatggttctcttgctccaggctctttagatctgtctaatacgttgataacttttgctgtttcagggattgcttcaactaatttttcagcaacgaatggtctgtaaagacgaactttaacaacaccgacttttttaccctgtttcattaagtaatcgattgtttcgtcgattgtttcacaaacagatcccatagcgatgataacgctttcagcgtcttcagcaccatagtagttgaataatttatagtttgttccgatcttagcgttaactttatccatatattcttcaacgattgcagggaaagcattgtatgttgagttagctgcttctcttgcctggaagaagatgtcagggttctgagcagatccacgaagaactggatgttctgggtttaagcactcagctctgaatttgtcgattgcatcatagtcaaccatttctgcaagatcatcataatcccacatttcgatcttctgaatttcatgagatgttctaaatccatcgaagaaatgtaatacaggaacacgtcctttaattgttgctaaatgagctactgctcctaagtccataacttcctgaacactagagctgcaaagcattgcgaaacctgtctgacgacaagcgtaaacatcagaatggtcaccgaagatgttcagtgcgtgagatgcaagtgcacgagcagatacatcaaatacgcaaggcatctgttcaccagcgatcttatacatgttagggatcattaataacagaccctgagatgctgtataagtagttgttaatgcaccagctgctaaagaaccatgtactgttcctgctgctcctccttcagactgcatttcaactaattttacaggatgtccgaaaatatttttctttccctgtgttgcccactggtcagttgactctgccattggtgaggatggtgtaataggataaattgctgctgtttctgtaaacgcatatgatacgtgtgcagcggctgtgttaccatccatggttttcatttttcttgccatgttctcttcctcctaaaaaatctcgtgtgaatatattcacacattgttaatctctacgtccacctagcatatgagcgtagaaaatatcactacaactttcacaagttgcttaaaacataaacaaagctgtatacatataacttttgtatacagctttattctacattatttgcacaagtttttaaagagatttttatgtatttttaggtatttttttttgtacgccaaaaaaataacaatctttttgaatccttagtaaaatactcaagattttgaattcgttgtatttgtgctatttgtactatttttatcttttgtgcttgtgcttttcgcattcttatgttcatcgaatgtttttgtgaaaatatgagttccctttttgcttccgtcagttctataatatagataatcatgtttcttcggatgcatcgcagccttgatcgccgtgtctgacggattacagattgggcctgctggcaaccctttcataacgtaagtattatacaccgttttcactttcagatctttataataaactttcttcgcattatataatccatttgttgtggtatacaaaacggtcggatcgatctgaagtctcattttcgctgcaaggcgattctcaatgactcctgcgatcatcggacgttctgacatattgcttgcttcacgttcgatcattgatgcgatcgtcatgatctctgccatagaatgctttcctttataagacttcgcaagtgctgaatatttcttatcgaaattatcaagcatcttctggatcagatcttctggtttggaacttttgtaaatcttataagtatccggatacagataaccttctaatttgtactttgttcccttctttgggtcaatgtctttaataaaatcgtttttatactgatttgtattcttcgcagcctttataaattcatctgctttaaagactccctgtttctctagtcgttttgctatcatatcaatggaatatccttccgggatcatgactgtaacgactcttcttgcctctgcaagttttctggcctcttctgctttctgctgcctgtaagccatatattttcttccagcaaatatacctcctgccacaatgaccactaataaaataataaccccaatgacaaacggaactctggaacgatttcttcttccacgtctgcgcccccttctgcgccttccggaattatgatcaaaatctaaatataaatccatgatgtcctcccaaatttttattatcgtatgattttaaaatcatactgtgttcctatgctattatactcgcattttgtagaaataaaagggtttttattaattttcgttcatattcttaacttttttgtaatttttgtgaaaaaatatgcatattttggattgtaactcttctggtcaaactgctgtactttttttagtatttccattataatcaaagcatagccgtaaatggcaaaagattataaaatatagaaaggaatttcatattatggcaaatccaattgtaacgatcactatggaaaatggtgatgtaatgaaagcagaattatatccggagatcgctccgatcactgttgagaactttgtaaatcttgtaaaagacggtttctatgatggtttaactttccatcgtatcatcaacggatttatgatccagggtggatgcccattaggtacaggaacaggtgggcctggacatacgatcaaaggagagttcagccagaacggtgtgatcaacaacttaaaacacactcctggtgttttatccatggctcgttctatgatgcctgattctgccggatcacagttctttatcatgcacaaagctgccccacatttagatggacagtacgcagcatttggtaagatcattgaaggaatggatgttgtaaataagatcgctgaagttgcaacagactattctgacaaaccaattgaaccacaggttatgaaaactgtaactgttgtggaataatcaaatatggtt

SEQ ID NO: 628 - DNA, 12994 bp, Unknown
  gut microbiota DNA sequence
atgactttaatggttataaagaccttggagagggtctctaaaaactactactatataatacgaggagaaatttttacatggaagagaggaaatacctaaaatggtataacaaagtgggttatggatcaggcgatattgcaggaaatgttgtatatgcatttctgacatcttttgtaatgatttatttgacagacaccataggcttaaatgcaggtattgtcggtacattaattgctgtatcgaaattatttgatggtgtatcagatattttctttggttctatgattgacagaacaaagagcaagatgggaaaagccagaccatggatgttttatggattctttggatgtgctgtaacattgtttggtgtatttgctattccaaccagtctgggcaagactgcacagtatgcatggttctttattgcatacacattattaaacgcagtattctacacagcaaataatattgcttatgcagcattgacatcgcttgtaacaaagaatgcgaaagagcgtgttgaaatgggttcatttagatttatgttctcatttggtaccaatcttttgattcagtccattacatttggacttgtagcatcatttggcggtggggcagcagcatggagaattgtagcaatcatatactgtatcgttggtatcatatcaaatacattgtcatgcttttcggttaaggaactttctgatgcggagcttagagatggaaaagaggaagaagacagtaagcttacattggcagaaacatttaagctacttatatctaataaatattttgtcatgatttgcgttgtatatattcttcagcagttaagagcagctatgcttagcgttggaacttactttatgacgtatgtgctttttaatcagaaactcttcggtgtattctcgtgggcaattaatattccattgattatagcacttgctatcacacctacattggttgcaaaagcaagaggaatgtacaagcttaataagtacagctatgtatttgctacaatctgtcgtttgggaattgttgtagctggatatttaggaagcattcctcttatgttagtgtttaccgtattaacatctcttggtgaaggaccttggcaaggtgatgttggagcagttatcgcaaactgttcagagcatacatatcttaagactggtaagagaattgatgggtctatgttttcgtgtacatcttttggtacaaagcttggtggtggtattggtgtagcactttcaggatggttactggatgcaagcggatatgttaataatgtagctgttcagtcagcaagctgtatcagtatgatgaatgttatgtacttgtggttaccatttgcgtttgatttgattatcacaatcattctttcattcatgaatattgaaggtgcaaacgaacagttaaaagaaagtatggaataaagaaatagcctccagagtgaatatttacttttggggctaaatgtaaaattagaaagcgaggtatgaaaatgaacgcagatatcagatggattgataatccggaaatattcagagtgaatcagattgcagcacatagcgatcatgactatttcacaaattatgaagcgttgaacagcaattcacacaacttaatacagtcattaaatggacagtggaaattttgttttagcagaaatgcgatgagcagaccggctgatttttataaagaggattatgatacatcatattttgataagattatggttccgggtcatattgagcttgccggttatgatcagattcgttatatcaataccctgtatccttgggaaggtaagacctacagaaggggtgcttacagtatagagagtgcaggagatggaacaggaatgttcagcgaagctgagtataatccggttggttcttatattaaaaaatttgacttggataaggagctttgtggtaagagagttagactgttctttgaaggtgtggagcaggcgatgtatgtatggttgaacggtgaatttataggctatgcagaagacagctttacaccatccgaatttgatctgacaccatatatcagggaaaaggataatgtgcttgcagttgagattcacaagatgtgcagtgcagcattcttagaggatcaggatttcttccgcttcttcggtatcttccgaaatgtatctcttagagcacttccggaagcacatgtggaggatatgtggttgaatccggtgctgaatgaggataatgtgagcggaacattaaatacaaatattcgtgtatctgctacagaaaatcaggatgtgtgtgcacggattatattaaaaaatgtggatgaccaggttatcttagaaagaaatattgaattagaagataaagatggagactttgttggcagcatatcagacgatatcaaagacattaaaaagtgggataatcatacgccatatctttacaaggcttacatcgaattattaaaagcagatggagaaatcatagaagttgttccgtacagaattggatttagaagaattgaaatcaagaacaaggtaatgcttttaaatggagaacgactgattatcaatggtgttaacagacatgagtggaatccaaaaaccggaagatgcatcggcttggaggatatggtttctgatataaactgtatgacaagaaacaacatcaatgcagtaagaacctgccattatccggatcaaattccgtggtattacatgtgtgatgatgctggaatctatgtgatggcggagacaaacttagagagtcatggctcatggcagaagcttggtgcggttgagccgtcagtcaatatcccaggatccatttcacagtggagagaggttgtagtagatagagccagaacaaattatgagacgtttaagaatcatacatctattcttttctggtcacttggaaatgaatcctatgcaggtgatgatattaaggctatgaatacttactttaaggagagacaggatggaagactagttcattatgaaggctccttctatacaagacagtatgaggataccatatctgatgtagaaagtcgtatgtatgcaaagccttatgagataagggaatatctgagtaaccatccgaagaagccatatcttctttgcgagtatatgcatgatatgggaaactccttaggaggatttgattcttatattaaactgattgatgaatttgaaatgtatcagggtggatttatatgggattttattgatcaagcaattttagtaaaagatcatgtaacaggaaaagaagttctacgctatggaggagactttgatgacaggccatcagactacgaattctcaggaaatggaatcgtatttgctgatcgaaaagaaaaaccagcaatgcaggaagtgaggtattactatggcttatacagataaaagcaaattgagagttgtatatggtgattatacacttggtgtacatggcaaagaatttaattatatattttcttatgcacaaggtggattagaatctatagtaaaaaatggatatgaatggttatatcgctgtccaaagcctactttttggagagccttgacagataatgatcgaggaagtaaatttcatattaagagtggaagctggctttcagccgatatgtttatcgattgtaaagatgttcaggtttttatggatggtgaagtacaaaaaatatatgcaccagataataatagttatgaaggagatgtttcagctgatgagatcagggttcaatatacttatgaaacaatcaatactccttctacaacggttgttgtaacatatacggtagatattacaggaaaaattcaggtgaatgtgcattataatggtgttaaaggattacctgaattcccagtctttggtatgaggtttgttatgccaacgttggcagataaatatttatataaaggattatcaggagaaacttatccagatagaaaagcaggagcaatagaaggagtctatgaagtttctgatttgagcctaacaccatatcttgttccacaggaatgtggtatgagaatggatacagaatgggtagatattgtaagacatacgagtctcgataatagcaggacagattattcatctcaaacacttcgtattgagaaaaaagatgagccatttgctttttcatgcttaccttatacagcatctgaaattgaaaatgcattgcatcatgaagaattgccaccagcaagaagaacgattctttgtatttatggagcggttcgaggtgttggaggcattgacagttggggcagcaatgtagaagatgaatattgtatcagtgcagaagaagatatagattattcatttactatctgttaagcaaagtagggacacatatagttgcaaaaaaatcaatataataaagataaaatttgtttaatacgcatattttgtctttttatatataaacaactcaaatatttttattatgccttgaacattttgttcagggcatttttaatgaagacgatagataaccgaaaaaaatgattaaaagaaatttttaacctgaatcattaatatatcataattatttatttgcaatagtaatttctggggtatatataatggatttgaaagtgtataatagatatggatatgattaagagattttacatgctaagtatgttgagagtaagaatttgatttatggattgaactttgtggaaagtaaagaacgggtacaaacaaaatagatttatttaaaacagggagaggaagtatttttttaagtctttgacatgtttctaattataatgatcagaagatagagttgttaggggaaatagaaatcttaaatagagaggagaagtaggatagtaagtactggctttctgtattgaacagtttgaagaatcactaaattcatgctatcgtagattgaacaagcagagaagtatagtggttcagtgtaaaatataatattaatccttataaaatgatccgcatcgtaaagaacctatcatccaccataaactgacaatttccattctgtttttcggcaacataccagatactcttcgtaccaaatccatgtccggcttcagaagtataaggaagtccatcaatgatctgaggtttgatggcgtaagtattttttagagaaatcaacaatttatcatgattcatatgcatatccagcctaatgatccgctttggcataggtaagtctgaaactgcatgaatcgcattttcaagcccattggaaagaagcgcagtcaggtcaacatctgaaatccttagtttttcaggaatctgaatcgtgtattgaaaagtaatctgtttctttttcatttcgcctttatgagaagaaagaattaagttcacgatattattcttgcaatatctttggagcgcagttttatcagaagtgtgaatgacttcgttgatataatcaagagctttttcattttcattattttcaatataagaagaaatgctaagaagaaaatgtcgcatatcatgacgaaggattgatacggcacgttcggaacgatgcagagcttctagctctttttcggattggacacgtttcatctctatgatctggttgcgttgttcggcttccttattagcttcatattctttgaaatataaaaataaaaacataagataggtaagacaaaggacaaatccaagaaattctccaacaatttctaaaccggaataaagaagagaagtgtaaatgctagtcacataatcaaaaatataataaacaaaaggcataaatcctaagatcattaaggaacgggttggcttctgaagaagttgtgctgtgatatctgagacgtaatggatcagcaatacaaatacgattgctgtgatacagatacggacgctatagtaaatccattgttgatttgtcagcgcaaaagctgcgataccaatccaattgctgatctggcagcaaagatatgctgtcaaaatggaaagaatagaaattgtagcattatacttataatataatgtaagaagtaaaacaagtggaatgtgtgtgatcaaaggataaagctgctcagcaaaagaagttccgtataattggtaaacaaacagatgaattgccccagaaacacaggaaaacaataacaaagtgagattattttttcgatttaatcgaataccaagaaaagccgcagacgcaaagactccgaataacaatgtagttgcattatgaactatattcaatatatcaataaacataatctacctctcttaagaatcttgaaacatctgtgcaaaatacgcttctttaaaagctttggaataagctctggcaatgggaatcttttccccggattttgtagtgatctctgaggaagtaaaatgttctacattcataaaataaacgagataactacggtgacatttgaaaaaaccgtcttccaaagaaagctgatcttcaaagaaatgaaagggatcgacggattctataaaatttccagaacgcaggtgaaaatgaacttttttattctgtgcctcggcatattcgatttcatgaaaataaattttttgatatcccaaagctgttttaaggatcagatgttttggatcaatcgcaaaagtcttaacacattcattcagcgtttcttctaatttctcataggtgacaggcttcagcaggtagctgtaagctttcacatcataagattctaacgcaaattccggagaagaagttaaaaaaataatcttcacggttttgtcatattgcctgagttcacgggcggtgtccatgccatttaaaagaggcataagaatatctaataaaataatatgaaatggttctgccatattggtagcgatcagttcatccccattttcataaatgtatagtttagttgaaatctggttttcgtccgaccattttaaaacagcagatctagcttgttctaaaaataatggactatcatcacagatagcgatttttagcatgatttttctccaatgtagtataaatttagcttttatcttattttaatatagaatgaagtcactttcaatgaaatcaagatacagttcacaccctcaaaacgacatttcacgcaagatagaaaaatcggatgagtaaacaagtataatgaaaaagaagtttatgatcatctgttcggaaacgaaacaaaaattacaaagggggagtaatcaatgaaaaagatgatgaagaaaatctgggcatgtctattagcgtgcacaatgatcgtgacgatgttaccaggtttgatggtgaacgtaaaagcagcaacttcttatgaactcaggatcggtgatacagaggttacggatgagaatttgtcaggagctggatggagttatgatccgagtacaaagacacttacgttggatggattaaattgtcaaaaatcaaaagttggtgaaggtgtgatacattcatacagagatttgaatcttgtcttgaaaaatgagaacaagattgaaaatttggcttcagctttaagtggtaactggcaatctggtatccgtgtgaatgggaaacttacaattagtggaagtggtagtcttattactacagggggaacaggttacacgagtcatggaatttctgtaaacagcctgattataaatagcggaacgattacagcgactggtcaggaggcagaaggaagtagtggaatatatgcaaggaatggagttacgatcaatggaggaaaattgatcgcacaggcaagtacttcatcagggggggcaagccgaggaatcgaatgtggcggaacttttactttaaatggaggtaatgtgacagcaagcgctgacggagccactgagaatagttatggattacaagcaggtagcaccgcaaagtttgagtatgggacaattcatttaaaaggaataacagcagcatataaagctaataaaataagctcatcctcaaaaacctatgatttttcaaagaagaaaacagtgacagatagtgattttacattcactgcaccaaaagatttgatttatgatggaaaagaaaaggcggcgacagtaactggaaaagatggaattgcatgtggtaatatcactgtaaaatattacaatgaaaacggtcaattaatgacagaaacaccgaaagcggtaggaacttacacagtaaaagctgatatttctggaaatcatgagtataacgaaatatctaatgttacaaattcgaaatggatatttacaatttcttatggaaccgcaacaaaggatatgtattctacaacgggcatcagtgctaatggttgggcaaaaggagcagttacagttcgtgcagcaagtggttatacgattggaaaaacatcagatctgtttgaagaaagtattggattttctacaaatgaaacagaaagagtattttacataaaagatacaggtaccggaaaagtatataaaggttccatagactataaattagatacaaaagcaccagtgatcagtggaattgaatcagcgacagaatatcaagattctgcaagatttacggtgagtgatgcagacagtggattagcggatgtaaaagatggtgaaacttctttgggaaatagcggtacttatgaattaacaacggatggagtacatacgatcaccgcagtagatatcgcaggaaatagcacaacacaagtagtaaaagtgtgtgcggatcataaatatcctaacattaaatatgaatggaatgaagataacagcaaatgtaaggcaagcgctgaatgtactgattgtggcaaaaaagttaatgagacagttgatgcgaaagcaagcattacaaaacagcaatcttgtacagacgcagagattacaacttatacagcaacatttacaaacaatatatttgcaactcagacaacaggaaaacagaccaaaggagctttaggtcatacacaaaatgctgatgatggagattgtacaacagcggttacatgcaagagatgtgattatgtgttcatccctgccaaagaacatgattttagtggagaatggcagagtgatcagaccggtcattggaaagcatgtaaaaatgatggttgcacaaaagtagataagaaagcgcatacagctaatattacagaaccaacagaaaatgaagatcagatctgtacagagtgtggttggatcattgcaaataaattagggcatcttcataaacgtcatttggaatatgtaaaagcaaaagaagtaacgtgtacagaagatggaaataaagcatattatatttgtaaggaagacaagaaatgttttgcagatgagaatgcgacaaatgagcttaatgaatctgatattgtgatcaaagcaagtggacatgattatggagatccggtttatacatggagcaaagatcatacgacatgtagagcaacgatcatttgtaaaaaatgcaaggatgtaaaagcaaaagaagaagtgaagacgacttctgaagtcacaaaacagcaatctgaaaaacaagcagagattacaacttacactgcaacatttaccaatgaggcatttgcgactcagacaaaagaagtacagacaaaagctgtggcaaaaccaaaagcagatggaaacaaaattaacgtaaaagctaataaacttacattaaattccaaattcagtatcaagacgggcaagtcaattaaagtaagatggggtaaagtaaaaggtgcagatggatatgatgtatatttatcatattgtggaaaggataagatgactcttgtgagatcaacaaaatcttcatccgttacgatcagcaagcttgacaagaaaaagataaatcagaaaaacaatgtaaaatgctatgttgttgcatacaagatagtaaaaggaaagaaacaggagattggaaaaacaaatctattccatgcagtcggaagaaaaaataaatctgagacagagccaaagaatatcagattaaagaaaacttcttatgtattagcaacaggaaaaacagcaaaaatcaaagcaagtattgttaagaaaaataagaaacttccagtaatcgcacatacagaaaaaataagatatgccacatccaatgcgaaagtagcgacggtatccaaagaaggaaagatcacagcaaagaaaaaaggaacatgctatgtatatgtatatgcaattaacggatgcgcaaagaaagtaaaagttacagtaaaataatatagtttagttaaaaagctttcgaagactatgattttgatggttttcggaggctttttttatttcataggaaatctacaaagcaggattctttcttgacaatcatatatcaattttctgcaaattttgataaaatatagaaatttgagcaagtaaaagaaacaacaatgattgttggcattgatgttagcagtgaaaagcataggattaaaggcaggccttacagaagccagaatggagatacaggatctgatagaggattatgaactccggacaaaaaccatggaaaataaagttacagtttttcgttgcaaaaaatttgtgctaaaatatatatcagaaagaaaaatggaggacaataatatgatttcatttgcaagtgactatatcgcaggggcacacccggtaattatgcaaagattactagaaacaaacatggaaaacttgagtggatatggaacggaccaatattgtgcacaggcaaaagaaaagatcaaacaggcatttcaatgtccagatggggaagtctttttcttagtcggaggtacacagacaaatcaggtgatcatcagtacaatgcttgctccttacgaaggcgtgatcgcagcaaaaacaggacatgtcagtgttcatgaagcaggagcgattgaatatagtggacataaagtgatcgaattagaagaaaaggacggaaaattagcagcagaagatattaagaaatgtatcgaaaatttttattcagacgataatcacgaacatatggtatatccgggaatggtttatatctcatttcctacagaatacggaacattgtattcaaaacaggaactgacagagatatcccatatctgtagaagctataaaattccattattcattgatggggcgagattaggttacggaattgaaagcaaagaaaatgatctgagaccagaagaaattgcgaaactaagcgatgtattttatattgggggaaccaaagtaggagcattatgtggagaagcagtcgtatttccacataataatacaccaaaacattttgtgacacagatcaagcaaagaggcgcattattagctaaaggaagattgctgggaatccagtttgataccctgtttacagacaatctttattttgaaattagtaaacatgcgattgagatggcagagaaattaaaagaagtctttcataagaaaggatatacatttttcttagagtccccaacgaatcagcagtttatcatccttgagaatgagaagatgaaagaactgagcaagaatgtagaatttggtttttgggagaagtatgatgataaccatacggttgtgagatttgcaacaagttggtcaacagatgaaagttcgatcgatcagctggaagaatatttataattaattttattatagaagaaatgcagttttgtatgtaggaaatgcagaactgcatttttattttataggagaatcttatgaatgaaaagtaaaaaaaagttgatggataaatatagaaatgatataatgaaaatatggtaggttaaaacaataaaggcaggataggaaaggagttaactatgaagaaatttttatctatgacagtgttacttctgatcatcgtacttgcaggatgtcagaaggatcagacaacaaagccaaagcagaagacgaatacaaatgatgcaaaggttgtaaaaacagagaaactagagacgatgagctacgaggatttttacgagaatctaaaagaggaagaattgaacgacttggatatcatacaagttgctgatcagaaaatcacagctgtgataggtaattactttcttgtgctgaatgagaacaagaagaatcatacatataagatcaataagatcatagatttgcatccatatggaatgaattattattataatgaagaatcaacaatgttttatccatccaaagatggagaaaaatatctaatttataatgaatgcagatataattcaaaagatcaaacaatcaatgctaaagatgataaagaacttaagagtatagtcattgatttaaagaaagatgaggtaacataccgaaagggaaatcatctggaaaatttgaagaagaaggaaggcgtatccaaaaataattatccaaagatagcaaaattttcaaaggatatgaagcagtatgcaaaaaagaaaaaatatgagctgatgacaaacttctatttaaaatcaggaaaagacagattctgggtaatgaaaccattctatgaagaaaatattttagaaggcaggatttacaggtatcatgcagggaaaataaagtgcgtatttaaatttcgggaaccataaatataacgtatctattataaaatgaaaaatgccatccatatattgtagctttgataaagaaaaacacaatatatggatggcaaaaataattgtcgaaaaaacataaaaaagctgttgacatactgtatacagctatggtaagatagtcaacgtcgctgaaagagcggcaggaaaatataacatcggagctgatctggcttctgaaaagaataaaaaaacttcttgacacaagtgatcagatgtgataatctataaaagttgctgacggagaacgatcagaacaatagagatcagatctgaaagaaaagttaaaaagttcttgacagatgagattagaaatgatattatataaaagttgttgcagagcagaacagctcagaacaacaaaataaattaaaaaagttcttgacaaacgaaaagaactgtgataaaatgataaagcttcttacacacaagaagcggatcacaaaaaagatctttgacaactgaacaataagacaaccttgaaaattctaatgaattttt

SEQ ID NO: 629 - DNA, 11504 bp, Unknown
  gut microbiota DNA sequence
aaaaacagagataaaagataaatttaaaacttatcttttatctctgtttttcttaacttaatgacattgcgatccagctgtgattctatcaaaactcctatggaattcgattgttgctcacatgctatctttcttttatttctgccacatacaggcaagtctactctacaaattccacaattcaatcgttttcagtagtttttctttcgtatccacatcaagttgcatgatcgcattataaagtttacgatcaagcgcagtttctgaatattccggatccagagtaccaacgagagaatccagagagcagccacaaagcttcgcataatatgttaaaatacgcagagacatagcagtacggttattttctacattgctgatataaccaggcgttacaccaagagcttcagcaacttgattttgtgttaaacccattttttgacggatatgtttgatatgagtaccataattttcagagttcatatgatagagtcctttctatattattcataacaaaattatataataaatgatgatgaaaatgtagctactaatagaatagaatctgtggaatagatataaattgaagctgatgatataagtgtcaaaagtataaatcgcattctcttcaaagaaaagcatatctatcaaaaaataaaagacctgaatcgcatggaagctatgcaaagagctgtcacagaccttgtgatcctttgttgttcgtttggaatgttatttttaatgtatcatttatatcaggcaggaaatgttacatttgatgctatgctgcttgcaacgatcgctatgatgggttcttttggtccagtaactgcattgtcaagtctgtcaaacaatttaaaccagacattagcaagtggagaaagagtgttatccttactcgaagaagaaccaatggtagaagaatcagaaggagaagctgatataagttttgaaggtgcatccgtagaagatgtaacctttgcctatgatgaagaagtcatcctaaaagactgcaacatcaatatgaaacaaggaaaagtcatcggaatctgtggaaaaagcggctgcggaaagtccacactgttgaaacttctgatgcgcttctgggatgtaaacaaaggaaacataaagatctcagaagaaaacgtgaaagaaatcccaactaagacactaagaaacacacaatcctacgtaactcaggaaaccgaactcttccacgactccatcgccaacaacatagcgattggaaaacaaggcgcagcaagagaagaaatcataaaagccgcccaaaaagcctccatctatgacatgatcatgtccctgccaaatggctacgacaccgaagtcggagaactcggagacaccctgtctggtggagaaaaacaaagaatcggaatcgccagagcctttctgcacgacagcccaatgttattactagacgaaccaacaagtaacttagattctttaaatgaaggaattatcttgaaatcactcaaagaagaaagtaaaggaagaaccgtagtactagtatcccatagagaatctaccgtgggaatcgcagacgacgtgtatcatatggatgcaggaagagtttcgtgaagaagtgaaaagtgaagaatgaagtatcttgtctgtaagtagtgtatactgaaagatttgagtgtataaatagagaaagaacaaagaaattcgtttttctgaccctaatacattgttctttctctatttatacatcaataaccttcagtatacaatttaatcaattccacaacaatatcaacacacatatccattccttcaacgctaatatgttcataaggtccatgataagcatgtccaccagttccaagattcggacaaggaagtcctcgaaaacttaactgacatccatctgtacctccgcgaatcggcagaaccaatggagccacaccagcagtttcacaagccttctttgcatttttgatcaaatgaggacaatccttaataatctcggccatattttgatactgatccgtaatggttaaagtaacgcaaccattaccccatttttcgttcatatttttcgcgatcaaacgtaatgtctgtttcttcgcctcaaacaacccccgatcatgatctctcacaatgtaatgtaatgttgcatgactcacatcaccattcatatcgatcaaatgatagaatccctcataatcttccgtgtttctaggagtctccatagaaggtagacaagagttgatctccatagctacaagtgaggcattgatcatcgtatccttcgaagaaccaggatgtacattaaaaccagtgatttcaaactcaactttacaggcattaaaattttcaaactggatctcaccctcggtatcgccatccaaagtataagcaaaatcagcatcaaaccgcttgatatcaaaatactcagcaccacttccaatttcttcatctggagtaaatgcaatgctgatcggaccatgaggaatctgtttactgaccagacgttctaccatcgtaagaatctcagcaatcccagccttatcatctgcaccaaggatcgttgtaccatccgatgtgatcaaagtacgacccttgagagaagaaagatgagggaaaactttcggatcaagaaccagaccactatctccaagaggaagagcttctccattataattcttcgtaaggatcgggcggatcgggtgatcacagaaatcagaaacagtatccatatgagcaataaatccgatcgcaggacagttttcatagccctttgtggcaggtagcttaccatacagatagcatttatcatcaagatagacatcggtaagaccaagtttattcatttctttttccaagatcctggcaagattaaactgacaatcagaagaagggacagtttggctgttttcattgcttggagttaaaattttgacgtaatttagtaaacgttcgtaagctttcatgattatttattcacctcgtgataatttcttttgcgttttataaagtatatagataatataacacatattttcttcagttttgtaagattaaacagtaaaattaatcttcaattttttctatattgatgagtgtatcaaccatcgtattaaactagactctcgtagtctataggaatgcaccagttgcagcaatcggaattgtattcaaagcaaatatgtttattacatttttacaaatgggactagccaatgaagttttgctgatcccgttattgtatcttttaaatgcggttgacggagtcatatatgggcaggcattgacagactatattgcagtgatattgtccacgatcatatggaagcaatatcaaaatagtataacgaaagaaaaagactccgtaaaatagttcgaaatacgaaatttgtggaaattgatgaaaaattaacaaataaataaaaaacagtatttatacaaatggcttaaaatggttggattgaaaataatatgtttgtgaaaatgctgctttttttgtgcaatttctacaaaaaagaaaagaaaatagaaaaagaataaatcgttttgcaaaaaaaatcccttgactttttgtcggattggtcctaccatataagtatagtaactggtaggaccaatcttactacgtcgcgtatacgctgaaaaataggatatcggaacccgctcatatttgaaaagaaaggagagaacttaagatgttcattcactttttattagcgatgcttcctatcatctggctgatcattgcattaagcggattaaagatggcaggacatgtagcctgtccgatcgctttgatcattacagtcattgaagcactttttttatggaagcaaaaaattattgatgtcctcacaggagggttagaaggatttgcaatggcaatctggccaatctgtctggttatcgtggcagcagtgtttacttacaacttggtcgtacatacgaaaaacatggaacttattaaaaaaatgcttacttctgtatcaagagataaacgagttcttgtgctgatcatcgcatggggatttggaggatttatggaaggtatggcaggattcggaacagctgtagcgattccagcaggaatcctttgcggattaggatttgaaccaatctttgcagcaactgtttgcctggtagccaatacgacaccagtagcatttggatccatcggaattccaacggttacagcagcaaatgtaacaggatttagtccacatatgacagcatcttatgttgtattacaacttgcgatcatggtaattctcgttcctttccttgttgttttcatcacaggaaaacatgaaggagctaaaggaatcggtgattataaagaaattttatttattacattgatgtcaggtctttcattcttagtaccacaatatctgacagcaaaatttgtaggagctgaacttccagcagttatcggatctgtatgcagtatggcagtaacgatcatccttgcaaaagtaatgctgaaaggtaaggcaagtaaatttgatgtagaaatcgaagataatgatgatactacgatgacagtaaaagatgcatttgttgcatggagcccattcattcttgtattactgttcttacttctgacttcaacattagtaccagcgattcatgatccattatcagcgatcaaatcaaatgtaccaatttatagtggagagggagcaagcccatatacatttacatgggtatcaacaccaggagtgctgatcttgatcgcagcatttattggaggactgattcagggatgtccagttggtgagatctttgttgttttaggcaagacagtgattcagatgtttaagacgatcattacgatcatggcagtgcttgcgacagctaagatcatgggatacagcggaatgacacagtctatcgcagattttatcgtacgtgtaacaggaagcttttatccattagttgcaccactgattggatctatcggaacattcgtaacaggaagttctacatcaagcagcgtactattctccaagttacaggcaagtacaggagcagaattaaatatcaaccagatctggctggtagctgcaaatacagttggtagtaccgcaggaaagattatttctccacagagtatcgcagtagcgacagcggcaacagcaacggtaggaaaagaaagtgaaatcttaacaaaggttatcaaatatttcgtattattcgttatcatctatggattagtttgctactttggagtcaaattgatctgaaaatgataaagataaaagatattaaaaagctataaacttttaaggaggaagataaatgagtgagtatcagtataacaaagtgacaccagagatgatcgagaaattcaaagagatcgctccaaaacgtgtcttagtgggtgatgaaatcaatgaggatttcacccatgatgagatggcaatctacggaaaagctagaccagaagttttagtagaagcaacatcaacagaagaagttgcagctgtcgttaaactttgtaatgaaaacaaggttcctgtaacaccaagtggtgcaagaacaggattagtaggaggagccgtaagtatcggtggcggtgttatgatctctcttacaaagatgaacaagatccttggatatgacaaagaaaactttgtagtgaagattcaatcaggagtccttttaaatgatcttgcacaggatgcagaaaaacaaggattattatatccaccagatccaggtgagaaattcgcaacagtcggtggaaacgtagcaaccaacgctggtggtatgagagctgttaagtacggatgtacaagagattatgtacgtgccatgacagttgtattaccaacaggtgagattgtaaaacttggagctactgtatcaaagacaagttcaggatacagcttattaaacttaatgatcggttctgaaggtactttgggtattatcacagaacttacattaaaagtaattccagcaccaaaatcagtgatcagtctgatcattccttatgaaaacttagaggattgtattgcaacagtaccacagttctttatgcatcatctggcaccacaggctctggaatttatggaaaaagaagttgttatggatactgagaagttcttaggaaaacaggtatatccaaaagaattagaaggaacagagattggagcatatttattagcaacatttgatggaaattctgaagaacaactggaagatatcattgaacaggcatctgaagtagtattagaagcaggagcaattgatgtattagttgctgatacaccagccttaaagaaagatgcatgggctgtccgcggagcattacttgaggcaattgaagcagatactgtactgttagatgaatgtgatgttgtagttccaacaaataagattgcagaattcctgacatatacaaaatcattagaagcagaagctgatttcagagtgaagagctttggacatgctggagacggtaacttacatatctatacatgcagtaatgacatggaagaaggagagtttaagaaacaggttgcagtctttatggataaagtatatgcaaaagcaacagaattcggtggaatgatctctggagaacatggaatcggacatggaaagatggactacctagcagagtctctcggaccagttcagatgaggatcatggaaggtgtcaaagaagtctttgatccaaatatgatcttaaatccaggtaagatctgctacaaattataattttaataggaaacgatcaatcaaacataaacaagtaacataaaacatatacaaagcttttttaaggttattttaggaggatatcaagatggcatatttaatttcagaggaagcaaaagacttattacaggatgtacacgagttctgtgaaaacgaagtaaaagaacagtgtaaagcatacgacgtcagtggagaatggccaaaagaaatttatgacaaagccattgaaatgcagttacattcattagaagtaccagaagaatacggtggaccaggattatcaagagtagacgttgcggcactgatcgaagaaatggctatcgcagatgcaggatttgcaacaacaatttctgccagtggattaggaacaaaaccagtactgatcgcaggaaatgaagaacagaaaaaacatgtatgccagaagatcattgatggtggatttggagctttctgtttaacagaaccaggagcaggatctgatgccagtgcaggaacaacaacagctgtcaaagacggagatgagtgggtattaaatggaagaaaatgcttcattacaaatggaggaatcgcttctttctactgtatcacagctatgacagataaaacaaaaggtgtcaaaggaatctctatgttcttagttgatgctggaacaccaggattaagcacaggtaatgaagaaaataaaatgggtatccgtacatcaaacacatgtgatgttgtattagaagactgtcgtattccagctgcaaacttagttggagaagaaggaagaggattctcaatcgcaatgaagacattagaccaggcaagagcttggatgggatgtgttgcaacaggtatcgcacagcgtggtatcaatgaaggtattgcatatgccaaagaaagagttcagtttggtaaaccagtcatcaaaaatcaggcaatgcagtttaaagtagctgatatggaaatcaaaacagaaacagctcgtcagatggttgcacatgctttaacaaagatggatatgggattaccacattccaaagaagcagcgatcgcaaaatgctatgcatctgatatcgcaatggaagtagcttctgaagcaattcagatgttcggtggatatggatacagcagagaatatccagttgagaaattattaagagatgctaagatcttccagattttcgaaggaagtaacgaaattcagagaatcgtcgtagcaaataacacaatcggaagatagaacataagaaggagtaagactatgaacattttagtatgtatcaaacaggttccggatgattctgtagaaatccatttaaatgcagaaggaacaccggatttagcaaacgtaacacctgttgtaaatgcatttgacacctatgctctcgaaatggcagcacgattaaaagaatcctctgaaggagaagtaacagttgtatgtgtcggagaagatagtgcaaagaactctctgaaaaactgtcttgcagttggtgcagatcatgcatttttagtaagtgatgatgcattcaaaggatctgacacaacaggaatcgcaaatatcctaaaaaatgtgatcgcaaaattagaagcggacaatggtcagaaatttgatcttgtattctgtggaaaagaagcaacagatgctgcacttggacagggtggcttaatgttagctgaagaacttggaacaagtgtgatcacaaatattacagaaatcgctttagatggcgataaagtgacagcaaaacaggaaacagaagaaggataccgtacagtagaagcttctgccccatgtgttgtaacagtcacaaaaccagaatatgacccacgttacccaacgatcaagaataaaatggcagcaagaaagaaaccaatcggcgatattaaagaagctgatcttgctgatcttgaaaaagaaaaagtcggagaatctaatgcaaaggttcagatcgttaaattatatgaaccagcgaagaaagaagccggaatcaagattcaggaagaaacaccagaagattcagcaataaaagcagtcgctatgatggcagatgccaaagtattctaggaagggagaacaaaggacatggcagaatgtaagaatatcatggtatatgtagaaactgcagaaggaaatccagtcaaagttggattggaaatgttatctccagccaagaaacttgccgataaagttacggcagttgttattggaggtggagtagcagatgcagcaaaagaagtagcaaaggccggagccgatcaggtcatctgtgtcgacagcgaagattacaaagagtttaatctcgatgcatatgctcaggttttagtagaattagtaaaagaagaaaatccagaagctgtatttgtaggtggaacacaggatggaaaagatatcgcaccagttgttgcagcaaaatgtaacacaggatgtgcatccgatgtattagatatcaaagcagaagatggagaagttatctatacatgcccactttatggtggaactgtattggaagatgtaaagatcaagacaacaccacagatagcaacattacgttccggagcattccagaaagtggaagacccaactgagggtgaagttgtagccaaagaagtaaaagtagctgatgatgcgatcaaagcaaaaatcacagaaagtgtaaaagaaatcgcagagacgatcaacctggaagaagcagaagttatcgtatctggtggacgtggaatgggaagcaaagaaaacttcgcattagttgacgatcttgcaaaactcttaggaggagttgtaggagcaacaagaccagccattgaagacggatgggtatcaaagattcatcaggttggacagtctggaaagatcgttgcaccaaaattatatattgcatgcggaatctctggagctacacagcacgtatcaggaatcatgaattctggatacattgtagcaatcaacaaagatgaagatgcaccaatctttgacgtagccaatgtaggaatcgttggagacgttatgaaagtgcttcctgttatgatagaagaaatcaagaagattaaggatgcacagtaaataaatatctatttttaaaatagcttgtttctatacttaatgtatattcaccatttataaaaggtcagattatggcttacgccatagcctggcctttctttccgtgtataattaaataagaagaaacttttatatatcacgtccacaatgccggtaaaatgccagcatatacaatccacataatccaacaagtgcatacacaactcgtgacagccagctcatatctccaaacaaaaatgcaacaagatcaaatcggaagaatccgatcaatccccaatttatagcaccaatgatcgtaagcgttaaagctgtacaatccaaacatttatttcccataataaaatcaaacctccttgatgtgaaatgtaaagaattccagtatagtatttacaaaaaaaaaggattttatgtacaaggtattaaaaaccttaaaatacatttacgtttaaaaaaaaagagagtataatactcatcaaagaccatgtctgactaccgtgaaggtaaaggaggaacaaaggcatgaaagttatttttttagacgtagacggagtattgaattcacagcaattattcgagaaatgcgaagatgatcagctgatttctgtagatgaggataacattaagaatttaaaaacaatcgtagatgcaacaggagcaaagatcgtattatcatcatcctggagatacggatgggcagaacacagtgatgctgtgcaggactggtgtcagattctagttgatatcttagcgaaatacgacctaaagatcatagataagacagaatacctaagcagtggaagaagagaagatgagatcaaagattggctggataagtgtgaagagaagattgaaggttttgtcatattagatgatggtgcatatgaatggcatagacacggatttgacaaacatctggttaagacagatttttgtacaggcggattaagagaagaagatgcagacaaagcaattaagatcttaaataagaaaagattattcagctttttcaaaaaatactaaaggagagttaacagatggatataaataaagtgacaacagcaatgattgattactatcaaggtcagccaaagagaatccagcatttcttgaaagtacacgcgtatgcaaagctgatcggagaacaggaaggattagataaggaaattttagacatcctggaagtggctgcattaacacatgatatcggtatcaaaataagcgaagaaaaatacaacagtagtgcaggaaaataccaagaggttgaaggaccggcagttgcacagcagatgctggaagacttacaatatgacaaagcaaaaacagacagagtctgctatttgatcggacatcaccatacatatgatcagattgacggtattgattatcagattcttgtagaagcagattttttagtaaatcttgcagaagaacaaagttccagagagacaattgagtccgtaaaaggcaagatttttaagacaaaaacaggaatctggctgataaataaaattttttgaaaaaaaagcttgccaagagtcgaggaatatgataaagtatagaagtcgcagaaatgagacaacaacttaactgcccagatagctcagtcggtagagcagaggactgaaaatcctcgtgtcgctggttcgattccggctctgggcattgtatgcgggtgtagttcaatggtagaactccagccttccaagctgatcacgtgggttcgattcccatcacccgc

SEQ ID NO: 630 - DNA, 40149 bp, Unknown
  gut microbiota DNA sequence
aatttctgatataattttttatatccatataatacttatccttttgaaaggatttttggttggtcgccattcgtgttatatggattttttctaaatcataagcatcaccgcccttcaataaataattcgttacctctgatccatatgatacttctatattttgaattcctctccatattgtatcttataaatttttacaatataataatcactccacttactgttatcttcttaccggaattattttgaatatatatagaatatgtatcttttttaggtacttttatcttttgaatgtcatttgattttatttcctttaatgctaccttatttctactcttattgactattccaactttaaccctactggttgaggaatatataaattttaatctaacatatttattagcctctagtttataacttccaattcttttttctacattaggattaatactaagcgataccttatgtcccacagaaaatgattccatttcttgatctatttctacatattctatatttgattcttcttgatctactcctatctccacttcatcatctgcctttacattaataggaataagcattaacattatcattcctaaaactaatataaaaaactttttcattgtatatatcctccgttatctctctaaaatttcaatttctcctaataattcaatattttgatcattataattactaacaaaacattgatactttccacttttttcaattgaaaacttataatcaatttcttctgatctgttaacatattttatattatttgaaaaatcccgtattcctgcctctaattttcttttgtttgcatctttatcagtcatatcaaagactttaaaaaatactttttgtcctttctttaaataaatccatttcgtttgtactcgttctttctttttcagaaaatccaccccataaattgaaccatcatcttccaaatatttagtatggaaaattcttggatcatatccatatcttttatgtacaactaaattcataacctctggtgtaccatctaccacaatttcctctgttgtatttctatctaaaattctataccccaattgcattgattccattgcagtaacaacactgattcccccaaataatataaaacacatgctcaaaataaaacctatgatccatttctccgtattcattctcctaatattatttgcgattaatattcttcgttccaagttacattccccaattcctgcacagatatattcctggaactgaaattgatgaatcataatatcatagattgtcttaaaatatcccttcttgcttcccgtctcattgatcacactgaaatcgcaatagacttcactccattcattcactactttaaatatttgacgttttaatggataaaaccagtagatcagtaaaatcattctgcataatagtttccaaaagatatccttatgttttatatgtgtcagctcatgcaataaaataatctttagctggtctgtggtatattcttctgtcggaagtaaaacttttggattccttattccatataccatcggtgtctgtacaaatgggttgtattcaacacttacagaattatgaatctcaaatttttccattaattctagcgcttgctttgaaatccattctctacatgtttttcctgactgacatatatctaaaaataccctctccttacgtttgcttttccatatgctgattccaaatcctattccccatatccctaccatacatattgcaaaatttcctatcctgtcatttaccaaaaaggtaattccatcccaaagaaccgtccttaagattacaattggaaaaggaatcaaaaaaaacaagatgacaatctttaacaatccataattcagcctgacaaatcctttttcctccatctttttacatagaatcttccatataagaaacaatatacttcctatgagaagacagataaataaatagcacaatatataaatgctaatctgctgaatcatccagatcatcgatcaacctccgtaatttatcattctcctcttgttttactacatcagaaagagctactgaaaattcatcccatgaatcatcaaaccatacttttttcatctgctcaaactgcactttatgataatctgattcatcaactttcgaataaataaaacttcttcttccttctttctttgtctctatgaaatctttcttctccaatcttctcaaataagtcgaaacactattcctatgatattctttccctgtattcctttttatttcttccaccagatcctgtattgttactctgccctgtctcttttcaatattccaaatagctttcattacaatcgcatttaatcctgttaaatattcaattgccatccattgatcctccttctctgtgtttatatttatacaatagcatgattatgtttaattttcaatattaaacttatattttagtgataatataaatcaataaattgtacgccaataacctttaatatacacacctgtggtggtttgaatagccgtccatgtatatgataaataataataaggatctcccgaccattagaattctgtcaaaatgacatgtcgaattctaatggtcgagagatccttattatttatcatatacatttgaacgattatcattcaaattactttttatgtttcccaaagaaacctttatgttctttatgagcttcttccttcttaagaacttcacccatagcttcctggaatttctgaagagctgctctttgctctccgtttaagtgttctggtacctgaacgacaagtgttacatagtggtctcctcgtacattcttattacgtaccattggcacaccttttccttttaagcggattctggtgtctgtctgtgttcctggtttgatcgtgtattcgtatggtccatcgactgtaggaatctggatcttaccaccaagtgctgcctgtgtaaaggaaattggctctgttgaatagatcgttgtatcctgacgctggaattttggatgtctttctacgatcacttctactaacagatctcctcttgggcctccatttgtacctggctctcctttgccacggatacggatactctgtccgttgtcaatacctgctggtactgtcacttcgatcgtcttacgattgcttacataacctgttccatgacaatctggacacttatcacgaatgatcttacctgttccatgacaatctggacatgtctgaacattctgcaccgttccaaacatagactgctgtgtaaatacaacctgaccacgtccctgacattttggacatgtttctggacttgtacctggttttgcaccggttccgtgacatgttgtacattcatcttttaatgtaatttctattttctttgatgtaccaaagactgcttcttcaaatgttacgtggattcttgcacgaatatgtgatccctgtgtcggacgattagcctgtcttgctccgccacggcttcctccaccgaacatacctccgaaaatatcaccaaagatatctcccatatcaccaccgaaatcaaaaccgccaaatccgccgccattaaatccgccagcaccctgctcaaaggcagcatgaccatactggtcatactgcgctttcttttcagagtcgcttaatatctcataagcttctgttacttctttaaatttggcttctgcctctttatctccaggattcgtatctggatgatatttcttggcgagttttcggtaggctttctttatttctgatgctgaagcattacggtcaatgcctagcacttcatagtaatctcttttttccgccatttttagtctaccttctctttaaaattatacttctttgtagtcaccatctacaacatcatcgtttgctgctccctggtttgctcctgcatctgctgctccctgagctccctgctgagcctgtgctgctgcttcatacatctttgtaaataaattctgagcacttgtcatcagtttgtctttcttagctttcagatcttcaacctgagcatctgtcatatcctgatcttttgtagcttctacaagatcttttaaatcttttaagtcagcttctacagctgctttttctgtaggatctactttatctcctgcttcttctaaggctttctctgtctggaatacgatagaatcagcttcgtttcttgcatcgatcgcttctttacgtttcttatctgcagcttcgaattcagcagcttcttttacagctttatcgatatcttcatcagacatgttagatccagctgtgatcgtaatgtgctgttcttttcctgttccaaggtcttttgcagatacatttacgataccatttgcatcaatgtcgaatgttacttcgatctgaggtactccacgtcttgcaggtgcgataccatctaatctgaatcttcctaaagatttgttatcttttgcgaactgtctctcaccctgtacaacgttgatatctacagcactctgattatcttctgctgttgagaagatctggctcttctttgtagggattgttgtatttctttcgatcagacgtgttgcaactccacccattgtctcgatagacagtgataatggtgtaacatccagaagaaggatatcaccggcaccagcctctcctgctaatttaccaccctgaacagaagctccgatcgctacacattcgtctgggttgattcctttgaatggttcttttcctgttaactgctgtactttatcctgtacggctgggatacgtgtagaaccaccaactaataatactttgcttaattcagaagctgtcattccagcatcgtttaatgcggagtttacaggtcctgctgttctctctactaaatgagctgttaattcatcgaatttcgctcttgtaaggttcatatcaaaatgttttggtccttcagctgttgctgtgatgaatggcaggttgatgtttgttgttgttgcagaagataattctttcttagctttctctgctgcttcttttaatctctgcattgccatcttatctgttgataagtcaacaccttcctgtttcttgaattcatctaacatatactgtgtgataacgttatcaaagtcatctccacctaatttgttatctcctgctgttgataatacttcgatgacaccatcaccaatctcgatgatagatacatcaaatgtaccaccacctaagtcatataccatgatcttctgttcttcttcgttatcaagtccataagataaagctgctgctgttggctcgttgatgatacgttttacatcaagtcctgcaatcttaccagcatcttttgttgcctgacgctgagcatcattaaagtaagctggaacagtgataactgcttctgttactttctctcctaagtagttttcagcatctgattttaatttctgtaagatcattgctgaaatttcctgtggagagtatgctttgtcatcgatctgaactttgtaatctgttcccatatgacgtttgatagaagcgattgtcttctcagcgtttgtaactgcctgacgttttgcaggttcaccgatcacacgttctcctgtctttgtaaatgctactacagatggtgttgttctcataccttctgcatttgtaataacggttggttttccaccttccataactgctacacaactgtttgttgttcctaagtcaataccaataattttacccatgatctatgtcctcctaagatttcttcttattctatatataatataaatattagttagctacttttaccatactatggcgcagtacattttctttgtacatgtaacctttctgtaattcttctgcaacgatgttctcaccgaactcatcatcttcgacatgcatcactgcgttatgaagatttgcatcgaattcttttccttgcgcatccattggtgttactcccacatcttccattacagcgacaaactgtttatagatctgttcgattcctttaacgaatgcggagtctttctcttcttcggatacggcttctaagcctctctcaaagttatcaataactggaagaagtttttctaaaactcccattgctcccatatcataacgctgtgtagcttcctttgctgtacgctttcttgcgttctcaaattcagccatcagtctctgatatttgtctttccagtcagctacggacgcttctaattctgcaatcttgtcatcagcggttgcttcctttgtctcttctgtttctttggaagcttcctcttttgtttctgtatcttttatatcttcagcagtctcttctgcgttctttacttcttcgttgatgttttcgtttttcttactcatcacatcacttcctttcttaagatttgtctttaaaaatatcatctaattcttcagtgaggttctttaaagtcttaacaactttcttgtaatccattctcttcggtccgatgataccaacggtacctgtacctccttctgcaagctcatatgttgcagttacgatactacagtccttcatattcttaaccggagattcttctccgatataaacctggattcctgtatgattatcagaatctgattccaaagttgaatcaaccagtttcgtcagtgccttcttctcaactaatgtatcaagaagttctgttgctgtatccggattcccaagctccggatattttaagatattggtcgctcctcctgtgtagatctccatatgatctgcatcatggatcgctttggcaatctcttcaagaatccgttctaacacatcctgtctgatccctgcctgctctctcatcgtctgaatcagtgcaaggttgatatcttgtaatgttaatccttgtaaaaatgtattcaacaatacattcaatttcagaacatcttcattcgaaagcggttcttctacctggatcatcttgttctttacgatattgccttgtgtaacgatcactgcaagcagatgttcgtgatccacctgagacagctgcacaaatttcagtgttacattctgataatgtggggaagaaaccatcgttgcataattcgtgctgtttgccaatgcattggcaacctgttttaataagacttccatcttatcaactctctgaatcaatgcctgcttctcttcgtgttcgctgtcacgttccgtcatcagctgatctacataaaaacgataacctgtgtcggaaggaattcttcctgcggatgtatgaggctgtaagatatatcccatatcttccagatctgccatctcattacggatcgttgctgagcttaaattcaactcaggatgtttggcaatggttcttgatcctaccggctcaccagtttcaaggtaattggcgataatcgctttcaatattaacttcttacgatcatttaactccatatcttcgcctcctgttattagcactcatttatatcgagtgctaacatctatatttaaagtagcactttcgcattttaatgtcaaccttttctttcaatttttttgaaaatttgttcagtttttttcttctctgaatagaatgtacaaaaggaggtacttttcatgcataaaaatacggattttcatatagaacaaactcgacttaatgatacatatcgaaaattaaattctggtaatgatttttcttcctatataaatgaacaagaaaaccaatcaccaacatactggtcttttttaaaattaagaattggcttttctattttgtttttattctttttaatcgcatgctttaagactgctcctgccaaagaattcaaaaaagttcaatctgctttttcccacatcaaccagaccgattcctacagtgagcatattctaaatcaatttgatttaaatttctcatcatgcatagataatcttcacaaaaagaagcgctagttttggcaaaataccaatctagcgcttctttgtttaaatacttcttttcatttttcttactataactgcagataagaccatcttccgtaaacgttcttcttattaattgtctgatatggacgaactttaatatagagggttttcttcttattctttacatatgttgtagcatttgacacatttttcttaaccattactgttttcaatacttttttaaatttcttgtcagtactgaattttaactgataaccattggctcctgatactggctgccacgttgtacgaactttattattttcattctttctggctataatatagtcataagataattctgtttgcgcttccttgatccctttcttatatacaagtttgattcctgtggaattcataaatgcatctgctgcaacatactttgtacttccctcaaatgtaaccgtcccaatctggttgattccagcaaaagcacctgtctctatcttttgaattcctgatgggattgtaaagtttctgatatttgctgaagcaaatgcctgatctttgatcacttttaatgattttccaaatgttacggattttaataccgtacattcatcaaatgctgacttgccgatcatggttacctgatctggaattaccacggcttccaattcactacatccataaaatgtattttcttcgatcgtagtgatcttagatggaagtttgacattctttaatgtttcatttctataaaatgcttctggtgcgatccatgtgatctcttctggaatttcaacatttgcatcttttccgtcatattttaataaaccgtgatcttttgtaatatacatatgatctttgtatgtaatctgatctggaagtaatttcattaatgactcaatcgtgatattcttcccaagagaacttcctaatgcgtaaaggctgttcgcatcaaaatcttttggagcaatttcaatggtatcaacgtgcatatcacacgcatccgctcgatccgttttatattttattttattaatactctttacagatgatggaattacaatcttctttaatttagaacaattgttgaactcatctccttcagaatctgtggaattatataatacagattgcatattaaactctgtacatccttctttgatcttaagctctgttctcttttgaggtactcttacaattccttttccatcttttgtatagattacaccctcgatactctgatatgatggatcattctttgcaactaccagattatttgctgacagatatgatacatttgccaattttaattttgtattaaatgttatggtatcaactgctgactgatcacttgtgacataccataacttatcgtcagtatcctcttcgagttttaatttaaagtctcctggcataacgatcgtctttaaacttttacaacttccaaatgccccctgcccgatcgtctttgtctttgatggaaccgttattttagaaatctttgttccatagaagcttcgaattcctatcgtttttactgttgatggaattgtcacagaattcaaattcttacataatgcaaacgcttcatatgaaacagatgtcacgccttttttaatgataactttcttgatcttcttgttccttcgaaatttcatcttcgcaggcattgcaccttttcctttgatcgtcaatgttcccttcttaagcgtgtatgttactttagttttcgcttccactttctgctgacctgctccgcttataaaaatccccattgtcagagatgcgatcatgcctgcatacaacatcatctttcttgttctcatccactgcctccttttgttttaattattaaattacaactttattatatcttatgtatttatttttgtacatagtaacgacagtgtttttactgtaaaaacgaaaactgccatacgaattttccttccattcatatgacagtttctattatcatttctttcttatctaggtactgtttctacgataatcccattttgttccatcgcatctttagcttctaatggcacttgatcgtccgtaaataccatattaatatctttgagtctacactgcatgacaactccatgttctgaaaacttgctggaatctgttaaaatgatagaattccttgcagaatccgccatactcttggcagcttcggcccttaacatatctccgcttgtgaatccgatgccagggatatacccatccgttcccataaatagtttatctacataaaaagcttctgcacaagttttcaccaatggtcccaccataacttctgcttccttctgatattcacctccaagaacgataacctttgtaacaccgccctctgtttctctgataaatctggcaatataggatgaattcgtgataactgtaatatctttcttagtctctgaaaggtattttacaagcaatgcacaacttgaccccgactctaccatgatcgtttccccatcagatatgatctcacttgctttttctgcgatgcgctgctttgtttcataacaaaaagccatacgattgctgatgtctgacatattcttcattgtcgcatatccatgttctcttgtcagaaaattcagttcttccaaagcatcaagatcttttctgatcgtgacctgtgatacctccagcatctgtgacaaagttgccacttctactttctttttttgatttacgatttcaagaatctttgtttgtctgtctgtcatgaaactttccctttcttcataatattaggaaagagccgtcttgcggctctttatccctctgcactatttatataatagcatatttttaattaaaggtcacagattcctttaccttctccataaactgcataccagtcattgttgaagtctgtcactgctttgtcaatattaggatttgcaaatacctgttttaatactgcatatggtgctgtgattgcttctgctccatagttaaatgcgttcttcacctgttcaacgcctttaaatgatgctgcaacgatcttacaatcatatccatcatcttcgatacggtcctgaagattgctgatcagttccatagggtctgccccgagatttccgatacgatttacatatggtgcgatatagttagctcctgctgctaatgcaaaatatgcctgcattagatcataaactgctgttgctgttacgttaacaccttctgattttaagatcttgatcgcttttaatccttcataggatacaggaactttgatatatacctgatcatcaatctcttctaagattctgtgtgcttctttaacgattgtttctgcatctaaagaaattacctgtacatgaaggcttctttctttcccgatgatctcacgaacctttctcatatgtccaaagaaatcttctggtgatgttttcttaacgatggatgggttgcttgttactccaacgattggcatgtggtctacaccgtctttgatctcttcaagatctactgtatctaagataaattccatgattaaaactcctcctaagtcttattacgtgtttcgttttttgatacttctatcttaccataattttcgaatatgtcaacaattattttcgtttaatgttttttaactttcatttgtaagtatattatttacttttcgtaagttttgtgataagatatacaaaagaatcagaaaggagaaatattatccatgcaaacaaatggtattgtttttaatatacagaaattcagcattcacgatggaccaggaatccgtacaacagttttcctaaaaggctgtccactgcgttgtaaatggtgtgcaaatccggaatcacagttgagccaagtccaaattttatatgataaagaaaaatgtgctcattgcggtacttgcacgcatgtctgtccaaaccaggcaatttctatgggagatgacagttatgtaggtattgatccatcaaaatgcgctggatgtcttcaatgtgtaaaaaactgtcctgcaaaggccttaagttatgaaggagaagcaaaagatgtagatgaagttgtcaaagtctgtcttcaggatattgatttttatgaggaatctggaggcggtgtaacaatctctggcggtgaaggaatggttcaaccagattttgtaaaggctttacttgcaaaattaaaagaacataagattcatactgcgattgagacaactggatatatcaagaaagagatttttagagaattggctccgatgtttgacttgcttttgtttgacgtaaagcactatgacagtgataagcattatgaaggaacccatgtccataacgaactgatcattgagaatttagcatgggcgatctctcaaggaattgaagttcttcctcgaatccctgtgattcctgatttcaatgattctttggatgatgcaaaaggaatcgctgctttattaaatcaggttggagcgaagaaggttcaactgcttcctttccatcaattcggagaaaacaagtatcatttactcggaaagacttattcttatgagaatgtgaaagcattgcatcctgaggatcttaccgattatcagcggatctttttagatgtaggtatcgattgctttttctaaccttttgaaaattccatatacacaaaaagctttggcagaacagtttcttgccaaggcttttttaattgtttctttcatgaatattatttcttctagtctatcacgaaaaacagcagttaaccctactcaagccaactgccattcctctatttttgtaaattataatgtctgctctgttcttccgatgatatcatcctgtgtcttcttagataatacattaaagaatgcactgtatcctgccacacgaacgatcaggtctttatgtttctctggatgtttctgggcatcgatcagagtttctctggatacaatattatactgtacatgatatccatgtaaacggttgaagaatgtacggatcaacatctctaatttctgcttgttttcttctgttgataacatctgtggtgtcatcttctggtttaataaaactccacctgtgatcttctctgttggaagtttcgcaaccgtcttaaatactgctgttggaccattcttatctgcattatgtgccggactgcttccttcggctaatggttcaaatgcatttcttccatctggagtcgcaatggttcccattccctgtccaacgttcgcactgatagatgatgttccaccataacgaataccgccgatcggtcctctgtggtaacgtgtgtttggatatttcttaatctcatctaagtaagaatcgtatgcttctacgactaactgatcgacatagtcatcatcatttccgtattttggaacgtcattaatgagcatttcctgaatcttcttgttctcttctgactggaaatcgtctaagattgcattccaaagctgttcttttgtgatcttcttctcttcgtatacaagtttcttgatcgctgcaagagagtctgccatattagcaataccaacctgaagtccagagataaagtcatagactgctccaccttctttgatcgtttttcctcttccaatacagtcatctgttaatgcagaacataaaacgtctggtacatctcgctcagatgctttatcaattgcattttccacaataacactataacgtgtcatttctctgacggtcttatcccatgctgctaagagatcttcatatgtttccatctctgtaaatttaccatatcctttggtaaatctcttaccgcttgttaagtcaactccatcattcatcgcacaaagcagaactcttgggaagttaatataagacataccggtacaacgatatccccatttacctggaacagctgtctctacacatccgatcgcactataattgtatgcatcttcttctttgacaccccaattgatgaaagatgggatgatgatctcatcgttatttaatgctggcataccaaatccgagtttcataacttcgatacattcatcaaagaaatgtttgtcgatattggcatgataacggactgtcaagtttggctgtgtcagtcttgtctgtgcaacggattgtaatactacaaaacttaattcattgacagcatctttcttatcagttgtctgtccaccaatcgttacgttttggtacattggtgatcctgcagaacttaatgtatgtgactgggaacgtactttattgatcgttaatgtcttgatccaaagacatgttaataattctaatgcatcttcttttgtgatttttccttcattgatatctttcatataatatggatacatatactggtcaaaacgtccataacttaaggaatgtccgttagattcgatctgaaggatcaactggataaaccaaacagactgtacagcttccctaaaggaatttgctggttcatatggaaccttggcacagatcttgctcatctgtaataattcttctttgcgttttgcatcagtttctttgtctgctaattcttttgcaagtttgctgtaacgctgtgcaaaatcacgaacggcttcaatgactgttaagactgctttataaaatacgttcttatcaatgctttctggatctgtgaaatctaatgctgctcttaattcttttactcttttttcatatcctttcaatccatcagataagattctctggtaattcactgccagatgggcatctccagcatttaattttccttccattccaaagacacctgtctccataaagacatctacctcttctggaagtaaagcttctcctctggcacgaagattgttattctcccagaacggtgcaatctctcttaactgttcttttgtctcttctgtaatatagaaaacatctccgtcgcgtttctcaaagagatctaattcattcatcacaaattccatggtatattctgggaagattggagcattcttgttctttgttgcctgatttcctgcgatcagggatttgtcatcaatgtaaatgctcattccttctaagatcttctgtagcattaaagctcttaccataactcttggctgattctggttttctttataagcttctgttgccagtacggctctctgtgcgtcaatatatggttttgcatcgagcacttcctcacgaaatgcctgcatgcgttctgttaatttaccgaaatgttctgtgttgttcatggtatctcctttcagaatgtttcgttcgtaacttatttttgttttgtttgtaattataagttagcatttttttgtttgtatgtcaatagatttggttcataattatttttattttcatttgaaacttcttttttgtgtaaaagaaaagatgcattacttgttgcatgtgatcactcccttctgtccgataattaactttattataacatctgatttctttttatctaccacaatgcttttttacataactctatgcttcttataataaatataagaagcaatcgcaggaatcaatgtaacgatcaaaataatccctactgctgctccaattggatcaacaaacttctgaaatccaagcagaatcgtcaaaactccaccgatgatccaccatttccccgccattcgatgcgtataatcccaattttcttcattatccaatgtccatggaagtttgattccgatcatatagttctgtctgcactttggaagatagtttccaacaacaatcagaactattcctagtaaaacattcgtccacagatttaaattgatcacgtctttatatcctaatgcatttccatagatcattaccccacaccaaagtgatacaaccggacagatacataggatcagatgataaatcttagacccaacattccttttcttaggatcaaattctgtgataacactacataaaatatgcactgccagcaaaaacagataaattcctgctactgcaaataatttactgctgtatcgatcggcctcgccgtttcttccaaaatgtgttgccacctgtgctggcaactgatcccataataagaatccagcaaacattggtaataaaattacaatacaacttgcaataaaaaacttcttattcttctttaacatcatgatttcctcccttcaattctgacaaccataacataacttcctcaacaactgatgtatttaacgtgtagtaaatataatttttctctttcttctcgaagatcagctctgcttttttaagaatcttcaaatgataagaaatggttgcacctgtcatatcaaaatgagatccaatctctccagccgacatgcttccatcccgcagcatcataagaatctctcttcgtattggatctgataaagctttaaatgtctctgcaaatcccataactctcatcctttccgtagctatttagaaatatttctaattactttatagcataatgtatcttgaaagtcaattagtatttagatttttttctaaatagttttcattgcaaaaatttaacatagatatcatttaaattttgtattgccctgttactatcatcttatacacacgaaaggagtacttaatatgatacgattatttgcatccgatatggatggaactttattaaatgacaaaggatatatatctgaccgaacgatcaatgcggtgaaaaaattgcagaaacatggaattcattttattgtaaatactggaagagattatcgcgctgcaaaaagagaacttgatgcggcatctctttcctgtgatatgatctgccacagtggggcttgcacttatgatgtgcacggcaatggatttcatatcgcttcgcttccaaaaagtattgcaaaacagatcttaactgtttttgaacggcatggtgcttttgctgacattgcaacggaatatggaaaaacctcgatcactgataaaaatacgttattatcttattataaaaatgaagtgtttcctgccgttgaacaagaaggtaaagtatatttccgtacttggcacgactttgcaatgatggtttctaaagttcgcttttttgaaggaaaagaaagtctgcttggctgtaaaacaccaatttataaaatctctactacattttttgatcaagataagatcaatgctttaaaagatgatattcatgggattgatcagttacatgcggtatcaacttccaaaaatgatctggagatcacgcatgtaaatgcacagaaaggaacagctctacttcgttatgcccaaacaaaaaagatcactccttcacaaatccttgcggttggtgatagtgggaatgatctttctatgttatctcttgatcttggagtcactgctgctatggcaaatgcttctgctactgtgaaagatgtatgttctgtcattgctccttctaatgatcaggatggcgttgcattcttgattgaagatattttagagcaaaatgaactggctgcacgagttcgtcgttctttttgtttggcattggactattccaaaatttagcttagattacatacaatatttttgaaattgatacctcagttttaacttttcttttgttttccatccaaattttgtttcaattccaaagattcctaacaatccaaaaatctgcatctgtaagattctgatcttctaatccatatctgcctgttcatattgtttcttaagagtctgttctaagagccataaacggatttctaagatcacgaacaaaataaagcctgcaattacgagcactgttaccgcacctaacaaaatcattgctgcattcttcttaatctgttctggtgtgtttaccatcttctgaagtgttgccacattatagtaatatcccggagttacgtccactgccttccatccaactccgtcaaaataaacttccacccatgcatgagcattctcccctgtaatagatacctctccatttttgctgtcttggattttggatgctccaagatagtatccttccacgtatcttgctggaattccatgtgcacggaaagcttccactgctactgatgcatataacatctgatttcctgtacgggaagttgtcaaaaaccattgcaatggatcttgtccctctggcattttcctccagactccatctttatatacggaacctacgtatgcttttaaatataatgattttttctgttctgatattacacgcatcatttcatctgaattcttctggaatctgatcttttccatatcttaattcatgaatgcaatgcaccatatcctttcttgcctgctctacagcttctaatttaccatccgtaagccaaaaaacacctgccatacaaacgatcagaaagattacaaaaccatataagccttttcgtctgatcggcattccatccataaacagacacgctccaaacaatccagacatcataaatttcgacaattttctacatattttttgtaacataaagggctttcattatctctggcttataattctgtagtgattcctgcaagattctgcattggatgttttaggaaataattataaactgcaatgactcttcctgtaaaaataactgccagtacagttccaattccaagtcctatgatatgtcttgtaaatacaagtccaatgattcctgacgtacaaaaacaagtaacatcaaaaacatttttgccaatccccatgcctttgccaagtttatctccgattgtcgctgcaagtgcatctgcaggattgggtacaagcttcatattaaccatcgttgctgcaccgattcccgtaacaacgatcgcaaaaaataatactagaagtttctgttccaatgtatctggtacaatatttaaatactggtcaaaaatattgataaatacacttgtcacaagactcattggaatctgtaataattcatataatttaaattcttttccttttaagattgactctatcagcacacaaaagcagtaaaacacaaaggttattgctcctaggtttaaatgccagatatgacagatattatatggaatagatataatcggtgatactcctaacaatgtttttgtatttaatacaattccaagtgcaagcacgatcaaaccgataaaatatatgattcctcttgtgcattttgttttcaaagttctcttcctcttttctttttctgattctctttctaatatttcttttttattttccttttgaatattgaaaagaaccccggagtatcaactctccgggattcctacttgtttattttttaattatttttctttgatctggcagaatttcttcttacctttctttaataagatacgatccttatcgtcaaagtccgccttaccaaatgttgcatcaattgcatctactttcttaccatttacagaaactccaccctgctgtaccattcttcttgcatctgaacgagttgtgcaaagtttagaatctactaacattgtaagaatatcgattccttctgctaatttatctgcttcatattcaaatgtaggggcatcttcgtttgctccaccacttacaaacattgcttttgcagctgtctgagctttcttcgcttcttcttctccatgaacgatctttgtaacttcataagcaagaacttcttttgctttgttgatctctgctccttctaaggctcccagtcttcggacttcatccattggaaggaatgtaagaagtgataagcattcttctactttcacatcttcgatatttctccagtactggtagaaatcgtatggagatgtcttctctggatcaagccatacagcacctgccattgttttacccatcttcactccgtcgcttcttgtaagaagtgttaatgttaatccgtaagcatctttcttttcttttctgcggatcaagtcagctcctgcaaggatattagaccactggtcgtttccacccatctctaatttacatccatatcttctatttaactcaaggaaatcatatccctgcattaacatatagttaaactcgaagaatgtaagtccacgttccattctctgtttgtaacattctgctgttaacatcttgttgactgagaaatgaactccaacttcacgtaagaattcaacgtaatttaaatttaataaccaatctgcgttatttgctaagattgctttatcatcatcaaatgtgataaatcttgataactgttctttgaaacgtttcgcattatgatcgatcgtttcctttgttaacatatttctcatatcagattttccagatggatctccgatcatagttgttccaccacctaaaagagcgattggacgatgtcctgccttctgcatatgcatcattgccatgatcgttaaaaaatgtcctgctgttaaactgtctgctgttgcatcaaatccgatatagaatgttactttttcttttcctaacagttctcttaattcctcgtgtgttgtctgtgcgataaatcctctttcttgcagcacatcatatacgttttgactcattttatatatctccttttaaattctcttcttaatttgtgtttatataatatagtccacggcctatgccgttcctttgaacttatgggaattcctctataatcttatgcagccgttcccaagttctcttaacagatgatccggacattcgttctcttcctgtatgcatgtccaccatatctgattctgatgatataatgtctgcatgctgatctaataccccaaaattgtcacctcaaaaatatcttgatttctagtttttaaagctatggatcggtgctggaattcttcctccacgattcacaaatgcatcacatgaaaattcgttcactggcataattggtgcatatccaagtaatccaccaaattctacctgatctccaacatcttttccgattgctgggatcacacggacagcagttgtcttctgattgatcataccaagtgccatctcatctgcgatcagtcctgcgatcgttgttgcttttgtttttcctgggattgcgatcatatcaagtcctacagaacatacacatgtcattgcttctaatttctcaattgtcagagctccagcattcactgcatcaatcattctctggtcttcgctgactggaatgaatgctccacttaatccaccaacgtaagaggaagccataactccacccttcttcacttggtcatttaacatcgctaaggctgctgttgttcctggtgctcctgcatactctaatccaatctcttctaagatctctccaacactgtctcctgctgctggtgttggtgcaagagaaagatcaatgatcccaaatggaattccaagtctcttagatgcttctttcgctactaactgtccgacacgagttactttaaacgctgttttcttaatcgtctcgcaaagaacttcaaagttctctcctctaacattttcaatcgcacgttttacaacacctggtccactaacacctacattgatgatcgcatctgcttctgtaactccatggaaagctcctgccataaatgggttatcatctggtgcattacaaaatactacgaacttcgcacatccaagacactggttgtcttttgtaagttctgctgtttctttgatgatctcaccgatcaatttcactgcatccatgttgattcctgtctttgtagaacctacattaacagaggaacatacaaagtctgtctctgctaatgcttttggaatagaacggatcaataattcatctgcttttgtcattcctttgcttactaatgcagaatatccacctaagaagttgactccaactttctttgctgctgcatctaatactttcgcaagttctacgaaatcatctggtgtcttacatacattcccacccactaaagaaattggtgtgatagaaattcgtttgttaacaattggaataccaaattcattctcgatatcttttcctgtcttcacaaggtcttttgcaactgttgtgatcttattataaatattctccttgacctcttctagtgttgcaccaacacaatctaataaactgataccgatcgtgatcgtacgaacatctaaattcatctcatggatcattttattcgtttcaaatacttcattcagattaatcatgatgccaccccactaaattctgtgcataatatcaaagattctttcgttctgcgcctgaattacaacaccgatttcttcaccgatctgttttaactcactggataataatgcgatatctttggatgaaccagctggatctacgaccatcatcatgttaaagaagccgcctgtgatcgtttgggagatgtctaagatgttaacattgttgctagctaaatagttacacacctttgcgatgattcctacaccgtcttttccaacaactgtgattactgttttttccatttttgttattcctcctaaatgtttatgatacactggttacggtagataccgtgtctcttctggctacttcaatcggtaatgtaaaattatgtaaagaaatctttaccgtctcgtatgccagtttttcgtaattattctctttactcagatgtccaagataaactttctttgtcttctgtgttgcaacttcctcaatcagttcagcacatctttcattcgataaatgtccctctcttccaaggatccgtctcttcaaataatacggataacgtccaacctgaagcatattcacatcatgattagcttctacaaataaaatatccgaatcataaatcttctctaccagatattcatcgtagtctccaagatctgttgcaatgcttgccttggctccttcttctgagtaaaatgagtaacaaacaggatctgcagcatcatgccatatatgagatgcattgactttcatatctccgatctcaaatggtttgtctgcttcaatcgaatgaaaaaggcttttatcaactttcccaaggttcttataatcaaaaatcgcatcgatcgtctttcctgttgcaaagattggaagtccatatcgtcttgcgataacaccaagtcccttgatatgatccgtatgctcatgtgtgatcaaaattccatcaaattctggaacggtaagatcaagttctgaaagggaattttcaatacgctttgcactgactccacaatcaactaatacattcgtcttcttcgttccaacatatatgcaatttccttcactgctgcttgctaaacttgatagtttcacagattatacctctttcttctcttctgggctgaccctattggcaaacattatatcataaggttatttaagattcaagaattgcactgtattcttaaatgtacaaaatatcaaccaagaatctttatgatctgtgcttttgtgtcttctagatcacctgaattatcaatgatattgcttgccatagatttaaactcttcttctttttgctgtttttcgatcatctgtttgatcttttcatcagaatatcctctggaagcttttaagcgttcatatcttacttcttctctcgtgtaaatataccataactgatcaaatctcttttcatatcctgctccaactaacaaagctgactctatgacaagcaaaccttctggttcttcttttccaaactgatcaattcttgataaaatctcttcatctacatttttatgagtgatgctgtttaataatgaaagttttgtttcatcatgaaacacgatctctccaagtatcggacgattgatcgtttggtcttcatttaaaatttcatttccaaatgcttgaacgatcgcatcataactttttgcccctggtaccatcagctcatgtgctacatgatcagattgaatgacttttgcctgataatcattttttagtatatttaaaatctcactttttccagagccaactcccccggtgattcctatgattttcatttatcttctccttattttgcttcgtaccagcttgctccctgttcaatatcaatatttaatggcacacgaaggcttactgcattcatcatttcattctgtaagatttctttgacttcctcaaattcatccaaatgtgtttcaatcaggagttcatcgtgaatttgtaaaagcagacgggatttcatctgtttttcttttaatttcatgttcactcttaccattgcgatcttaatgatatctgctgctgttccctgaatcggggaattcattgctacacgttctccgaagtttctctgcatgaaattgctggattttaattctgggatcggacggattcgattgaacattgtctttacatatccgtctgtttttcctttttccacctccccatctaagaattccttaactcgtggatacattgcaaaataacgatcaatatattcctgtgcctgttttcttgaaatcttaagatcctgacttaaaccaaacgcacttaatccataaatgatcccaaagttaaccgcttttgcatctcttctttgtgtactcgtcacttcatccatcggaattccaaatacttcagaagctgttcttgcatgaatgtcctgattctcctcatatgcatggatcagtttctcatcctgtgacaaatgtgccagaactcgaagttcgatctgtgaataatccgcatctaaaaatatatatccctcttctggcaaaaatactttacgaatcgctcttccaagttccatacggattggaatattctgaagatttggttccgtactactgattcttccagttgcggtgattgtctgattaaattttccatgaattctctgatcatcctgaataaagtttgccaatccatctgcatacgttgattttaatttcgtcaactgtctgtattctaagatcatcggaatgatcggatagagatgctcgatcttttctaacacttccacactagtggaatatccagtctttgtcttttttgcaccttctaatttcatatgttcaaataaaacaacacctaactgttttggagaattgatattgaactcttcccctgcttctttgtagatagactcctgtaattcttcaatccttccaaccagctgatctccatattctttcaacgctttcgaatctacgtgaattcctcgtacttccatatcatgaagtgcaaacattgttggaatctcaatctctcgataaagatccatcatctcaagttccgttaatttatcacttaatggttggatcgattctcttgaaatataagcttcataacccatgatcttctttcctgcatcacttaaaaccccatctgtaaccattggatgtttcttatcgatcaattcttttttggatggaagcatcatagatttataatctcttgcaatatcatcatattcataagtgctttttaatggattcacaagataagcagccagtgaaacatcaaaaatactctttgtcgtctcatggatcgttaaatgagacaaatgttctttcacttccatcattgccacatatcctatgttgccatatagatcatcaattttctcatataaaaaatcttgcgttataaatccaaaaccttcacaactaaataaatatacttcttctccttctgtatttaatgcaacccacattgcatcattttctttataaatggagattcctgcttctttcttcttcactgcttttgcaaaaatatcttccgcctctgcaagatcgatgatttctttgatcttaatttcgaaatcctcttgttcttctccatcaaaacgtttgagaattgctttaaattccaattctttcaacatatgatacgcttccttcgtatacagatcaccaagcttcgcatcatcaaaggaaatattgatcggactgtctaacttgattgttgcaagttctttactcataacaccctgatcatagtattcctgcagattgttttttgcacgattgggttttacttcatcaatatgtgcatatgcattttcaattgattgaaattctttgatcagttttgtcgctgtcttctcccctattccaggaattccaggaatattatccgatgcatcacccatcaaagctttcacgtcaataaattcctttggcgttacctgatatttttctaacacatcatcttcataataatcttcaacaaccgttccagccctgtttgtctttggaatacgaatctgcactttctttgtcgcaagctgtaaaagatctcgatctccagagacaattttcacttcaaatcctgcttgttctccaagaacagacattgtcccaagaaggtcatctgcttcataaccttcttccatcatcaaaggaatgttcattgcctttaacacttcacggatcactggaacctgttcttgtaattcatctggcattccttttctcgttcctttataatccgcaaacattttatggcggaatgttggcgcttttaagtcaaatgcaactgccagatgtgtcggattctcttcctctaaaaatttaaacataatattcaaaaaaccaaggatcgcattcgtatggagtccttgactattggtcatgtcgggcaatccataaaatgcacggtttaaaatgctgtttccatcaatcaataataatttctgtttcactccagattgttctccttttctataaatgcgttctgagacattgtaacacaaaactacagaaattgaaaaccaataacatttaacatgcatttatgaaaacaatggtgttgacaaatatcgatctccattatctggcaaaaatgctacaattgtcttccctttattttccttacgttttgccacctgaatcgccgcatataatgcagcacctgatgaaattccaactaagattccttcttctattgcgatcacttttccataatcaaaagcgtcctcattctccactcgaatgatctcatcataaatttctgtatttaacacttcaggcacaaatccggctccgattccttgaatcttatgtggtcctgcctgaccttttgaaagcattggagatgttgctggttcaacagcgatcactttcacatcttctttcttggattttaaatattctccaactcctgtaacagttcctcctgttccaactcctgcaataaaaatatctacttctccgtccgtgtcttcccaaatctctggtcctgttgtcagtctgtgaactttcggattggatggattaacaaactgtcctgcgataaatgcatcttcgatttcttcagcaagttcttcagcttttgtgattgctcctttcataccttgtgaaccatctgttaatacaatttccgctccataagcttttaatagatttcttcgttcaacactcattgtctctggcattgtgaggattaccctgtatcctttggatgcaccgatcgctgcaagtcctatccctgtatttcctgatgttggttctataataacagacccttcttttaattttcctgtttcttctgcatcaacgatcatctgatatgcgatacggtcttttgcgcttcctgctggattatatccatctagttttactaataatcttgcctgtagtttaaatcttttttctacattttcaacttctacaagcggtgtttttccgattaattctataacatttttatatatatttgacattatttttactcctttgattttattttcatataattcctatctttttaatatgttattagtatatcagattttaaaacaatgtcaaactcttttatcttttgcattccttttgacactctcatcatatttttaataaaagaaaaacgaccatgtgatccttagatcacataatcgtttccacctttgattcttgctttatttacgacatcttctaatgtaattccacttaaatattcttcaattacctgtcctaatccttcccagatctctatcgttggacattcatggtagcgttcacactgattcaccttatcatccaaacacgctactggctgtaagcttccctctgttatctttaagatttcatagatcgtataatcttttgggtctctggaaagctgataacctcctttaggtcctcgcaaactctttaaatatcccctgatacttaactgtcttacgatctgttccaaatattttacagatatctcctgtcttcttgatatgtcttttaatgcgatccaatcgcctgtatgatgcattgcaagatcatacattaaacggactgcatatcttccctttgttgaaattttcatattctctgctccattttcttaattattgtttaacatccagtaactgtatcgctgtctttaagcttctgacatcctgtgcctcatcaaatgtcagtttgttatccattgtcagaattgctgtgtaatggccatcctgtttataaatcttgtagtagtcataagtatactgtacgtatttttcactgccataagcatctctcgtagaatcctctacatagtaaaacttcccatttacattagaaacatactgaagaatcggatctccctctacggtatactgacaaattacgatagcacaatctttatgatcttttacattctttaaaaactgattccaaagctttttgctttctttgccaaatgaatcatattcaattaccacaattccctgatatgatgtatcttctgccgtcatttctttcggatattttgaaagcagtttctttatctgatcatattttgaaagtatttttatttcgatcttctcatctctttttgtttcttttgtggttttctccgtcttcgcacttgtagaatccttgactgattttccacaacctgtaaaagaaactgctgttaaaagcatcgctgtaccaagtattgtagccataattttctttctcatcataactcctttcttgtaatccccttatttcatatcgttttagtatataatacttgtttttatgtctattgtcaatcttgttgtgatgctttacaataaaaatatacagggaggtaatatctatgagtaagataaataaaatcacaccactaacaaatgtaaaatttctgaatctttatgaattagaagctgaaaataaatttggagatacacatccatattatgttgccagtcgcaagaatgaaaatataatgatggctgccacgaaagaagtcattcctgatggcgttgtcatttatagtctgtttggagaaaaagctgatcatctgatcatggtaagacaatttcgttatcctttaaatgattatatatatgaattacctgccggattgatcgatcccggagaatctatcaaagaaactgcaatccgtgaaatgaaagaagaaacaggtcttacgtttacacccgctgaatttgatgatttcttaagtcgtcctcatttctcttctgctggaatgacagatgagaccaattgcacggtttatggaatttctactggaatgccgaatcttgatcatttagagcccaatgaagatttatcggtagagttagttgataaaaatgaagcaaaacgtattttaagagaagaaaatctttctgtgaaagcttattatctcttattacattttatccaaagtgattcctccgatccttttgcctttttaaaattggattaaaatttaattttcataatttttataaaaattattgacattatgattcaaaagtgataatatattttaggtcgaacaattgaatcagccgatgtgtcggaactggcagacgagacagactcaaaatctgttgttcttatggacgtgtgggttcgagtcccaccatcggcatttgatgagaatctctgagaaggggttctttttttattgcataggaaatttcaacgaaatcccctatgcaataaataagatgctgctcaaaaacatcgaacaacatctctttataattacaaactctgtattaattcttcaatttcatccaagcaagctccgcaagctgttcctgctcccgttacctctttgatcgcttcaacactcttcgctccttctttgtatgcatccataatctgccctgctgtgatatcaaggcatggacagatgatctgatctcgattcataacaaatacctccatttttattttatagaagtattatgtgcattttcattaaggtatatccacattctttttctttatctgtttgttcacaatctcagaaaacagctgatataagacagaacaaaacggaatactaaaaatcattcctacgattccagcgatatttccaccgatcgttacagctactaacacccatattgccggaagtcctacagagtttcctacaacatgtgggtagataacatttccttcaaattgttgtacaacaacgaacatgatgataaaaatgatagcctgtttccaatctaccataaagatcaataagaccccgacccagcatccaataaagccgccaatgatcggaattaatgacatcacaccgataaaaactgcgatcagtaccgcatatggaagtcctaatagtttcattgatgcaaaaatcagacagcctaagatcacagcttctaagcactgccctgataaaaagcttgaaaatgcattatttgatagtcttccaactcgtacaatatacttcgcaacccgttccggtaaaaaagcgaccaatacctttttcacctgcattgataatttttctttctgaagcaatgcattgagtgcaaatacaaatcccaatgcaaaacttacaataaattgcacaacatccgtaatcgcacttaccgttgaatttagcatacttgttgcgccgtcttgtaaaaatgtgatcaactctccactgatcttatcccagtcaaacgtgatctgattcacatatttatgtaccattggtttattcattgatgttttctctaatagggcttgtatctcttttacatattcaggaatattgtttgataacttaaatattgtatctaccaattctggaatgatcaatcgtgatactaacaagatcacacccacaatactaacgattgccataataaggctcaatgaacgctttcctttttttaacttataaaacaatttcctttcaaagaaactcattggaacattgatgataaaggcaacacaacttcctaaaataaacggaaatgccactgagcttacataagatattcctgaaaatacaactggaagattacttaacacaagatataagataatcccaaacgccactaagataaatggcattttatcattctctttaaaaaatttcaaaactttaactcctttataggtttgttatgttaaaagggactgttaaaactaacagtccctcttgttatcttttgcatatcatatacccagaatgccggtctcgcgattttgacgcctagcagagctaggtgggttttctcgatcaacgttctgccgtcccccggtatcagggcttgacatccggtcgattatacgaagtcccatgataaataaatgtaggttcaaaatagcaagttatcgtacaccccaggcttcttatctgatttacattacatattatactgtaagtatggtaatatttcaagtcacagatacatgaaattctatccaatcttaatattttttttacattgttgaaatggtgagatcttatcatatccactcatgtcattcttcaagtcattcttcaagtaggcaaacgtatatttttcacctttttctgcatacattctaagcaagtttaacagataatctctcgatgcttcacacatgatcgatgctccaattccgtgttcaaaatattccaacgggctcttctgatcgaattcatctccattataaatctttcctgcactgacacgatcaacaaacatctctgccatatatttctttggaatcttcatcccaaccaatcctggatggtctttatcaatgctgtaatcaatccaatattcaaaatgatgtttgttccgtcctttatgatgcagccatgacattgaaatccctttctccatacgttccgcattattcggacttgctgttccctgataatatttcactcctaccagaaattccgttggggaatatttggacatatcgtgcataattccctgataataaagacccagtttaaaacagccttttgccaccaggatcttatgtcttgtaatcgttttaaagtgaccaataaaatgcataatccaatctgctccctcatacttctctcttttatcaagaatttttctccacggattatcatagcaaaaacaatctcttttgaaaagactttctcgaaaacttatcaaaaatagttttgttttttacaaacgaaaaatgatgtcagacgatatttgtatttctgacatcatttttcaatttttataacttaaagatttgtatatcccattaattgtttgtcaacttcacgagctgcatctcttccttcacgaatcgcccatacaacaagtgattgtcctctatgcatatctcctgcagtaaagacattttctacatttgtcgcaaaactatctggttttgtttctacatttgttctctggttaactttaaccccaaaagcttctgtgacataagcttcacttcctaagaatcctgctgcgatcagtacaagatctgctggaatttctttttcagatccttccactggaaccatcatcattcttcctgtcttttcatcttttttgctttcaagatttactaaaacagcttttgtgacttcgccttttttattcattttgaattctttgactgttgtctggtagatacgtggatcatgtccgaaaaccgcgatcgcttcttcctgtccataatctgttttacagattcttggccattctggccatggattgttctctgcacgttcatccggaagttttggcatcatctctagctgagtaacactcttcgctccatgacgaatggatgtaccaacgcagtcatttcctgtatctccaccaccgataacaataacattctttcctttggcagagatatatttcttatcttttaatccagaatctaacagactctttgttgtggattttaagaaatcaaccgcaaaataaattccttttgcttcacgtccaggaacttcgatatttcttggatttgatgatccgcaagctaaaactactgcatcgtaatctttctttaactgttctggtttgatatcttttccaacgtttgcattcgtcacaaagtgaattccttcttctttcatgatcgcaatcttacgttctacgatatgtttttccaatttcatatttggaattccatacattaacaatccaccaagacggtcagaacgttcgtacactgtaacttcatgtccacgtttgtttaaagagttggctgcagataatccagaaggtccagaaccgatcactgcaactttctttcctgtacggaattttggtggtctggctttagctaatccatgtttgtatccatactcaatgatacttaattcattttgtttggaacatacaggattcccatttaatccacatgtacaggcattctcacagagtgccggacatacacgtccggtaaactctggaaatggatttgttttcttaagtcttaagtatgcctgttcccagtttcctgtatagatcaagtcattccactctggcaccaagttgttaagtgggcaaccagatgccattccattcaataatacttttcctgactgacagaatggtactccacagtccatacatcttgcaccctgtttctgctgttcttctcttgaaagaggaatatgaaattcgttaaaatgtttgattcgttctttcggagattctgcacgggcgtcttccctttcataatctaaaaatccagttggttttcccataatttcctcctattttcctgcatttgccttgatattaaatgcttccatctttgcctgttcactgcttaatccacgttcttccatctgaacgatcagatttaacattgctttgtaatcatttggcatgatcttcttaaatttaggcagatactgttcaaagtcttttagaatttcttttcctttttcggaatttgtatatgcaacatgttcttttaacatatcttttaattcaataacgtcatatttggatgttacagtttctactgaaaccatttctttatttaagttcttatataacttactgtcttcatctaatacataagcaactccaccactcataccagctgcgaagttctttcctgttggtccaagaacaagaacacgaccacctgtcatatattcacatccgtgatctccaacaccctcaacgaccgctgtagctcctgagtttctgacacagaaacgttctccagcaacaccattgataaatgctttaccacttgtagctccatataatgcaacgttacctacgatgatgttatcttctgctttgaatttgattcctgttggagggcaaaggattaatttaccgccagaaagtccttttccgaagtagtcattgctgtctccgactaactgtaatgtcagaccttttggaatgaaggctccgaaactctgtccaccagctccgttacattttacaacatatgtgtcatcttctaatgcctgttcaccccagtgctttgtgatctctgatccaaagatcgttccgaaagtacggtcaatatttgtaacatcaagctgaatactcttcttctgtttcttttcgagtgctggcattaattctttcatcagcactttcatatctgctgtctgctccagtttgaaatcatatacattcttgtggttgtaatccatcttctgtgctggatcatatttatatccaagaatccttgaaagatctacatgtttttcagccgcttttgcatttggttttaataagtctgtacgtccgactaattcatcaactgtagctactcctaatttcgccatgtattctcttaattcctgagcaataaacttcatgaagtttataacatattcaggttttcctgcgaattttttacgaagttctggattctgtgttgcaactccgactgggcatgtatctaagttacatactctcatcataacacatccaagtgttacaagtggtgctgttgcaaagccaaattcttccgctccaagcattgctgcgatcgccacatcacgtccactcattaacttaccatctgtctcaacgataactttattacgaagatcattcatgatcagattctgatgtgcttctgcaagtccaagctcccaaggaagtcctgcattgtagatagagtttttaggagcagctcctgtaccaccatcataaccagaaatcaaaataacctgtgctccggctttcgctacaccagatgcaactgttccgactcctgcttcagatacaagttttacagaaattcttgcatctctgtttgcattcttacaatcataaattaactgtgccaagtcctcgatagagtaaatatcatgatgaggtggtggggaaattaagcttacaccggctgttgaatgacgagttttcgcaatccatggataaactttcttacctggaagatgtccaccttctcctggttttgctccctgtgccatcttgatctgaatctcttttgcacttactaaatattcacttgttactccgaatcgtccagatgcaacctgtttgatcgctgaacaacggtttaatccatctcttccgacttttaatctctcaggtctttctccaccttcaccactgtttgatttaccacctaatttattcatggcaattgccagtgtctcatgtgcttctccagaaatagatccgtaagacatcgctcctgtcttgaaacgtttaacgatagagtcaacgctttctactttctcaattggaatacccttttctggataatcaaattccattaaacctcttaagtttcctggttctaattccttatcgatcatatcagtatattgtttaaacagatcataacttcctgttcttgttgcaacctgaagtgtatggatcgtctgtggattgtatagatgctgttcttttccacttctatatttgtgacttcctgcactttccagcgtcagatcattttctaatcccaatggatcgaacgctgctccatgtcttgcatctacatctgcttctaagtcttttaaggaaataccttcaactctgctgactgtatttgtaaaatatttttcgatcacatcagaattgataccaattgcttcaaagatttgtgatccctgataagactgtaatgttgaaatacccatcttagatgcgatcttaacgattccatgaaggattgcatttgtataatcttcaacagctgcgtaataatctttctgaagcatattttcatcgatcagtttcttaattccctgtaatgcaagatatgggttcactgcacatgcaccatatcctaacagtgttgcaaaatgatgaacttctcttggttccccgctctctaagatcagtgcaacagatgtacgtctctttgtcttgatcagatactgatgcattgctgatactgctaataaagaagggattgccacatggttttcatcgactcctctatcagataggataatgatattcgctccatctctgtatgctctgtctgcctctacaaacaagcgatctaaggctttctcaagagatgtattcttgtagtatgtaataggaagttctacaacctcaaatccttttttattcatagatttgatctttaacagatctgtatctgtaagaattggattgtgtacttttaatacgcggcagttctctggtttctcgtctaaaatattaccttcttttccaacataaactgttgttgatgttacaagttcctcacggatcgcatcaattggagggtttgttacctgtgcaaataactgtttgaaataattaaataatggctgatgacgattggataatactgcaagtggtgtatcatttcccatggctgcgattgcttcagatccatttaacgccattggaaggattgctgtacggatatcttcatatgtatatccgaatgctttcatcaatttttcgcgttcttctgctccatatgttggaactggttcatttggaatctttaaatcttttaattctaacagattactgtctaaccattcaccatatggctctttctctgcgtatttttctttcactacatcatctgcgatcacttttcctttgatcgtatcaactaacaacatctttcctggatgaagtctttctttcactacgatctttgttgggtcgatgtcaagaactcctatctcagaagacaggatcagctgatcatcatctgtgatgtaatatcttgatggacgaagtccattacggtcaagtactgctcctacctgatcaccatctgtgaaaatgatagatgctggtccatcccatggttccatcatcgttgcataatattgatagaaatcacgtttttcctgagaaataactttattattttcccatggttctgggattgtgatcatgatcgcatgcggaagatccataccgctcataactaagaactctaatgtattatcaagtctcgcagagtcagatccatttggatttacgactgggatcagtttgtgcatctcatttttaagatattctgattccatattttcttctctggcaagcatcttatcggcgttaccacggatggtattgatttctccattatgtacgataaaacgatatggatgagctttctcccagcttggtgtcgtattagtactgaatcgtgaatgcacaagtgcgatcgctgattcataatctaaatcctgaagatcgttaaaaaatgtacgaagctgtccaactaagaacatacctttatatacgatcgttctgctggataatgaaacaacgtatgattcttcattactctgttcaaatacttttcttgcgatatataatttacgatcaaaatcaagtcctttttcaacatccgcaggttttgctacaaatccctgtaagatctttggcatgcattctaatgctttcttaccaagaactgttggtgttgtaggaacttctctccatccaaggaatgtcattccttccttctcaacgatgatctcaaacatcttcttcgcctgacgaagtctcaattcatcattcgggaagaagaacattccgattccatattctctttcttttccaatattgatattggctgccttacaggctttgctaaagaacttatgagaaatctgaagcatgattcctacaccatctcctgtctctcctgctgcatctttacctgcacgatgctctaatgtctcaacaatcttcaatgcattatctactgtctgatgattcttgactcccttaatatttacacaggcaccgataccgcagttatcgtgctcaaaacttggatcatataatccaggaatttgatttgtctgtttcatatctattcatcctttctcgatgtactgtctcgtgttttttcttatcataccgaaattttccctagttgtaaagtatgaattttcttaagttgtctgataattagatttcttaacaatttatacatttattttctgataatatatcgaattatctcttattttctcgtttactgaatcctgtttctcaaaaagttttttaaaaagttgtactattttgtcatttatactatactagataacgtccgtttcgaccattttcgatcgtttcgacaatcttttatattatatatattatagaaagaagaggttttatttattatgaacgaacaaaagacaaatccgctcggtaccgagaagatatcaaatttgcttcttcgtttcgctattcctagtattatcgctatggtcgtaagtgccttatataatatggtagaccagtttttcattggacgaagtgttgggatgcttgggaatgcagcaacaaatgttgcctttcctttagttatcacctgtactgccatcgccttgatgtgtggaatcggcggggctgcaaactttaatctttgcatgggccaacaagaaaaagaggaggctgcttccttcgctggaaatgcaatcacaatgcttttttcacttggtatgatcctttgtatcataacaagattatttttaaaaccaatgatgatcttatttggcgcaacatctagtgttttagattattctttaatctatacaggtattacatctcttggatttccatttttgatcttaacaacaggtggtacgaaccttgtccgtgctgacggaagtccaaagttttccatgacctgcactttaactggtgcgatcatcaatacgattcttgatccaaccttgatctttggtttccacatgggaattgctggtgctgcttgggcaaccgtgatcggacaggtcgtatctggaatcatggttattttatatttaagaaaatttaaaacagtaaaacttacaaaagaaaagttaagaccacattctcattatataggaagaatcgtttctcttggtatggcgccattctttaatcaggtttccatgatggtcgtacagatcgttatgaacaatgttttgatccgttatggcgcaaaatcttcttacggaagcgatattccattggcatgtgccggaatcattacgaagatcaatatgatcttttttgcgattaatattggtatttctcaaggattacagccaattatcagttataactatggtgcaagaaagctagatcgtgtccgtgaggcttatttgaaagctgcgatttctgcaacgatcatcagcacagtttctttcatctgcttccagctgtttccacgacagatcattggaatctttgggtctgaaagtgaagcttatttccgttttgcagagaagtttttcagaatcttcttgttttgtacctttattaatggattacagccaattactgcaaacttctttacagcaattggaaaggcaaatcgtggtattttcctttcattgaccagacaagttattttcttgctgcctttgatgatcgttttgccgatcttctttggaattgagggagttatgttctcagcaccgatcgcagatggatttgctgcggtatgtgcgataacatttgcggtaaaggaattgaagtcgtttcagaaattgtgatttgtagtttgaagacggaaattattgatggaatattataaaaagagatcatgtgcctgcaacccacttacgttcggactcccacgtagctgtactaagctcctgaatggtctaacgaccatccactcgctaagtgcagacgtgtccgtacggttactgacacatgatctctttttataatattcaaataatttacgtgattcaaaccactatacagtgtgtatgttttattgtattggctgataagtttggtattcgttaacagaagataaaggaactcttagacaccgatttatcgagatgtttgaaatttctcttatcttaatttctacgaaaccttaaattgcgagaattttcagctatcgattacctaaatata

SEQ ID NO: 631 - DNA, 12437 bp, Unknown
  gut microbiota DNA sequence
tgatagaataatatttactcataaacaaatcctccatataatatttataatttattctaccaataaaaatcataaaatccaacacatatttataattttttataagattattttaacagttaaacacctcctaataaaacagaaacgcacaaaatgttaagtaatcatctgtgcgtttctatatcttctgtattaaactgtaataaatcctaatccttcaagtactgagaatactaagatcgcaacaatgcaaattggtgcaatatacttaaccataataaggaatagtgattttctcttaaattccccagagctttcaacttcatcaacaattacttttggcttgatgatataaccgacaaataaacatgttaagaatgctgcgatcggcattaatacactgttactgatgaaatcaaagaaatcaaggaagtcaaatcctaaaatcgtaatattgctccatgctccaaatcctaaagatgatggaactgctagtaacagagcaatgataaacattgtaatacatgcagttcctcgtttcatatggaacttatccatcagaactgctacgagtgtctcaagcagcgaaatggaagaggtaagtgctgcaagtaacactaaaataaagaatactgctgcaataacacttgaaaaagccatactgtcaaatacttttggaagcatcacaaacatcaaagatgggccttttgcaagcatggatgaatctccgtttgagaatacaaacacagctggtacgatcataagtcctgcaaggaaagcaacccctgtatcaaaaatctcaacctgtgtgactgatttctcaaggtcagctttctttggcatatatgatccgaatgtgatcataatacccatagcaagggacatcgaataaaataactgtccaagtgcagctaagatcgttgtcggaccaaatccttttaaacttggttttaaataatatgcaactccagccatcgcccctggtcttgtgatacagaataaagagactccgatcaacaagacgatcaaaactggcatcatgatcgtgctgacacgttctactccgcctttgactcctcctgcaacaaccactgttgtagcgatcaggaaaacaagaacacagatcataggttccgctgatttgctgataaaccctgtaaagaatgtatcagaggcggcattatgaatccctccctgaagcgatatcagtgcatattttgtaacccatccaccgataacacagtagtacgggaagataataaacggaatgatcgttgtaagatatccgataaatgtatgcttcttgctaaagtgtccaaatgcacggatcgcactggttcctgcctttcttccaagggcaacttctgtgatcatcagtgaaaatccaaatgttaatgtaaggatcagataagttaataaaaatgttcctccgccatacttggctgcaagatatggaaatctccagatgtttccaagacctacggcagacccagccgttgcaagaacgaatcctaaacggctcgagaatccacttctttcattactcataatattaagtaccttctttcatatatattcagatacgtaaggatatgtatctggctctgccggagatcttagatatgaatcctgcatggcaggattcccagcctggatgctgaattctatttagatgacgtccacatcttctccggcaaggacggcattcatattacgtacagaacacatctttccacacattgtacatgtatcttctctctctggtgttgattctgcacggtatcttcttgccttttcaggatcaagagcaagttcgaactgtttctcccagtcaagtttctgtctcgcagctgccatctggttatcccaatccatagcgccttttacacctttggcaatatctgctgcatgtgctgcgatcttggaagccatgattccttctttcacatcatcgacatttggaagacgcagatgttctgctggtgttacataacataagaagcttgctccagaagctgcagcgattgctccaccaattgcagatgtgatatggtcatatccaggtgcaatatctgttaccagaggtccaagaacataaaatggtgctccatgacagatcgtctgctggatcttcatattcgcctgaatctgatccattggcatatgtccaggtccttcgatcataacctgtacatccttcttccatgcacgtgctgttaattctcctaatgttactaattcttcgatctgtgaaatgtcacttgcatcagcaaggcatcctggacgacatgcatcgccaaggcttagcgttacatcatattcgttacagatatcaaggatttcatcatagtattcgaagaatggattctcattgcctgttgcttccatccatgcaaagatcagagaaccaccacgagatacaatgttcatcttacgtttcattgccttaaaacgttccgctgtgtttcggttgatcccacaatggatcgtcataaaatctacaccatcttctgcatgcatcttaaaaacatcgatccattcacgagatgtgatatcctttaatgctttattgtaataaacaatcgcatcgtaaataggtacggtaccaaggattgctggacattcattgacaagtttcttacgaaatacatgagtatgtccaaaagaagaaagatccatgatagcttctgcacccatctctacggctttattaactttctccatctcaacatctaagtttagacagtctctggatgttccaaggtttacattgatctttgtcttcaaagaattcccgattccaaatggctttaaacacttgtggttcttgtttgcagggatgacaatagttccagctgcaacttctgccataaggtctttcacgtcaattccttcataggcagcaactgcttccatctctttcgttacaattccctgtcttgctgcattcatctgtgttgtgtacttcatgattgaaaacctccaaaatataagattttgggagactcttattcggttttgtttattttatcatcattctgtcttgttgagataaaaaaagacaaactttaaaaagcctgtgatgctgctttacagttcgtcttgtattcatagcatccaaatccctacgacggcattatccgtatcaggtccatggtcgaaactctcgtttcctctcagctaaggtatcaccttttaagctcccatttcagttacatcaatattgtaccatcctaaaaggcagatagcaagaattttgtatccttgttatctgccttttgtacttctttatctttatatttttcttttattttactggtctggcgattgctgcaactttgcggtaccatggatagctgtaagacacactgcttccatctgcatgtacgatcgtgtcatttccaacatacatggcgatatggtcgatatttttatatcttccattctttccacttcgtttacggtaaaagattagatctcccggaagtaatctgtctgattttccgttatatgtagaaagttttaataatttcttcttttttccacaccatttagcaatatctgcagctgttggtgcatagctcttacttccaaaattcacaccatatggtttataagatttccacacaaaagaactgcagtctacataatctttccgcattcgttttgcctgactgtatcttggttttgtcttacagatcgcttgagctttactgactcctttgtatactttggattttaagatataaatattaaaagatacactcgcattatcagcactgatcgttaaggttgtccttccgtatttttttccttttgttaatccatttgatgatacagatgcatattttgtatttccaactttatatgtaactggtgtatatccgctggctcctgatactttgtaagatactttttgcccttttttcagaatacaactggctctatattgtggatctgtgcactttacagttgcttccagacaaattccatctacatatacgtatatctttctggtttgttttgcatatccgtaaaatgtcccatcatccgatacataaaaattatggttattatctgctcgatagataatgcgttcttgtccattcgtcgagttgccttctacttcaactttcccttcgttataaagaaccgttgcaagtttgttattctttaatctcggattggaaatctggatatgcatttcttttgtttcaatactttgatattctgttccttcatctgttatgatatttaatcggactgttgcatctcctatggatcttcctgtaatccttgcagtcttctgatctgctgatacctccatcgcaatatgatcatttccattgacgatctgccagttatatttcagattatctccataatcataagaatcgttatattttaatgaaatatttccaccaacagcaacacctgcattgatgccagaatcatagaaatcaatatcatatgttgctgcttcttccggtgaatcgtatccgccccataaattatatcctgctttgtttatcttattcgttatctttcccatgccagtcttacttgctgctgatacgggcatgatctgaatcgataacattcctataacaactgaaagcgtacatacgcacagctttttcatcactttttccactttatttttccccatttatcttgtttctcttaatgtatattcgactatttacaaaatttaattcattacattgactggttttccttccatccaacatttcacattatcaaaatcaatgatcgcacgttttaccaatgcttcttttgttgcaaatgcaacgtgtggtgtcgcgatcagattctttgcatgtaagagtggatgatcttttgataccggcggttcattctcaaagacatcaacggctgctcctgcaatcttaccgttattgagtgcttcagctaatgcttcactatcaacaaccggacctcttgccgtgttgatcaaaactgcatctggtttcatcaatgcgatttcatctttaccgatcaaaccttttgttgattcatttaaaggtacatgcaatgaaatgatatcacaattatataaaagttcttctaaccctacaaattgaattcctggaagatcttttactgtccttgaatatgcgtaaacttcacatccaaatgcctgggcgatcttcgcaactctggttccgatcgctccggttccgatcacaccgaatttctttccttccagttcaaagccaaccagaccatccttggttccttcttctcggactacctgatcgcagaaaatgatatttcgatacagtgaaatcaaaagtccaaagacaagatctgaaactgcagcatttgaatagcctgcacagttgcatactgtaatcccctgttctttgcatgcagccatagcaatatgatcgatccctgtaaatgctaccgccagcatcttaaggtttttgcagcctttgatgacttcagcattcaatggcaggtttgcaaccataataatgtccgcatcctttccacgttcgatcaggctttctgtgtcagttactttggtctggtaagatacgatctcgacagaatctggcaatgctttatgtgcgatttccatcaatttctcttcttccacacctagtggttcaataattactaatttcataattgtcgaatactcctttcgtatgattttactctcctattctatcatcaaatatacgattataaaagcttagaaatattttatttcatagaggattccatcgaagtttcttatgatccatataaagtaaaaaaactgtcacactagtttccaccaatgtgacagtttcatatactttatagaaaatctactggagtaaatctcttaattatttaagagttactttagctccctgttcttctaatttagctttgatgtcttcagcttctgctttagatgcaccttctttaattactttaggagctccatcaactaattctttagcttcttttaatcctaatcctgttacttcacgaacagctttgatgactttaactttagctccaccaacttctgttaattctacgtcgaattcgtctttttcttctgctccaccttcagctccagctgctgctactacaacacctgctgctgcagatactccaaattcttcttcacaagcttttactaaatcgtttaattctaatactgataaacctttgataacttcaataatttcctgagttgtcattataatttcctcctaatattttaaatttactgataactgatcttactcagctgcagccccttctccgtctttttcagcgatctgcttaataacacgagcaaagtttgtaattggggactgaatgcttccaaggaatttcgcaagtaattcgtctcttgatgggatgcttgcgataacctggataccatctttgtcatagaatgttccttctacaacaccagatttcatttctaatacttcgatgttcttagcgtgttttgcaaggattcttgcaggagctgtagcatctgttttagaaacagcgattgctgtaggtccttttaaatcatcagctaatgcttcaaattctgttccctggattgcaaaacgaatcattgtattcttatatactttgtattctacatcagcttctcttaattctttacgcattgctgtatcctgttctacagtgattccgcggtaagaaactaatactgctgactgagcatctgtaagtaattctttaatttcgtttactactggttgttttaactcaacttttgccattgaaatggtgcacctccttgatttattttgtgtaccaccgcacatataaaaagaaaactctatatccgcacagacatagagtgttaattagcatattcactaatactctcctcggcaggttgttctacgttgcgccttgcggcacctgctgtcttcggcagtaatactttacatataatacacgacatttatatatatgtcaaatgtttttttactttttttgaaatgtttttatttttatgcaattcccatatggcaacataggattttgcataaatctggggtcagactacatgagactgaccccgcttaaagttaaatattaagcaaattttgttgtatcaattttcactccaggtcccattgtagaagtaattgttacgtttctaaaatactgaccttttgctgctgcaggttttgcttttacgattgcatcgattaacgtctggaagttgtccgctaactgttcttctgtgaaagaagcttttccaactggtacatgaatgatgttggatttatctaatctatattcgatcttacctgctttgatttctttaatggcattcgcaacgtccattgttacagttccggctttagggttaggcattaaacctttaggtcctaagtcacgtcctaaacgacctactacacccatcatgtctggagtagctactactacgtcgaagtcataccagttttctttctggatcttaggaattaattcttctgctcctacgaattctgctcctgctgctttcgcttcttcagcttttgcatctttagcgaatacaagaactttaacttctttaccagttccgtgtggaagtacaactgctccacggatctgctggtctgcctgacgtccatctacaccaagacggatatgtgcttcgattgtttcgtcaaatttagcgtttgctaatttttttactaaagcaactgcttcctgtggatcataattgtttgttctgtccactaattttgtaagctctgcgtatctcttaccttttttcattctaaaatacctcctgtggtaatatcgggagttcaccctcccactttcgtttcaaatttgtgactactcttctactgtgattcccatacttcttgcagtaccggcgatcatgctcattgctgcttcgatagaagctgcgtttaagtctttcatctttgtttcagcgatctgctgaagatctgctttagaaatagtagctactttagttctgttaggttctcctgatccagactggattttgcaagctttctttaataaaactgctgctggtggagtctttgtgatgaagctgaagcttctatcctgatatacagtgattactacagggatgatcatgtctccctgatcagctgttcttgcgttaaattcttttgtaaactgtacaatgtttactccgtgctgtccaagtgctggtccaacgggtggtgctggtgttgcctttcctgctggaatctgaagtttgatataaccttctactttctttgccataatcgttaacctcctgattattgtggtaattacgggatagccctcccactttgtttcaaataagattctctattcttattcttcgttacgctttcttaatatctaagaaatcaatttctactgaagttgctcttccgaacatctcgacttcaatagttactgtctgtttgctttcattgattgcagtaaccgcacttgttgttccttcccaagcaccggaagtcacaacgatcatatcaccaacttcgatatcaagttcaatcttctctcttgctggtgtttcttgctgttctcctccaatctggattcctaatggtttcatctctgcaggagtcagcggtactggttttgatccaggtcctacgaatcctgtaacacctcttgtgttacgaaccacataccatgtgtcgtcgttcatgatcatatggatcagaacataacctgggaacatttttcttgaaacttgtttcttcacaccgtttctcatctctaccacgtcttcaagtggtacgcggacttccaagatctcatcctgaagcttacggttctcgatggttttctcaatatccacttttactttattctcataacctgagtaggtgtgaacaacataccaatttgcctctgccataaaatctccttacttctatccaaccaatgcctgaattccatactggattccaacatcaagaactgcaacaatgactccgataataatagcacagatcactacaactgctgtttcttttgcaattctttctttcgttggccagataattctgttaaattcagcttttaactctttgaaccaacttgttttctttgctttgttagttttctccatgttttcacttccttttctctcaaagggaattaccggaaattattttgtttctttgtgtaatgtgtgagttttacagaatttgcagtatttctttgtttccatgcgttcaggatgtgttttcttatcctttgtcatgttgtaattacgctgtttacattctgtacattctaatgttactcttgtgcgcacaacttccacctccattttgtttgttgtttaattaaaataaggcataaaaaaaagaccttcttccaacgctaaagtctagcgtgcttatcatatcatccatatgttggtccgtcaatagatttttcgttttttttacaatacaatcttgtttctttacatattaaaacgaaataataccgcatcaacatctcggctgatacggtacttattttcaaaaagagaggattaaaaatatatatgaaaaactatgtctttattatatcaggatcctctcttcattcaatattctgtttctaaacatttctaaagaaagtataaacaaatatgaaggaattattatttagtgtattttacctgatatccacttgtacctttggatccttttttgatcttaatatagtaagttcctttttttgcctttccatagatacggaaaccttttgatattgttttattttttaatcttgctgctcctgtgactgttacagaaatcttgcttttatttccaagtcctgtgatatcgatatatgtcattccagtcttcttaactttgatcttataccagtgtgttttacttgtactttcattagacaagaatacctgcttcttggatttcttacgcttgatctcttttgcttttttcttagatgttccataactgtcagatgctttttgatttgcattgatgaaataaaggatctctccagatgccgcatttgcaacgacacgataagtccctgcagcaagtcctgttgttactacatagttattttttgctgcacccgataatccggttgctacagttttccatgtctttccacttaatttctgaacagaatatgtaacactagaaacatttcccgctgaattttctttataaactgcgatcgctgcaactcctcttttggatactttaaactgctgatatgtagctgctccagtacttgcactagcgattacattatttccgccaaaagttctgttattctggcttgatatcactgctgctccaaatgctgcaaccactggtgtatttgcattctcacatgctgtttcaaggtataatgcatatgttcctgctttgactgcaccagcccagatcatttttccattattcgtctgtgaaagtgtcatagccggattcccattataacacagttttaaacgtccaccatctactcctgcgacctttgttgcatatgggataacaaccgttccatcaattcctacacgaattgttccaactttcacatattcatttgcatcactatatccttgatacaacatcatttcctgatttgcctgccatttatttgacagcgtatcaaaatcagacagcgtgtaaacattcgttgcatttaactgcactgcctctgcagatgcttttgcctgttttgctcttactctttgtgatgctgtgattgcaggaagtttgctgtgaatactttctgtttttgtttttgctcctaccattacagtccctgtcatcattgcaaatgacaacgctatacataacgttctctttaaaaagtttttaaccatattacatctccttatttgtatacatatgcacttgctacagttgatacgtcactggaatatgttttgtttccaaatttaacttttggagccacctgaacataatatgttcctttttttaattttttctttccgttttttgtgatctggaaagagtagctcttcttcttagaaaccttgactgtttttacttttttaaatccagattttgagttctttgatacagaaactgtatactgtttaattcctgttccctttttcagaactactttgatcccttttttcttgtttgttgtctttcctgaaatagatggcattgcgaagtagcgatagttgctccatcttccatagtatgtctgattattacttctgtttgtatagtagtatcttgcacgatatttatacgccatatcttttgacacattcatagactcataacccatagatgttgatgtcttagacagtactcttttattctttgcattatatacttccagctgtactcctgttgccatctcaggtttattaaccttaaatgctaccttcttaatattagcgtatgctgctgtgatcccaaaattattcttcgctacatcggcaggcgttgtgttaacataaacactgtcaactgaccagttatatgtttttcctgtggcaagacttgtaagtctgtatcccagtcttatatatcctgaatatccttttgttgcctgaactgttacctgcgttgtatctgcagaaccctgccagatcatttcctgcgttccaattttctcaagataatagccatccactctatatccattcaaactctgtggagtccactgaatcgtaatgctgttatcattaaatccagccatccatacctttcctgctgcctttgcatccttaggcgatacaatgatcactgctgccagcagtaaaacactaaatattacttttttcaaattctttcccatactttttcctccttttcgtatgtgattacttttttcgtatgtgattacttatctattatccaccttctctggataaagatcatgatttgaaagtctgttccatgcaacatcttcccattttgttcctggtcttccgtagttgcagtatggatcaatggagattcctcctcttggagtgaatttaccccatacttcaatgtattttggatccatcagcttgatcagatctttcataatgatattcatgcagtcttcgtgaaaatctccatgatttcggaagctgtataaatacaattttaatgatttactttctaccatgcgctctcctggcacataagaaatgtagatcgttgcaaaatccggctgtcctgtgatcggacatagacttgtgaattctggtgcattaaatttgacaaaataatcattctctggatgtttattctcaaatgtttctaacacctccggtgcataatcatctgggtattttgttttctggtttcctaataacgtaattccttctaattcttggctctttctgccactcattgtattttcctctctttcaaattttcattgcctaacgtatatcttaggactttttgcctatttgggtgttttgcccccccccc

SEQ ID NO: 632 - DNA, 34726 bp, Unknown
  gut microbiota DNA sequence
taccaatatccctgaatctcatcacaaccgatctgtcttaatatttcaatctgctcatctgtttctacaccttcacagattatctgatatcctagatttcgaatcatatcgatcaaatgtttcaggaaatagattccacggtctgtttctaagcagctggtaataaatcctcgattgatcttgatcacatcaactgggatatcaacgatcgtattcaggacagaatatccgcttccaaaatcatccatcgctgtcttaatcccatgtaactgaaaagagtcaaataattttctaacactttcatattcagacacaactgctgtctcagtaagttcaatctcaaccattgttggatcaacactgtatttcttcaaaatatttatataagtgttgatcgtctgcggatcagatgcatggagactagatgcattgatcgatatcggcacctgttctcttcctgcttttagattctctgcaatgaattctacaactgtctcaaagacatagaagtcaagttctatgatctttccattattttcataaactggaataaatgcattgggacttaaaacggttccgttatctctctcccagcgcaccaatgcttccgcacctatgatctcatgactttttatggaatattggggctgaaaatatactttgaactgtttttgttccatcgcttccttcatatcattgacgatctcattttccaactcacgttgtttctgcatctcatcgtcataaaatcttacactgcctttttctccacctttcactttctgtctcacatagtttgccgcatcgatcgcataggaagtgctcctgcattctggtgtcacataatagattcctgttctcaataccacgttggattttgggaacttctccttctgccgcagcataaattcttcattgatcttttctgtttcttcaatgatcgcttgatattcatccttctcatggctagctgtacgaaacattaaaaactgatccgatacaactcttgtaaagtacagattatgtttttcttctgtttttccaataatgaaactgcaaaaatcctttaatacctgatctcctagagtatatccatacttataattaaaatatttaaaattttcaaaatccatatatatcatcatgtaatcacttgtcttatttgcaagaatgatacgttccacttcctcatgaaatcttgcaaatgagatcaaacctgtcagcgtatcatgctccattcgtgtgatcgctccctgatagacatgattcatcacctgattcttggcaaaatgtgcggagataatcttcgttacttcggataactgcttcaacatctcgtttgaccagcttctcttctccttacacacagcatatgtgatcgctcccgtatagcgtccttcacaatacattgcaacacttacgattgtctttgcctctccctgtatcaggatcttcgttgctgattcggaatatcgttgcatatgatcatgctgtaaaacaagcaccccattctcatcaaaatcattaaatactgtgagaaaatcctctttatcaaaatgtctgaccgtctctaaaaccttcggaattccttctctgttccattgataatcagaatatatctctcgagccttgatatctgtctgcacgatcgtgatacgatcaagttccagacgaactccgatcactttcagtaataaatgtatcgccacctcaaaattgttggttttctcgaagatttcaaaagctgtagcaacaatatcattctgaaaatatcttgcttccagcatctcttcctgtttctcttgttcagcgatcatggatgaaaaatgctgcaggctgtcacagtaaacataacagttctttcctcgctcttttgctttatataaggcaatgtccgcattctcaaacagttggtcataggtataacctgatacattctctggaagataacaacatcctgcactacatgtgatcgtacaacctgtcttcccgaattgaagctccctgatcttctgcatcagctccacattcttcctaaccaactcaatgttcaagatatcttttacaaaaataacgaattcatccccgccagctctcattaaaatactatcgttatctctaaatacttctttcaacagcatcgccaaacaggctagaactttatctccaaataaatggccataattgtcattcaccaatttaaaacaatccacgtctaatacgatcattccacacgaatcaaaaggcttcttccgattcagatatttgttgatacattttttcccatatacctgattataaagccctgtcaaagagtcttttctcgctctttctttgagcttcttctcttgttttctttgttctgtgatatcccttgtacttcctatcaaggtcagctttccatcttcattcacgatcttcgtaaactcgagtactgaatgtttaatatccccatcctccccaaactcacggatctctaccgttgcttcttttgcttccttataaatctgctttatcttttctcggtcttctggataaatcttgcttttgttgtctatatagtccatgtatccagctatcgttttctcaatatgaaatttattattataaactacaagtgtatcttcatccacaagatattcaaatatcttaatccgagaattatttaaaactgttgacagtttctctattttttttctgttaacttgcagtgtttccatatcctattatttctcccgtagtattgctatttccctattaccaatagtatacaatgaaacgcttagaaacacaatcttaatcgttccctttttttctttcattgactttttgtctcatttatttataatgaatatataagtgcatattcattctgaagccaaggatttcctgatgccaagattgagcttacaaagtacctgttcccttggggatcttacgtacttttttattcgactatctggcatattcatttccgaatatgcttttttattgcatagaaaatatcaataaaatcttctatgcaataaaactattacgtattaactaatttagaagaaggagaaaactatgtacagaccagaatctggtatcgcagaagaatttatcgatgaccaggagatcaaagatacacttgcttatgcagatgccaacaaagacaataagaaactgatcctgtctatcattgaaaaagcaaagaaattaaaaggtatttcccacagagaagcttccgtacttcttgcatgtgaagataaagaactgatccagaaagtttttgatcttgcgatcaagatcaaggaagaattctatggaaatcgtatcgttatgtttgctccattatatcttgcaaactattgtgtcaacggatgtacttactgtccttatcattataagaacaaacatatccgcagaaagaaattaactcaagaagagatcaagaaagaagttatcgctcttcaggatatgggacataagagactggctcttgaaacaggagaagatcctgtgaatattccaattgaatatgtattagagagcattaaaacaatttacagtatcaaacacaaaaacggtgcgatccgtcgtgtaaacgtaaatatcgctgctacaacagttgaaaattataagaaattaaaagatgttggtatcggaacatatattttattccaggaaacctaccacaaagacaattatgaagttcttcatccaacaggaccaaaacatgattatgcttaccatacagaagctatggaccgtgcgatgacagctggtatcgatgatgttggtatcggtgttttattcggtcttgatatgtatcgttatgactttgctggtctgttaatgcatgcagaacatctggaagcaaaattcggtgttggacctcatacgatcagtgttccaagaatccgtcctgctgacgatatcgatcctgacgatttcgaaaatgcaatcaatgatgatatttttgagaagatcgttgcaatccttcgtattgctgttccttatacaggaatcatcgtatctactcgtgagacacaagaatcaagagaacgtgtattaaaagtcggagtatcccagatcagtggggcttcttctacaagtgtcggtggatacgctgaaaaagaaaaaccagaagataactctgcacagtttgagaaaaatgataaccgtaccttagatgagatcatcggatggctgatggatcttggtcatattccaagtttctgtacagcatgttaccgtgaaggacgtactggtgatcgtttcatgactcttgtcaaatccggtcagatcgcaaactgctgtgcacctaatgctttaatgactttaaaagaatacttagaggattacgcttctgatgaagtcaaagccaaaggtgagatattgatcaaacaggaacttgagaaaattccaaatcctgttgtcaagcagaaagctaccgaatatatcgaaaatattcatgaaggaaaacgtgatttcagattctaggagatttttatgttcaaacacttaaacacccgaattccaaaaagaattgaacaagaaaaggacaaggtatctgccgttatgatccctctgatcaagaaaaatgatggataccatatcctatttgaagtccgttccaataaactctcacaacagcctggggaaatctgtttcccgggcggccggagagaacatgatgaaacatccatggagacttcgatccgtgaaacttgtgaagaattactgatttctgaatctaatattaaattatatgggcctttagattactttttatctcctgctggtctgcggatcgatccttatcttggggaattagtaaattatgatggtcagtatagtaatgatgaagtttctgaaattttcactgttccattagtattctttcagaacaccccaccgaaatgttattataacaaagtgactatgtatccaacagataactttccatttgataaagtagctggtggaaaagagtacccttgggcacgtggggaatatgaggttttattctacgaatatgatgaccgtatcatatggggacttacggcgaagatcttgtattataatttgaaaatgatccagtaatacagatttgttttgaatctgtattactggatcaactggcatttacaataatttctttagaactgtttatactttctttagaattgttcatactttatatattgaataaaggaaggattttgctatacttaagacatagtttttcatatatattttttaatcctctcttttcagaaaagtaaccgctcattatatcgagcggtctttttatttcataaatattctcctaacatatctcttacacatttctctatctgatccataatatccacacatacctcttttttcatccctgccgtaattccaactgttaaaatttcctttcttccaggattacgtccattcccgtcaactgtcgtggtatgttctccataatatgtgctgctataagttagatcatatgctgggcttagtcgccaactatctttctcttcatcatataaatatgtgaaattctttgaatgatcatctcgattatgtgcaaaaacgttaaaacacattctacgaaacatattttcaatatcctccgtattatctcttgttaatatctttgtcaatttcattaaactatgataatcaagacttggctgctcgaagtccaattccaaaagagctgcagcagttaacatatgaattcttttttttcctgtttggtctattcttcctcatcgattgtcgtcatgatcttcggtcttgcaccaccactggttcctccaaggcgatataattcatctagtttatctgaatattctgtattgagaattttctgacattgttctgccagttcatccaggtttgtatttccatttgtttgttccaatgtccgctcaggatgataggtaattgctcccattcctgactttccaacaatctctaagcggtccaaaacagttaatctatctggattctgtttatgtgcacgcaataatcgattcaataataatcttccccagttatctggcaaactgtccgcaaatactccgaaaaggccatcaaaataatccttttgcggaacaaacacttgattttttaaaggtaatgaaaatgggctgattgaaaaaccatcttctaaccattcctcactatactggaatgcaactttatgccctgatgccatagccagtgttcccacaagcttttcatcatacataacttgtaacgttttagtttcgctcattgataacctcctgaatattccgatatggcacttgtgtaaaaatatttcgaagttcatctgcaatatctaatgccattgctatcttagttaatgaaattaatgaaatctgtcctgttgtctcaaaccttttgatcgaaccataacttacaccactcatagaagctaatttcatctgagaaatagaacgccgttttctgatctttcgtactctttgtgcaagtttctgatctaattcttctgctgtttcccatactaattgttccatttatttctcctcattttatagataatattttatccaaaatctcatatttttaataataatagataatattttatctattattattttatcatttatacttcatttaaacaagttttgtttgaatatattcaatttctttagaactgtttatactttctttagaattgttcatactttgtatattgaatgcttcgaggattttggtatacttaagacatagtttttcatatatattttttaatcctctcttttcagaaaagtaaccgctcattttattgagcggtctttttatttttcaaaaattggtgtatgatagtctctggttgtttgtatacaatcaaatttttctttaaaggagttatcaccaatgagtacttttcaaaaattcatccaatattataaaccctacaaaaaagtcttcatttttgatctgatctgtgcagcatttatcagtctggttgatcttgcttatccacagatccttcgttcacttacaaagactttatttcttaaggatgcttctatgatccttaaaactcttccgatcatcgggggaattttatttatctgctatatttttcaggcgttctgtaaatattatgtcagctgtcagggacatatcatgggagctcagatggaacgtgatatgcgccgtaaactgtttgaccattatgaaaatctttctttttcctattatgatcaacataacaccggacagatgatgagccgtcttgtttctgatctgtttgatatttccgaagctgcccatcacggccctgagaatttatttatctctcttgtaaagatcgttggatcttttattttcctgtttatcattcagtggaaattagcgattattcttcttgcgatcgttttactgatgatcttcttcagtgcaaagcaaaaccgtaagatgcaggctaccttccttgataaccgcaggaagattggtgatgtcaatgcttctttgcaagactcccttgctggaatccgtattgtgcagtcttttgcaaatgaagatattgaacgtgagaaatttcgtgttggaaatgaggcatttttagattccaagcgtgataattatcgtgctatgggaagttttcagagtggaaatacatttttccaaggaatgatgtatcttgtcactttacttgctggtggttattttatcgctcttggccagatgagtgctgctgaccttgctatgtatgcattgtatattggaatctttatcagcccgattcagattcttgtagaattaacagaaatgatccagaaaggtatgtctggttttatccgttatcagtctgttattgatattgaacctgagatcacagattctgttgatgccgttaatatgaaacatcctgatggggatatctgttatcatgatgtctcatttagttacgaggataatgagattgtattaaatcacattgatttcacgatcaaatcaggaaaatccattgcactcgttggaccttccggtggtggaaaaacaacgatctgttctctgctgcctcgattttatgatattacagatggtttgattacgatcggtggtcagaatatcaaggatataaaattagagagtcttagaagctccatcggtattgttcaacaggatgtttatctatttggcggcagtgtcaaagaaaatattgcttacggaaaccctgatgcaacctttgatgaaattgtcgaagctgctaagaaagccaatatccacgattttattatgacattacctaatggctatgatactttcgttggagaacgtggtacaagattatccggtggtcagaagcaaagaatctctattgcaagagttttcttaaagaacccgccaatcttaatcttagatgaagctaccagcgcattagataatgaaagcgagcagcatatccagaagagtctggacgccttgtctgaaaatcgaacaacaatcacgatcgcccatcgtttatcaacgatccagaatgcagatgaaattcttgttatcgatggacaaacgatcaaagaacgaggaacacatgaagaactaattgcttctggcggtctttatgctaaatactatcatatgatgtaagtgtcaaaagtacaacaacgtcgaaacctattttgtttagaactgtttataaattctttagaattgttcatactttgtatattgaatgcctcggggattttggtatacttaagacatagtttttcatatatatattttttaatcctctcttttcagaaaagtaaccgctcattttattgagcggtcttttttatatcctctcatagattttatactcttccattaatttatttctatactgtatatcattgtatatcttatctatatcttgaattttattattagctaataaaatttttactaactgtaatgtagcattttcccctataatttttccctgcgctataccttgtgttattccttgacttattccttgacttattccttgacttattccttgctcaattcctttattaattgctgtatctaatattgtacacatagtaacctctccttcctcatttttctttacatccaattgcaaaaatctttcgtcttctgcaaaaatcctcataaattttaacatttcatccacatgtttgattggtttatgattttcaattgttttataaccttttcttcgttttacaaaataatccgcaataattccaaagtcactttgaaacatttttatttgttcttctgtcagatatgctatgtcaaatacattcaatttataattttgaaacagctcctcattcacactttcttgattgataacttctcttagttctttatcatctttccattgattatctccaaaatgtaagatcagtgttattactttacaaaattcttttgcacctttctttaacatctgagaacgataacttgctccatcgtatgcaattacacgtagtggcatctttttatctttgattgtctgattttcaattccaaataataccttgaaaccttttttattattccattctttcaaagtatctctctcttcttcatgaagcacatcatctgatgctttatattgtgaccgtatatttgttgtccgtagttcctctggtttaactacctcttctccttgataaactaatacattgataatatctgcaaatacatctggataatcttccaataacttttcaatcttatccttttctcccattcctgactccttgtttgtaaactatcatttggttatcttatctgcagaactgcatattcatagaatttctctgaatcgaattacaattatatagaacttctttgactttaatctagattattgatgtttatagtttacattaatttacaaatattggcaagtattttttacagtttattccacatattttatttattattagtatactgcacttatttcatattttcaatacttcttttagaagcactaataacagaagagccatccggcgagcataaattctctggcggatggctcctattcttatttattttttctcatatacatatcaaagactattacaatctactgctgaaacgcattcaacagattagggatcatctgtttcttacgtgacataactccaggaagaattgcaactttatcttctggtgttacaccaaatccgcgttcgatcactccctcagcttctggtccgcagatcagcagatgtgttgtttcctctaagatgtttgttagcataaagaatacgtaatcaagtccctgttcttctttcacagaatccatatattcaaggattgatgctttgatatcatctaattctccctgatccatggatgtgatctgtccaacaccaaaatcaattgtatcggcattgaatttcttataatccatgtagaagatctcgtttggagtcttaccacttaaatcacttcctgcacggaacattgctttggcatgttcttctacatcaattcctgcgatctgtgctaattctctcgcgatctgttcgtccactggtgtacatgttggagaacggaacattaatgtatcagaaagaattgcagaacacattaatcctgccatctcttttgtaatctcgattccctgttcacggtacatctgagcaacgatcgttcctgtacatccaactggctgatttctgaagtaaactggtgatacagtttccacacttccgattctgtggtggtcgatgatctccatgatctcacattcttctaatccttcgactgcctgtgatacctcattatggtcaactaagattacctgtttcttgttgaattctaagatacgacgtctggaaataaatcctacaaattcgttatctgcattcaatacagggaagtaacggaaacgtttctttgtcatctcttctttgacatcatctacaaaatctgtttcattgaaagatacgatcgtatctgttgccatgatataagatactggcattgcctggcagatcaaacggcttgctgtaaatgtatcatatggtgttgtgatgattctgcagttcttttcctttgcaagttctaatactttatcagtaacttctgtacccatgcatactacaacacactgtactcctgtctggatcgcaccaatctgtgcatcttcacggtttgcaacgatcactgtatctttagctgttacaaattcttccattgtatcaacacttgcggcagatactgttaacttaccttctgtgatatatccttcgatatctcctgcctgaagtgttccatctaatgtttctacaacatttttatatggtgtttttgctttggcaaggatttcattgtcataaacatccatgtctgctttcaacacatcactgatggataccagaccgatcattttctttccatctaatactggaagagacacgatcttctctgtctgcatcatttcacgtgcagatttcagggaatctgtcgcttttgcacctttaactagatttaaatttacgtcttttaatcttggtcttacatcactaacatattttggatctttaattccaaatgtatccaatacatatcttgtttcgccgttgatattaccggcacgatatgcttcgtatccatttccttccacttgattctttaagtttgcgtatgcgatcgcagaacagatggaatctgtatctggattgcgatgtccaatgacatatacttttttcattgttcctccttctttcttggcagccgtattatgaatgtcgtatactcattctggctttttgctttgatagttccatcatgaagctctatgatctccttcgcgatcgcaagtccaagacctgccccgccagtttcagaagatcttgcttcatctaatctgtaaaatttctcaaacaggttatttaattgatgttctggtatagtctttccctgattcctgactaaaatctctgcgttatctccatcaatcattccataaacctcgatgagagaattcggataacaatacgatactgcattccttaacagattctcaaaaaccctggcaagcctgtccggatcaccataaattagtattttatcatctacctctatcttccactctaatcctttctgcttaaataccgcagcaaaagaatccatcacctgttcaagcagaacataaagataaaattcctttttgtccaaggtaatattctgaagattataccttgtaatttcaaagaactcattgatcagttctccaagacgtttcgctttctcaagagaaattcctatatacttagctctttgttcttccgacatatccggcgattcatttaacaatgataaatatgcaatgatcgacgtcaacggtgtcttcagatcatgagcaagatagacgatgatatcattctttctctgctcactttcttctgcaatccgcctctgttctttcaacgttcctttgatctcatttaatttgttctccaaaggattcaactctggtgggagcaatatgcggtctttggattcatttaagatcatctggatcccgccttcaacctgtcttaggtatgtcgtgaattttgacatacccagataaaagcttaacaaaagcagcacaaaaaatccagcaccaatgatcattgttttattttgtacaaagatcagacgatatacacggatcgcttccagctcatccatcccgatccgttcaaatatataaacgaccgttttggcaaatggatcctgaaatacaccatctacaaatatatcaagtacaaaatatccgatacatgcaacgatcaaactgattcccaatgtctgtagtatgatccttatctttaaacttctgtatttactcctcaactttgtatccaactccccagactgtcttgatcaattctttgtgtcccatgacctctcccagcttctcacggagatgtctgatatgtaccataactgtattattgttattcttaaaatacttttctttccatacctgctcaaaaagattctctgagcttataaccttcccacggttctgtgtcagaatccataaaattgaaaattccagcggtgtcaatgtaatttcttcttctccataagtacactggtgtgttgcacgatttaagataagacctgcgatctccagtgtatcttcctgattcataccgcttccatcgttgtatcttgtaaatcttcgaagctgtgccttcactcttgccatcaattccaacggctcaaatggtttctcaatataatcatcagctcccaatgtcaatccattgatcttatccatggaagatactttcgctgtcagcatgatcacagggaaattgtgtgttaaacggatctgttttaaaatctcaaatccatcaatatctggcagcatcacatcaaggatcgccagatcaatattctcatgttctacacacgccaaggcatcctttccattgtaaaatttatgtacattataattttcattctttaaatataattcaataaagtcagcaatctctttctcgtcatctactactaatacagttgactgtctcattcgcttcctccttactctttaccaccctgaatcacatgaaatcttgcttcttggctttcttcttccacttctgttctcgtatgtcccttgagactatataatggtacagttttataaagcgtacggatcaattcacaaaggatcctttgatgttctttatcttcttcatccagaagattcacatacgcagatgtaatctcttcatacgtcaatccattttgaatcttaacaaccagtgattttacgatcatcataaccttatactgatcattctcgatattcttcatcacaaaatcatataattctgggattccatcccagcctccaattccattgcctagtgccagattcttatattcatcttcactgtaacgtttccatgataaatcttccctaaggctccactgaataaatacttcgttgcggttttctacctcacggcttgccagtaacagtcttgaattcatctgatttcttaataagattcctgactgccagaatacaatacggagtaatataaattcttccaactcatcataagtcagctctgggaacatctcttcctgaatcatctggcaacactcataaatatctaaaataccatataaaaacaacattccaaagagaatattctcaagtctggtaccctcttctaactcttcctgaactctgcggcttttcagagagaagaaaaaattatcctttgcttctatattcaataagatcgtatcgtcttcatatgagagaaatccaagaaaatgtaactgctcaatctctcttgcgtacatctcagcaagcagactctcaccttccatatcccagcattgcagcaagaattcgattgcttcctgctgtaataacttagtgatcaattgtggcatatcataaagtttctctgctatcttctctgccagagatacttcactttcgtcttcatgaaacacaatatcgattcgttccgataaaaccatcaggttgactcttggattggtcgcaagttcttctatataagttcgtcttgattcttcaattcttgccatcgcccgatccctcctttgtcttaatctaataaagtatatcttatcgagcttcttccgtccagtggaacaggcataaagagtcgtctaaaataattctttaattcggtttatattctcttttgtgacacggtatcccatatcatacgtttgttttaatacatcaatgtctttctctaaactatcgattgtatactctggtcttaggatcactgcctttccttccctctctaactgctcacaatatctaactgttttattatatcttatatgacgatttaatagcagttccggtaaatgtggatattttctcttgagaagttttgccgcagctttgttgctcttgcttaattcttttctatacccttctggccttgtcagtacgatcagattcttatcattcccatcttctattgatcgtctgatcggaatcggatctgcaattccaccatcataataaggctttccatctactttgatcgttggaaatgcaaacgggatcgcacaagttgctcgaagcatcgtacacttcttatccagtttcattccatctttgtattctgctttccctgtccatgcatttgttacaccgaccttgatcgttcccttgtattcattgaatgtcttccagtcaaatggatacagtttgtttgggatcgtgtcatatacgaaatccagtccaaaaagacttctctctttcagtagattccccgctcccatgtatcttttatcattcctgtggttcatcaggatctttaaatttctttccttttgtttggatatataagaaaaaccatcacagattcccgcagatactccgatcatataaggaaacatgatatcttcatccaacagtgcatccatcactcctgcactaaagatcggacgaaatgttcctccttctaaaataataccaggcatctttatgccctcctcatcttcttatgtttcgtaaacttgtcttatgttgtgtcatgtgagttctatagacacttgctctttattatatcacgtttcgattctccattgttacattttgtcaaagattttcttaagagatttcgaaatttttgtgaataaaaaagatatcgcttcctttcatttatttcaaattggtttgtaacgtatggatcaattcctcaataacaattggtttggataaaaatccatccataccacattccagtgctttctttctatcttcatcaaaagcattggcagtcatagcaaggatcgtaatttctgccagtgctggatcatccaatgcacggatctgctttgcagcctcatatccattcattacaggcatctgaatatccataagtacaagctcataatcgcctggtgctgaattcctgattttctccactgcctctgctccattttctgctgtatgaacctgaaatccatattcattaagaatcgcaatcgcaatctcactgtttaattcattatcttctacaagcagaatacttctgcctctgaaatctgaacttactgccggaagaatatcatcattcgtcctatcctgcttctgaccgatcgctgtcatcaaagtatctctgatgtctgacatgaatataggtttcgcacaaaatgcattgactcctgctgctcttgcttccgcttcaatctctgaccagtcgtaagcagtcaggataatgatcggtgtatcatcaccaagactacggatctgtcgggtaacttcaataccattcatatctggcaagcgccaatcgatgatataggcatggaatgcatcaccaagctctatagactgccttgcacggagaaccgcctccttaccagaaagtgtccattccgaacgcattccaacctttgcaagcatctttgtcacgctgtcacaggtattaaaatcatcatctatcaccaatgccttaagaccttccaacgctgcgatcttctctacacgatgctgcttagactgggtccgcaacggcagtcgtacaataaattccgtacctttgccctgttctgtctggatctcaatatttccgcccatcatatccacgatattcttggtaatagccatgcccagtcctgtaccttgagtcctgctgactgtagaacttctctcccgctcaaaaggagaaaaaagtttctgtacaaaatcctcactcataccgattccgttatcctttacccgaatctcatataactgacgctctcgctgtgttcccggatattgtttcaaccgaacagaaatcattccgcctgcaggagtaaacttgatcgcattggacaaaagattcagcagtatctggtttagccgtgtcttatcgcaatacacatcctcattcataacatccatggcatccatataaagttccagctgcttcgcatgaatctgtccactgatgatcgtcttcagatcatgaagtacatctgacaaactaacctctgtctcttccagatggatcttgccactctcaatacgactcatatccagtatatcattaatcagtgaaagcagatgattgctggatgaaagaatcttgccaagataatctctgaccattttcttgttattaatgttgctcacagccagtgtcgtaaacccaatgatagcgttcattggcgtccggatatcatgagacatgttagaaagaaaagtactctttgcctggttggcattctccgcagcatggactgcatcagaaagtgcctgattcattttcttgtcagcagtacgatccgacataaccagtatatatttcttatctccgttcacctcactacccattgcaacactatgaaaccagcgtcgttctcctgttttctgatgaacatactcaaaatcccattcctgctgttcatgaacctgaatctcctttagatgatccttcttcggatctttcgtatcctcagaatgcagttctcctaaaacagaaatatctttccgaatctgttctacggtaatccccaacagtttttctacattcggactgacataatctgcctgatacgtttttgcatccaacattaagaatacatcatctacattcattgacaacttttgaaacatctcatccctgtacaagatctctgtgtcttttttcttcagtcttacactgttttttcgtaaaataaatccaataaggactgctgtaatacaaagcacgactgcacccacaagaagcatcgtactaagttgcaaagtgttcatactggcattgacgatatctgcctggacaagtcccagaaatacccagtcctgaatgcctgatttttcataaacaagataataatccttttcatccagatttagtaacatcgcacctgtatgtccctctttaaatttcttcgaaatttcaaggatctctttttcggagatatctgtatgttctctcagaatgccaaaaaagttatatacatttccccatgactccaaagaatgatcgatcacaacacgaccatctggatgaagaacataactctttgcttttccattaaacgcagagatatcgagtacatttactatatcagcgttttcataggcaatagcaattgcatcatatttaaatccctgataacttccatgagccttcgggctggcaaaaacaagcatctgggattttccgggaactgctgcattggttatgatatcattgcctttttgaatctcatcttcaatattttcctgtaatccaagataccctgtttcacctgttgtcatcttatagttaccgtcagctgatagaaaataaaaatataaaaatcccgcatctttctgcgctttatctatataatcacgaattttgctttcacttggagcatcttgcagatacttactccacatatgaagatacgtcagattcttatttgagagttcccttaacatattatccgactgatggaaaacttctgttagatgagaaacactttcctcatatacagttttcgatacaaatccaaaatattgagaaacagccaaaacgattccaagaaagaatgcaagaaaagcaatgaccttgagtcgttttctcatgataggtttctctttgttcatattatgattcttaacatccattcttctcacctcagagtcatatagtcttcaggctttgcgagaacggcatcacccttcaaaacacattttgtccaggtatctttcacctctccatcaaatacaatgtttttacccgctggatacgattccatatgttgtggtgtcgcaagacaggttacagtaaaggtatccttatcctgaactgattttccattctttgtaactttacttaatgtataaccatcatccgtttccttgatctctacagaaataccactgaccacaggcagagagccacggttaaatggattgaaacctccctgatagccttctacaaaatttctgactgtctttttcagctcagccccactcatcttccgtttgtaagctgaaagatcatttggcatgatcatattgccagccattttttccgtatatcctgccttccgtacacttcctgtaaagctgtttcctgttgcgatcagcacatccgtaccgtagacgccacgcaaagtatgtgccataacagaatacgcttcattccccccgctggtatgaaaatgattggaataagctttctttgaatcgagcacgatcttctcagaatcagatttcttcttcagaagctttgtattaaatgactggtaagcctgtttggcatcgtattttcctgaaatcatcttagagactacatcttgggatacgttgaaaaagtcattggatgcgattcgaatatacatatgattttcttcgatcacaggtctgacatctttgagatattctgtgagatgtgtatctacatcctgactatagcttaatatatcctgaccatcataaacgatccgattctgtgcatcctctgacagcattacattcaacactttcattgctttctgccggcgtgtttcatcctttgtcaggttacggttcagcgccacctgaaaatatggtgtcgtcatcagccatttttcgccgttttgttgaaagaatggaagaaatgttgtatcaatgccctgatcctgaaatatttttacaccagaagaactgccaaagtacatagcaagcttaccacttttatacatctccatcacattatcataatccatattcagatcatctttgttcaaccctgtatcctgaatgaattgctccatacgttcaaaagcctccggccagactttactgtccaaaccctctctctttgtattatcagggtcactatagacagtacgccatttacgtccagccgctgtagacagctctgatgcagatagtccctgcagtgtttccatgcaagtataatcataaaaataatctgccgtgaatccacggatccccacttttttgaatgcctgacaggcagaaacaaaacttttgtaatctgttggcagaggaatatgatactttttaaaaaggtctttgttaactacaaacccatgtgcatccgcacacactggaagccagtttacactgccatcctgattcataaaattgttgaggtatgtattatagacagcacctgcttcattggttgtggaaagatccatcaggctgtctttcagaggatttgcatcatgtagtgaaaaacgacagcaagttatgatatccggcaatccgccattttccttaagaaaccgatagaaatccagatcattgttgcccactacaaattcaatattaatatctggaagctgtttctgaatgtatggggcatatttttcatatagatttgtgctccataaatatacagtgatcgtatctttctcttcatttttcgcgctcttcctatcacatcctgacataagtgatatgactgtcaccatcaccaaaaatatagaaagaactctattccattttctctttttcattatgaatcctcctctttattttccacgaattcactgatcacttttactaataattttgcatctataggtttcgcgatatgttcattcattcccgattcttttgactttaatctatcctcggtgaacgcatttgccgtcattgctatgatcggaaccgtttttgcatcatctctgtccagtgcacggatcatctttgctgcttcataaccattcttgatcggcatcatgatatccatcagaatgacatcaaattcatctggtctgctttttttgaatatctcaacagcttcttggccattccatgccttcgtcacagatgcaccttcattctgaatcacaaattctgcgatttccatattcagctcattatcttccaccagaaggatcttcagatcttttatagatttttctgatatagcttcctgttcttcacgttgatcagcatcctgatctattttaaatggaatcctgatcacaaaggttgtgccttctcccttcttactttcaaacgtgatcgttcctcccattttttcgatcagttttttcgtgatcggcattccaagccctgttccggaaaattttgtacggcttccagtatgctcctgtgcaaacggttcaaaaaggcgtttctggaaatcctttgtcataccaattcctgtatctcggcagataaattcaatcgtcactcttccctcctgctccgatgtaaattcctggtagctgatgtagatatatccgttttctttattatattttaccgcatttgacaaaatattcatcatgatcctttttacatatcctggactcccgatcagattccagtgtgtgatttcttctttctcccacacgatccgaatattttcttctgcagctatctgttcgatcacaacaaagatttccttggaaatattgcttagattaaatggaatttcttccagaactacttcgtccgattccagcttactcatatccaaaacttcattgatcaattccagtaacagatgagatgtttctttgatctttgtcctgcattctgtctgtttttccatatcatctgcataatgctccgccacatcgatcataccgcatattccattgatcggtgtccggatatcatgactcatcctctggagaaactcagttttcgcctcgttcgctgcctctgctttttttgccgatttcagaagttctgctttatatttctcatctttttcctgttcctgtttctgatgtgccagattggttatatatatccaggaccatgaaaaactaagaatgataagataaaggaatacaacacctgttacactgagtggcagattactgaatacctctttatctggtaaatacatgtagatataataatccctttgtttcagcatgataccatagcatccagttcctttattcttcagatgaaagatatgccgactatctgtatgcttcttcattttctgaataatctcattgtctgcgacatcctgtgccaataatttctcatcgttactggcaataatcttccctttgtctgcaacgatgatcgtcccgtctttctcagtattgtacccctttaaaagactctggatcgttaaagtataatttctgataaatctcggagatgtgtaatagtaaactgcaacgatccctggggcatcttttctggcgcaggctgcgatatcgatacatgatccatctcctctgacaatccgttctgaataagatctttctttatatcctgtgtaatccataatgatatctttttgcagataatcaatcatctcatccatcaaaccttcatccatactgtattcacagactttctttccttcttcatccaatacaagaataccatccacccagagtgactgcagattctctttcagaagctttcggtctaactgctttctattctttacttccatatcaatatttgtactcatctgtctggcactttcgatcgcacgaaggagactttttgattctgaagattcattataatgagtataggttgagcactgtactttgacatagtttacaatctccaccattcttttctcagcttcgtttttttccgtatgaaaaaaacaaaaaattgcagtgacaaacatacagatgccaagcaaactagcaactatccagaatcgttttgctttttctcttccattaatatccaagattatccacctccaaatatttctctggatcatccatatatttttttataatcttcagggaggtaccatccttgtgcatttcttccagcttctggttcatctgctcgcagatccctctgtcatcattctttgcaaaagcagctcctatcccgacgaccatcaatggttccttcagaatgcggaagcttgtatcataatctttcatatactggatgatggattcctcatgcacagccacagcatccacatacccttttgccagaaatgtatagatcaattccctgtgtccaagactaatcagattgccaagttttggaattctcttatctgtccgcttcagaaagataccttccggtttggttgtagactggactgcaagattctttcctttcagatcactcagtttatgaatgtcactgttctcatttacagcaaccacctgacggcttgctatgtatggtccggcccaacgataatcgttaagtcgtccttccattgaaaaacatcccatgatacaatcaatttttccactttctaccagctcttttttcttttcccaattgatctgaacaatctccgtcttataccccatccttctaaatgcttccgttgccagttcaacatctatacctgtcgggataccatcctcattcaggaaattataaggcggataattgtcacttccaatttttataacaggtttttttgttgtgtcagacactttatctgccttatcacatcctgccaaagttgccattaatatagaaaatatcaatacaacagtaaaaatttttctttttttcatcttataacctcatttttatatctcatccttattgttcagtaatctgcgcttcaacccccccccgaattttatgctacttattgttttttccaataccttcatctcaactggtttggaaatatgcgcattcataccgacggtcagggaatgatgaatgtcatctgaaaatgcattagcggtcattgcaatgatcgggatcgtctttgcctgttcatgcgaactcttgcggatcgcctttgttgcctcatagccattcataactggcatctgcacatccatcaggatcatatcataatctccagaagcagatcgctcaaatgtctcgagaatcctttcaccgttttcacagacagtacactcagctcccttgatctttaacagttccgtcaagatctccgcattcagctcattatcctctgcacacaagaacctcattcctttcataatatcatcatatgtctcactttcttctacctgcaatgctgacgaaacagactcttctgcaattttaagatccataaagacctcaaaacaacttcccagtcccagttcactatcgacatcaatagttcctcccattgcttcaatcagattcttggtgatcgccattccaagccctgttccctgtatcttatttgtcaaggaactttcctcacgggtaaaagtatcaaagatcttgtctttgaaatcctcagacatacctacaccattatcaataactgcaaaatgatactttgcatacgcactggatttcgtttcacattcttctacaagaaactggatctttccacccttctgtgtatactttactgcatttgaaagcagattgctgaaaatctgcatcaaatgaacataatcgctattgacccattcatgcacgatgttctcatgatgaatcaccaaagactgatgcttttcctctgtctgtggacagaacatcgtttgaatctcctgcataaactccagaatagaaaaatcagaataactgaaaacagtttttcctgcttcaatcttgctcatatccaaaacgtcattaatgattcccaaaagatgctgtgcagaaacatctattttatcaacatactcgatcaccttatccttattccctgcatcatgtctgatcaaggatgtaatacccatgatcgcattcatcggtgtacggatatcatgagacatactagccaggaaatcacttttggactgacttgcattgttagcgacttcaaaagcctgctcagccgcccgtttagcttgcgtgagttctgtatttattgtttccagtcttgtattattttctctttcgatttcaattgcttcgctctggctttttctaagaactgtaacgattcctttgatcatacaaccagcagcaacaactgcaaacaagataataaaccatatgatcaacttcacaagccttaccgtattggtcgctacatattttgcaggaacgagaaagatcaagttccatgccgcatgatccattttctttaaaacataaaagtattccgtcccatcgagtatggcattagaataactcacacccttttcttttaattctttttctgctttgtcaaatgaagaatcatgtagatattgcatcttctttaataccgtgaacacattatgtcctttgatcagttccaccttattactattgaacagtttaaaaccattatcatcaagaatatagacactgttattattttcataggcatcacatccaaaatattcattcagttcatgcatatcctgatataatccataataattgatagtctgtccactttgaagcctgatcggatgctctaatttctttaaaaaaaccatacgggattcatttgtcgtcataaaattcgatacatagttgatctttttaggactatgttcaaaatgatatgtatcccttaccatcccctgatttccttcttctgtatagtactttccactgtcatcaacagccagcaatgttatttttgaatctgcaaattcatacaaatcagttattcttttcatatgcagactcaaatcctcggtagtccgtatatcagcagcttctatgatattacattgcaccttgacataatcccattttgtttccattacatcttccaaatttaaaaacatctgatgagtaacttcatccatctgatttaaccgttcttcataaataatcttttgaatgtatgtctgatatatgaaaataaatgaaatgaccataaataagattgcaacaatacagacaactatgatctttttgtatttctttgtcttctctaacatattgttttgactgaatctcatttcacatccgcctcacttagggttttaaattttgaaaagaaatcttttgctgcattcattcccacaatgccactgtcatttaatgtaagctctttacctgctccgcagatcacgactttgtaagtttgatctgcttcaagctttttatccttcactaatacatatggataggtattgcccgtaccagcagcatcgtaaccatctttacataattgtttgatttctcttcctgataattgtacggtttgtatcgtatcataccatcctgttggaagaatagaacaaatatcactttccgtaatatcctgtgcataaagttttccattcacaccagccatattctgctcttttccatttcctttgatccattttcctaaagaaatcagtgctgcatcactttttgttgcttccataaaacatctgccgatcagttttgcacaactcttctgagagataacttctgtcgtagttgtgataacttctggcttattgttgaccacacgatcctgatccttgtccaattgatccacaacatcttttatcgttgccttatcctgaatgtattctagcatacggtatcctgtattgaccaatgtattttcccaccctacatagataagcggtgccgtattcccggcattgatctcatcagcaatatccccataatacgtattatctgcattccaatctttaaatggaagaaggttcgcttttaaagttgcttcttcatataatgcacttgttccctccacggaagagatcactttcataacttttaatgcatctttaagcttttgcggatccttttctaattttttactcagtccatgaaaacgtgtcacgttcaaaatgtatacattctggcttccatcttcagaaagatatggcattaacccaaacttatcctttgtgccatctgtttctccaattccatttttacttcccagtaagaataatgtattacctttcataaattcttttatagtctcgtcatcactctgtggattctttttattggcagtaaacatacccaggtctttccatttctgaatataatccatacaatccatcattttctttgtatcactcacattagcctttcctgtcagataatctttctgccattgcttgccttggaatgtacctaaaaatgccgtatctgcaatattacacatatattgaaagccatagcctggatattcaatctgtgtcagacacaactgtacccctgcttttttcgcctttttcgccagcttttcaagatcatgaaaagattttggaagtttccatccatgtttttctaacaaggtcttattatatgtgatacctatacaactataggctgatggaagcatataaatagctccatcatctgaaatatcctgcaatctagattccacataattatctgtaaaatcataaccagcaagatcgatcatcctgtcactcacatcgtcaatattaggatcataaatagtctgtgtacaaatatccggcagatcatctgctgctaacatattttgtaaatatgtcgttgtatttgcaccagaataagaaagaactttcaaatttatttctgggtattttttatgtaccagatcaactaaacgatcacattctaaataaggggccagaattgtgatcggctcatgcttactcaatgtatttttattcacgcagcctgtaaagcatagtaatatagctgcaatagacaggctcaataattttcttaacttcataactttatcctccctcaattcataaaaatcccctacaaattccctatgaaatctctatgaaataaaacagcactgccaaacagacagtgcctatcattttctgcaactggctgccattttacaggccctttagctttgcgtcacagactttcgtctgttttgcctagaatctttctttaattataccatgataatatcagtatcaaaagtaaaaaatataaatctagctccaataatccgtctcgtattccaatccaatattcccagtcttaaacactggattctctccatttttcttctgcttttcataatcctccaatgctttcagtgctgtatttgacaaaatcaagatcactggaatattgatcagtgccataactcccatcaaaacatctgaaatattccaaagcatagaaacttccattcctgcaccaatgaacacaaccagtgcagatactatacgaaatcctttcatgaatgtctttgatggctgtcctttgtggatataatttaacaagttatcacaataaaaacaattcccaagaagtgttgtaaatgcaaacaataccatcgctactgtgataaagagtggtccgaagtttcctaaggattcatgcagtgctgcctgtacccatggtgccccctgtaattcttgagcaggggcgattcctgatgacaaacacatcatggctgttgctgtgcataaaagcagggtatcaatgaatacggataacatctgtactaagccctgtttgatcggatgacttacttgtgcggatgcagaagcatttggtgctgatccaatacctgcttcattggagtacagacctcttctgattccctgcatcatagctgatcctgcaaatgcaccaaaaattgctttgaaatcaaatgcttcgctgatgatctttgaaaatacaactggcagatatgcacggttgatgatcataacgatcacagagatcagaatatatgcaacccccatagctggcactaatgtagatgttacttttacaattcttgatcccccgcctaagagacaccatcctgtgatcactgcaagaattcctccgatgatccatggcgtccattttacatcataaaatgagaatcctgaaaatgtagattgtaaattataagatgcgagcatattaaatccaaatgcatacgttgcgatcatggaaatacagaatatgatcgctaatggtctgcagtgaagtgctgcttcaatgtaatatgccggtcctccgtaacattctccatcttttccttttctcttataaatctgtgccagcgtactttcgatcagtgcggatgcacttccgatgatcgcaatgatccacatccagaatacagagccaaatcctccaatgcagatagctgacgatactccaatgatatttcctgttccaactcgtgatgcggtagataccattaatgcctgaaacgatgatactccattttcatcttctggcttttctacaacggctttgcaggcatctttaaataatctcatctgtggcagttttgtacggatcgtaaaatagattcccgctccgatcaacagtattactagcaatttactgtacataaaagtactgatgctgtcaatgatgattcctaacataaattctctccttgtacgatattctcgtataataatctggatcaatagttacaatttttattgcagctactttaattcaacagaaaaatagacagtccctgcctgagggactgcccattcattttaaaagtatgcgattttactgtctgcgtcgtttttgtatcttatgatataatcgcgattttcagaattctgataaatgatgaatatcccgttttcctgccgtctgtcggcagaaaggtccgttgaaccttcttcgtatggcttcagaagctttcgctgctggtttaaaaacctatctgttattataataactcattcgtattgattacgcaattacaattatcacttggccatgattttctgagtgccccataggagatcagaaagttggcaaaccagccagctggtacagcgagccagacaaatgcaataccaaaacgtggtgcaaaagtcaaagcaactgacaagcggatcgcaagatttaccatattagcaacaagaaatggccgcatgattccaagaccgcgaaggactccatctgttgccatcttgattcccatgaaggtgaagaaataaccgagccatctcatataatttccagacacctgatatgctaaagcagttccatctttccctaggaacagtgaagaaatctgggtatgcaaggattcgatgatcatgaaagcaaggattgcgaaacatatatctaacaccaatgcagcatggtatccctttttgatacgttcgatcttctttgcaccaagattctgagaaacatacggcgaaactgcattaccaatggatacaaatatcaatgaaaaaacattttctactctcatcgttgctgaatatcctgcaagtgcctgtgtaccgaatggattcacaactgcctgtacgatcatcatgccaattgacactgtggactgctgaagaactgacggtacagcaatttgaagcatagaatgtaactcctgtctgtcaaaccagtcaaagcgactttcatatcgacgcatccggcacaagaagatcaaaagtgacaacactgcggaaatcccctgtgcaatgagagttgcgagggctgcaccgaacacaccgagtccaagtccagctaccatccaaagatccatcaatatatttaacatcgatgagaatattaaaagagccaacggtattttcgattcaccgatcgaagtaaacattgttgaaagaatattatacataaacaaaaatggaaatcccacaaaataaactcttagatacaataccgcttcattcagtatatcagcaggtgtttgtaatacactcatcatcaaatgagaaaaacaaaaaccaaagacacccaaaaatatacttaagaccagaaaactgatcaatgatgttgacacgatcgttttcattttgccataatctctagctccaaaataacggctgacaagcacacccgcacctacaccagcacccaatgctatacaaatgaagacattcgtaagggcagcacaggcaccaacagctgcaagtgcagaagagcctacaaactgaccgactatgattgaatcagccatattatacacttgttgaaagaagctgccaaggatcatgggcattgcaaaaacagtcagcgctttaaggggcgcatctgtaatcaaatattcatcttttgacattatcatattcctccataagtttctttttgttatctaaaaacactaacgatcaactcaaaatgctttcgattcgtttttataaaaccatctttttgtaattttgatatctccgtagacattgctgcacgatcaatacaaagataatctgccaattgctgtcggtcaaaaggaatgtcaaaagacaacgatgactgtctgatagattctgctgacaaataagacaacagtttatctcttgtcgttcgcttgccgacatgtgtgatcttgtcgttcaggatcagtatcttattggccaagacactgaccagattacgaattaacttctgatgatgttcacatgcagttggacaggaaaccagaagtctctgaacatttaaaaaaatgatctcacaatcctcatctgctgccacgctgacattcaaaacagctcccggacttgctgcatatggctcgccaaaaaaatcaccggcatggcattttgacagaatattccggtgtccccacagatcttcctgcataacaagaacgcaacccgacaccacaagtcccataacttcggtagagtccccagctctgaaaatataagaaccccgttttctgtaaattgtcgttgcatttacgcaatgtaatatcgatagtatctcattatccgtaaggcctttaaaaaaaggactgttttttaaaataggcaaatattttttcaaaatgatccctcctgttggaaatcaaacatacatgttgcaattattatactatattttttacagaaacccaagttgtatactattgacagaggatggaaatgataaaaaagatcttagaataaaaggagaatatagtaatggataagaatatgttttgttttcagtgtgaacagacgatcggatgcagtggatgtacaggaaattctggtgtctgtggaaaaacggcagatacagcgaaattacaggatgagctgacaggtgcattgatcggtctggcaagagctgttgacagcacaacagctgtttctaaaaaaactagtcaagtcataattgaaggactgtttactacagttacaaatgtcaattttgataatgcttcaattgaaagcatgatacaaaaagtcagagcagagaaagaaaggctggctcctgattgcagcaaatgtcagtctccgtgtggtaaaacagacgaatacgatatgcagcaactatggaatgcagatgaagatacccgatctctgaagtctctcattctctttggcattcgcggaatggctgcatacgcctatcatgcagctgttctgggtcatgaagatgatgaagtgaatctgttcttctgcgaagcattatttaagatcggttatgaagagaacacagaaacactgctttctacagttctcaaagtaggagagatcaatttgaagtgtatggcacttcttgacaaggcaaatactgaaacctatggaacaccagaaccgacagaagttacacttaccgtagaaaaaggaccatttattgtagtaactggtcatgatctgaaggatctgcagcttttacttgaacagacaagcggaaaagggatcaatatctatactcatggtgaaatgctcccagcccatgcctatccattcttaaagaaatttcctcatctaaaaggaaatttcggaaccgcatggcagaatcaacagaaagagtttgatcatcttcccgctccgatcctttacactaccaactgcctgatgcctccaaaaagcagctatgctgacagagtgtttacaacagaaatggttgctttcccaggcactgttcatatcgatgagaaaaaagattttacaccagttattgaaaaagcactggaactgggtggttacaaagaagatcaaatcctcacaggtatcaacggtggtacgaaagtaacaactggttttggtcatgcagccatcctgtcccatgcagatactgtaataaaagctgtaaaatcaggcgatatcagccatttcttcctggttgccggctgtgatggtgctaagccgggtcgaaattattatacagaatttgtaaaacaggcaccttctgacagtgtgatcctcactcttgcatgtgggaaattccgtttcaatgatctcgatctgggagaaatcggtggcctgccacgactgatggatattggccagtgcaacgatgcttatggtgcgatccaggttgctgtcgcacttgcggatgcatttgaatgctctgttaatgagcttccgctttccttcgttctttcctggtatgaacagaaagccgtctgcatcctgttaacacttttgcatctgggtatcaaaaacatccgtcttggtccttctcttccagcgttcttatcacctaacattctgaactttctggtagaaaattatggcattggacctattactaccccggaagaggatattaagacacttcaatcaggttgtgtgcagtgacatccacgctcactacagcatctatttcgtggcttgtctcctttccacaatccttcctgttatctcttgttgtttcttgatgcttccagtataataagatccatagagaaaacacacgcacagcatgtggacttaacacctgataatactcatgttttgcgatatacagggaggaaattctcatgggtaaacaatctaccagagaaaacaaaacaatttaccagctttgccgggaagccgcagggcttacaagggcagaagcaagtgataaaatgaaggctgtctcggattctaaaatcgaaaaattcgaatacgaaacacaggagcctacaccttatgatatcattcaaatggccgatgcttataagagaccggatctctgcaattattattgctcacacaaatgtgaaataggccaccgctatgttccagaagtagaagtaactgacttgtcaaatatcatcctagaaaccattgccggtctaaatgaaatcaaccctcttaccggtcggctgatccaaatcgctcgtgacggcaagatcagtgatgatgagatgagggattttgcttttatcagtaaaaaactggatgcaatttctttagccatagactctctgaatctttgggtagataagacggccagtgaacagggtctcaatcttgaacttctaaatgctgaaaaagaaaaattaaaataatccataaatcgcacgaacggcaacgaatcacttctgattcattgccgttctctttacatacgctgtaattgattgacgatactttccgttcttcgaatagcttcttctacctgtctttttgcagtattgattcgatcctggaccatccagtccaccacaaatccatcgaaaaaataatctgcaaatgaaagaaaagctccggtatcgatgtgtagatcacatgccatatttacatcatttaattccctgctgaaattacggaggtcatactttgcctgatccatattctgctttgcatgatccattttagaatgtttcagcatcgtactgaaaaaccctccaccaaacatatctaccagaccccagttttttgcactgttcagattctcttttgctgcactaagactatttaaggctctgcgtccggcttcaattgcttctcttttttctttttcaatatcatatcccattaaaaacacctctctgactttttatgaatgtgacgttacaagtccgataatcccaccaatgatcaatagtggaaaagctatatacattaatccgcctactaccattccaatcaatatcactggaaagaaaataatcagacaaagtaatttcatgattccccaggatgcttttaagccaaatataaaaaattttccaacaaaccaaatcatacaaatagtaaataatactgttaacatctttttctccttctaacactcatccagttgtgagtgattcatttttcgttgtttatctgatataaaatcagatgt

SEQ ID NO: 633 - DNA, 1737 bp, Unknown
  gut microbiota DNA sequence
cctcgtataatatcttttagatacataaatacatgtatctagttaccaaataaatattgttcaataggcttagcaaagcccatgatataattgtcctagtgtcaatcaggtaatagttctttttctccctgttgaaccagtaatggttgcttcataaatagtctgttcccctgacatggaagttagcttcaaaccggctggctgtttgcttaagtacatggactaccatctagcagtgtggtttcgcatctgtccatcttaagctggattcttatatgcgagggtgtcgatgctccatgatcatgggttttaccaagccgattgaacactttaatctacaacgaaagaaggtgattacaatgaacacactttacgtcggtattgatgtaagcagcaaatccaatgtcatttacttaatgcttccaaatggtgataagcacagtaatttttctgttgcaaactcacacgaaggttccacccagttggtaaaaagaattctttctgctttaacttcacattcccttgacacggttctaatcggtcttgaagcaacctctgtttatggagacaatctcgtgtacttcttaagagaagatgccactctggcgccgtttaacagaaagattcatgtcctcaatcctaagcaggtcaaaaagtttcatgacgcttataatgaccttccaaagaatgattatgtggactcttttgttattgccgactgcctgcgtttcggtagaatcaacaaagaggtatatatgggagactatcgttacaaagctctccagaacctcactcgggcacgtttcttcgctgttcaaaatctggtaaaagaaaagcagcgatttatgaatgtgctgttcaagaagtattctacgatgacgcaggagaaggtcttcagcgataccttcagcactaccgcccttgctgtctacgatgaatttgaatccgcagaagcactggcaaatatggacttacatgagcttactgactttatcattgaaaaaggaaagaatcgttttcctgatcctgatgcagtagccaaagccatacagaaagctgcccgcagttcttaccgtttaccaaaaacggtaaatgattctgtcaatcaggtgctttccatatccataacctccatgaaggcattggaatctcaaataaaagagttcgataaagctattaaagcccaaatggaactcttgccaaacgtattgatatccattccgggtatcggacctgtttattcagccggaatcatggctgaaatcggcgatatcaatcgttttaacagtcaggctgctcttgctaaatatgcaggacttgcctggaagcaacaccagtccggtggcttcgagtccgaagttacacggctcattccatccggcaaccgatttttaaagtactatctgtgtgaagctgcattttctcttgtaagatgcgacaaggaatacagcgacttctaccgcctcaaatataaagaggtaaacagatgccaacacaaacgtgcactcgcattaactgcccgtaaatttgtgcgcttagtctttcgactgctgaaagacaatcgcctatactgtccagcaaagtagattccatctacttgctgatgagctacgccctgttcatttttaaaaatttgaacgacagggcttaggtggatgttttttgtcttcatgagatatatacaaaaatatatgttttttgtgttatttatctcttgacatcacaccgctggactat

SEQ ID NO: 634 - DNA, 10243 bp, Unknown
  gut microbiota DNA sequence
gaggcgcttcgcaaaagcaagaaaaataaagaacgtgcggatatcccccgtgtgaagatgaacgagttggacccggaataccggagtcgtacccgtttggaggaagttaacttaggcttgacaaaagaacaggccatgcaagaggccgagcgctgtttggattgtccgaatcctacttgtatgcagggatgtccggtaaatatcaatatacctacttttatcaagaatatcgagcgtggggaattcttggaggcagctaagactttgaaggagacaagtgccctgcccgctgtttgcggtcgtgtatgtccgcaggagaaacaatgtgagagcaagtgtatccatttgaaaatgggtaaggaagcggttgccattggctacttggaacgtttcgccgctgattacgaacgtgagagcggtaatatctcggttccggagattgcggagaagaacggtatcaagattgccgtggtaggttccggtcctgccggattgtcttttgccggagatatggcgaagcgtggatatgatgtgactgtgttcgaggcattgcatgagatcggtggtgtattgaaatatggtatcccggagttccgcctaccgaataagatcgtggacgtggagattgatggccttcgtaagatgggcgtacagtttgagaaagattgtatcgtgggtaagacgatcagttatgatgatttgcatgcggatggctttaagggcgtgttcgtggcaagtggcgccggtctgcctaactttatgaacattccgggtgagaactttgtgggcgtgatgtcatccaacgagtatttgacccgtgtaaacttaatggatgcggcgaatccggaaagtgatacgccggtgctacaagggaagaaggtggccgtgatcggaggtggcaataccgctatggactctgtccgtactgctcgccgtctgggcgctaagcgtgctatgattgtctaccgtcgtagcgaggaggagatgcccgctcgtttggaagaggtgaaacatgcgaaggaagaaggtgtggagttcttgacgcttcataatccgattgaatatataggagatgaaagaggtcgtgttaagcagatgcgcttgcagaagatggagctaggtgaggcggatgcctctggtcgccgtcgtccggtacctatcgagggagctatcgaaacaatcgatgtggatgaggtgatcgttagcgtcggtgtatctccgaatccattaataccccgtgcctttggaggcttggaggtgagcaagaagggtacgatcgtagtggaggaagacagtatgcgctccgctttaggcgatgtgtatgccggtggtgacatcgttcgtggtggagctaccgtgattctggcgatgggagacggtcgtaaggccgccgccgctatggatgcggacttaagaggataagtataatatctattagttctataaggaaagacgggttgtttggacgatccgtcttttttcttttatcgtgatacggagatttatgtttattatctataagactaattcttgaaataatctctcaaatgtctgttctagatcgttggaaaaaccgggatgtggacgcgaggtttggatagaggcacttcttatggcggtaagccaacgaaagcgctccggaatatctaggctggctataggacctccatcctttgcgccggaacatatcttatcgaaaacgtggagattcgtacacaaagattctttatctatatctgatgtgaacagacgaagtttctcctcgtctacatgatagcgagccttgatgaatttaggccgtttacagaacatgataaggcctacattgataaactcctcccgttcgattttcggcacgatacggattacggcatattcatataagtgtttgtcttgcatgtcgagcttcatttataaacgtgtcagaatgggcgattcggtcaattaaaaaccggatatatacatcacgtatctcttgaggcgtaccgggactatcgttccaatgcaaccaatcgtcgggtactagacctacgatctcacgaattttctcttccgttaagatacgtttgaaatctttgtttacttcctccagcagcgtcgcttgtggcaataatacatgatccttgatatggatgaaagggccgatcgcatgtttttgccaatttacccatgagaaatggaaaaataaggaagctccatgatcgatgagccaaagttccttattccatatcaacatattcgtattccggaccgtgcggtctatatttgtcaaaagagcatcgagccatacgacttgtgaggcgagtttgggatctacacgattgactaccggatcgaaagtcaaggctcccgataaaaaatgtaatcccagattgagcccttgacttgcttgtagtaagtcttgtatctcctcgtcaccttccgaccgcccgaaagcctcgtcaagattcaggaagaccaattccggtacatggaaacccaagcaacgagcgatctcacctccgatcacctcggctatcaaggcttttgtcccatgtccggctccccggaacttaacgacatatttaaactcatcgtctgcctccgctaaagcaggcaatgatccgccttcccgcagaggcatgatatatcgggtaacattcgctgtacgtaattccataaccctcactttaattgaagataaagatacgattatattttagaaataaaaagccccgctattctttcgaacagcgaggccttttggaagcgagcggaagacgggactcgaacccgcgaccctaaccttggcaaggttatgctctaccaactgagctacttccgcattgtttgtttctcttttgcgagtgcaaaggtagtacaaatatttatactaccaaacattttcggtgaaaaatttaattatggatgtaaattttattaccgtttgtatcgacgacatattgtttgagggcttgtttctcctcagcgcaaggtccttccaccggattgcggataccgtttaaaagttcaaatttactaccgcatttcggacaaatggcgtatacggcagattcgtccacatctacgatgacattagcggatgcctcatgaggacaagcggcatcgaacgcaaagaatgccccggttccgttactggacaatccatgataaaccaatacgcctccaaaccctgtttgctcgccagcttggtctacatctttagaggtgtagatcttataagcctgtattgcattcaacgctttatcttgataagtcagatctagttccagatagaccgcacgatagggaatgcgagtctctatcgtatctgcgcaagataatagcgtaaacaagatcaaaagtggaaatatccgtcttatcttatccatggatcaatttcttttcagcctcgttcatccgttcgaaagagaaagaacctatcacgctacgcatcatggtggcgattggttcgttacatagattaccgatactgccttcgtgtgtatggttaacgctcttcgaaggaacgaatttaccggcctcgatatccaaacctacttgcttataagcgtcacggaaaggcattccggccaagacacggcggttcacttcttccacgctaaacaatagagaatatttatcatcgtccaatatatgctcgtttactttcacctcgcgcatcatatgagttaccatgcgtaagcaatccttcagctcgtcgaaagccggtaggaagacttccttgatgatctggagatcccggaagtaaccggaaggaagattattgctgatcaagatgatttgctgaggcaagccttgaagcttattgcatttggcacgtgtcaactcaaatacatccggattcttcttatgcggcatgatactggagccggtcgtgaactgatccggcagtttgatgaagccaaagttctggctattgaacatacaagcgtcgaacgctaacttggagagcgtagcggcgatacccgccatagcgaaagctacggtgcgttccatcttgccacgtcccatctgggcgtataccacattgtagtccagcgagtcgaaacctaataaatccgtagtcatctggcggtttagcgggaaggatgaaccatatccggcggcggaacccagcgggttacggttgcaaatacggtatgcggcttgcataagttgcaaatcatctaccaagctctccgcgtaagcgccgaaccaaagtccgaacgaagagggcatagctacctgtagatgcgtatatccgggaagcagtacatccttgtaccggttactctgggagatcaaaacgtcgaacaagccggaaaccaactcaaccaattcttgtatttgcgaacgggtgaaaagtttcagatccaatagaacctgatcattgcgggaacgcccgctatggatcttcttgcccatatcgcccaaacggcgtgtaagcatgagttccacctgcgagtgcacatcctcgatgccttcctcgatgatgaattctccacgatccgctacggcgtatatattccgtaattctgctaataagacgtttagttcctctttggtcaataaaccgatactttccagcatcgtgatatgcgccatagagcctaatacgtcatatttagcgaggtaaagatccatctcacggtccttacctaccgtgaagatatctacttcatgatctacctgtacatttttttcccaaagtttctgagccataatgaaaaaggaattaataaggcaaggaggcgataacggtcgagattttatccacagcctcttgcaaaggtttcgataccattggtttcaagaacggattcagatcggcacgaaccgtgatttttaaccgtgtgtcgtcctcggccacctgtttcaattgtatccacaagaaaaggggaacaggagagttggtcgtcgtgaacttgattaatttattcggctctctttctacgatctggaaggtaatcttaccaacgggatcgacagcgaaactacaggtatcgctgtcgaactcaaaattttttattttatcttgcgggatgcgatccttgatacgttccaagttggaaagatcggacaacatcgtgaagatacgttcatcattgtgtgggatctgtttgacctcactcacaaattcttcagtcattgagtgtctttttgtttattacttatttcgggtcccagttagccggatctttacgccattcctgaagaaccgcgatctcagactcatcgatgtaatgcgtacggacagcttcttccaagactgcgtcgtagttactcaatgtagtcaatgttactttagcgtctttgaaagcggcttccgctacagggaatccataggtaaagatagctaccatacccgcgacatcgcaaccaaagttacgtacggcctgtacggctttcaagctactacctccggtagataccaaatcctcgatgatcactactttagaacccggtttcaattctccttcgataaggttttccaatccatgatcttttggcgtagagcggatgtatacgaatggcaatcctaataaatcggctactaaagcaccttgagcgatcgcgcctgtagcaacaccggcaatggcatctacgttctcgaatttttcactaatcacacgagccaactccaatttaatgaagctacgaacgaccggataagaaagagtctttcggttgtcattgtagatcggagatttccagccggatgcccaagtaaacggattggccggttgcaactttacggctttaatctttaataatttttctgctactaaactttccagtgttttcatacaatcctatatttatatcagtttgcaaaaatagataaactgaatgacattaccttgaatatcgtacgttaattttttattaatatttatgcgacagatagggctaaaatgctgatgcgtatgcccggaatccctgataaagcctttgcgcaagcggaaatcgtggctccggttgtgatcacgtcgtctatgagcaggatatgtttgttttttaagctttccggatgaatgacattaaaaatagaacatacatttaaccaacggtcgtaaatggccttacgagtttgggtgcttgtgtgggtggtgcgggccagactttgcgtatcgatggggatatcccatatggaacggatgccggaggcgatccattcggactggttgtaacctctttgccgttttttgcggggatgcaggggaacggggataaggaggtctacggtacatatcgggctgtgatccgcttggagctctctcgctatctgccgtccgagtagatagcccagctctttattatcatggtatttgagcgagtggatcaggcattgtacttttccacctttctcgtatcgtagataagcggtggcgtattcgatccggtcctttccgataaaaagttgctcgacggggttgttcacctgttgatgatatcccgtgtgcggcagatcacataggcatttcaggcaaatttgttcttctccctcgacgagtggtcgtttacatattttacataagtttgggaaaaacaggttgagcagattattccatgtcgtcggcataatcctcgcagtctatttctttgaataattgacttaggcaatccaacgtgatctggctttcgaaacctcgtccggcggcgaaacggagtaacttgttgaataggtcccgctcgtcttttcctttggtcgatttctttttgctttttagtaaatcgagtaagatggagcggtattctccctcgtcgatggcggcgagcgattcttcccggatcggggaggggatgtttttcttataaagctcgtagcctatttttacccgtccccatttattgaatcgtagcttatcgttcacgaagaaacgggtgtaacgggattcgtcgataaaccgctctttcagcaagcgggcgatgatacgctcggaggcgtcggggggaagtccggcggcatcgatctttttctgtacgtcttgtatgcagcgttcggcggcggagcaataggcggctgcccggtgcaacatctcgggttcggttatctctttcatattttcgcttttacgatacggtctttcccgtatagatcttgtattaattcgacttcggtgtaattctcttgacgtagcatcgctacggtctcttttccgcaaagggcattgatctcgaagtaaagatgcccgccttccaccaaatgcctttgtccgaagcgggcgatggcccggtagaagagaagcggatcgtcgtcgggaacgaacaaggctagatgaggctcgttctccagaacgttcgcttccatggtcgctttctctctatacattatataagggggattactgacgatgcagtttaagtttcctataagagacgcttcggtttcctccgtatgggattttagtttcacgtacgtgaaaattttgtttctcgtacatgaaaatctagtttcacgtacgtgaaaattttgtttctcttgcatgaaactggaataaccttcggaaaggatatccaattcatggaaggatacggaaacttgattcatacgggcgttctcctcggccatggcgagcgcttcgggtgatatatccaccgccgctacctctgccttcggaagatgtttcgccaaggaaatagcgatacagccgcttcccgtaccaatatctaatatacgaggggcttggccttggtagtccgtgatgatccgctcgaccaactcggcggtttccgggcggggaatcaatacgtccggcgtcaccttaaactccatcccgtaaaaatccgctatgcctaataagtattgtatgggcttgtataaacgcagtccttctacaatctccttgattttaaatttctccgtatcagataattctttacctttgcctaacaggagttgatgggtagaaagaccgcaaacacgttccatgatgagccggacgagcgcttgggcttcgccgggaggataaatatctttgagggaatttcggatgtaggcgatggtctcagtcatatcttactcttgttttatcgcgaaagtagtgtaaaaaccgtttatatgcaaagattatggtagaggttgaagagaaatacatggctcgttgcatcgagttggccaaaggagggaggggaaatgtcagtccgaatccgatggttggtgcggtggttgtgcataagggccgtattatcggtgagggatttcacaggaaatgtggggaggcgcatgccgaggtgaatgctatcgcttccgtgaaagacgagtctttgttgaaagacagtacgatttatgtgagtctggagccttgctctcattatgggaagacgcctccttgcgccgagttgattatccggaaagggattccacgggtggtggtcggttgcttggatccttttcccgaggtgtcggggcgaggcgtgcggatgttgcgtgaggctggtgtcgaggtcgtcacaggcgtgatggaggaagaagcccgtgcgttgaacaaggcgtttatgacgctacaaacgaaaggccgtccttatattatcttgaaatgggcgcagagcgaggatgggtttatcgatcgtttgcgtacggacgtgtcggagccggtcacggttttgtcttctccggagacttcacgcttggtgcataaacttcgctcggaggtggcggctatcatggtcggtacacggaccgctttattggataatccttcattgaacgtgcgccattggtctggtaattctccggttagggtcgtattggatcgccggctcgttattcccgattcttatcggttgctgaatggtttctcacgtacattaatatttacggagaaggaagtggaaaaccgagagaacatggagtatatccggatagatttcgagggcccggtgatccggcaagtgctagatcatcttgctgcccggaagttggattccttattggtggaaggtggggcccagttgattaattctttcgtggaagcggatgtgtgggacgaggcgagggtggaaacagccccggttcgcctgtatcaaggggtgcatgcgccgatgcttggaaaggaggctgttagcggcatctctagacgttctgttatgagcattaaaaatcataactatgaaattttaaatcataacgatgagttcgaaaaatcataactatgaattttaaggctcatataatcaactaaaatattataaatattagcaggtattagggtgaaagcaaaaaatgtttctacttttgtgcctttatatgcgacaaacttatgtttttgatgaaaaataaattagtactatttataacaggttgttttgcattagtgttgtcttcttgtttgaaatcagaagatgtcactgatatagaattggttaagaactgccaaatatcctcttttaagctaagtagtgattctatctcggggttggataccgtgaagtttacgatcgaccaactgacggggcggatttttaacattgactctctgccttttggcacgaagatcgagaaagttgtttgtacgattacggcagccagtagctatgcgcttagcggtatagaggtaagcccgtatgcttatccggactctacttattacttaaacaatttatcagactccattaatttctccgctccggtaaagttcgtggttcatgcgtatgaccaagtcacgacaaaagtctatatggcgcaggtgaatatccatcaagtggttccggactctatggtttggagtatgtacgcgaatcctatgattggcattaccgtgaaggatcagaaggtggtaacctacgattataatggatcggagaattactttatgtatgtgaaacccgccgagtccggtaaaccttaccaattatattacgctccggtaagcgcgcctaagggctggcagtcattatccttgaccggtctgccttccgatgggcttttgatctcccagattaccgagtataacaatgctttatatgtgccggctacaaatggcactttatatagatccgaggatggcttgacttggagcgctgtagagaacgccccttccgtgaaatacgttttgggtagcgtgaagcagggcacgaaacagccttccgccttagctacgatcgtggatcaggaaggaaagttagcgttctatgcgatgaacgaatccatggagtggatcgccggagatgcggtgcctagcggattccctgttaccggatttagcaatctccaatatgccgcaatgtatcatgagtacttgatgaccgccagcggacg

SEQ ID NO: 635 - DNA, 26214 bp, Unknown
  gut microbiota DNA sequence
tttgttcatcaaagttccgtttctcttctgagaaactccactgtgctgaacaggcttaaagcctaacaataaaaaatgggctgcttctgcagcccaatctaatgaaaagagaggattaaaatatatatgaaaaactatgtcttaagtatatcaaaatccccactccattcaatattctaaatctaaacaattctaaagaaaatataaacttctataaagagaaaattatccacagtcgaatttagtgtccgctacgtgcgaatccgagcgagagcgcgtcaccagatagtttatatgaagcggtctaccaactgccgcctcctccgcctccgaagccgcctcctgagaatcctccatctcctccagaaaagaattctccaactcctccagattctgatggttctacaactgtcaggttctcagagaccacatgatccatatagtgccccatcatataataatggaaataaggatcactgccgccatagacataccagtctggcgcaggaagttttaatgcatccagtttctttgcataaagatcaaacaacccaaataccatggaataaggcagaatatgataaaacatgtctggatgatctttcgccaataccttcattcggtctaattccgcagtttcaataaaatcacgaagtcctgctagatatcccatccattccacacattggtgggttctcttcttcataaatgcagtcaggattactccgataaatgatactgcaacgatcacaagatacacatggaagaaatcaaataattctcctctttttatcttcacataatagtataatccatagaaaataaatcctagaatagaaagtactgccgatgcgatcggaagtcccgttcttgctccctttgagattgcataccatttatctacactatggcatgcaagaaacattcctataaaatacaatatccacgccatcaatggaaggagcagatttaagatcccatctggactaaatatcatcataacgaatgcaaataaacagattggaagctgcaacagtacaaaggatacgatccttgcaactttcgaagattttgtataaatatttttcttatgatcatatttgatatcatctttcactacctgcacggtatctgcaaatttgtactgtaaagaagaagcttttactttttttctgttcttaaataaagcttcaaacattgttttctgatatcttggttctgaatctggaatatctttgagtttgataaattccatatccttttgccctttttccttcatcttcagataacccttatctgcccaataaaggatcaaggaaataacatccttatcatccacggaaccgtccacaacatatccgacaaccgcactgtccattccttgtggcggctgatattgaatcgatgggatgatcttctcatcacgtccgaataaaacaaataacactgctgtgatcacaagaactcctattgatagtctaaaaatccatcgatccgctccgatctcatgttttgctgtaaaatatccatcacccagatcactatagcatgttaatccatttttaaatggcagtgtcttctttaatgttcctttaatctggttcttctcctcatcatatttcaaagtgatcacatcttttgcatactttgattccccataacgtccataatagaaatttacgcccttaagatctgttttctttggaaaatgaattgtaaaagtacttccttctggaatcttatttctccaaagtgtcgggaaaatattgtagtacaaataatcgtaggtatctccctgatatttagggatcagttgatacgtaaatctatagtttcctttacttacggtataatccgcagaaccaaacctcaatacctgactattaccgtcagaatcttcatctacatctgtcttactgtcatttgataacagtgtaaaatccgcataataaagtagttttttctgatctccatttttatcgcttgttatcaccttccctttgtatgggatataacgataaattccatgcctcggattgacaaacttgactttgatattctctgttactgtataacttccatcttctccgactttgacatctacatcaaatttctttgtttgcatattagaatcataagtgacttcatcatttgcaaacacattgtttcctgtccccataaaaatcatggcagccatcatgactgccattatggtacaggtaatccactttctcatagtgctttccccctgtccgttccttagaattttacttgtacattctcacgctcagattcattcgaaacctcaaataatggttttctcttaaatccaaagattcctgcgatgatattgcctgggaataactctgtcttggtattatagcggtttacaactccattataatatcttctggaacctgcgatctcttcttctaatctctgaagctgatcctgcaatttattaaagttctcattagcttttaattctggatagctttcagacactgcaaataaagatttcagtgctcctgacagtacattttcctgtttgatcttatcatcgatatttgtcgctgtcatcgcctgatttcttgcggctacaactttctctaatgtctctgattcgtgtttcgcataacctttgacggtttctacatagtttggaatcaagtcgtaacgcttctttaatgacacatcgattgctgaaaatgcctcttctgtcttgtttcttaatgttacaaatccattgtatgaactgatcagccatatcacgatgataagcacgatcactccgattacgatccctggtatcatgagctctacccctttctttgtttggtcagttttctttatcatacgttattcgtatcaaaacttcaacattaaaataagctgatcaactctcccatatatttatcataataatagatattttctgacagaaattcttctttgcttaattgctgatcagacttctctaatatgtgcaatagatcctcttcctgatcttctccgtcatcaaacagtaataacatttcatgaatactggttggcagaagatacaaactcttattatattttcttgaaatgtcgcctagaaaatcttcatagcaaatcacacctgctccatatctctgtattttgtttgacaccataaataccggtctgtcttcggtatgtcctcgaaaatctttatatacaggctcaaatttagcaggcagaaactgttttgtattcttctttgcactctcccataaaaactgatccgaccattgttctttgtttgcctttttatgatcgattctttgtatggatcgatcatccagatcaagaatatcaaaaacaattgccatatcttccaagagtaaatatggtctctcactccactccttatccttctcattaaaatgcatcaaatgatagataatacgctcgttttctctctgcatgactccttctttctcgttttttctcattttcctatctatcataacattcaatgttgctatcagcaatatttatagccgtcactatcactgctggatagtggtttttcatagctcctggtaatactattttttatggaggtattttatgaaaatcgatttaaaagaattaggaaaacgcatcaaacttacccgaaaagggcaagatctgacacaggaaatgcttgctgaaaaagctggtgtcagtcagcattatatctatgaaatcgaagctggacgcaaagccatgtctattcatagttttgcttctcttactactgcattggatgtatctgctgattatcttttatttggtgatgggcaaagaatatttgatgttgataccccggctcatcacaataatcaattgatggaaattgcagctgaacttaatccatcacagagagatcatgtgcttgagattctggaagtgatggttccttatattaaaaattgattgattgcaaaatacgatagatttttctaacgtaaaatagtgccaagatttttattgatcttgacactatttttatttgatctgatatttattttttgatttttactttttttacactactccatgaagaatagtgtaagaattactcgatgatcgtagcaactcttcccaatccaaccgtacattcatcatcacgaatgataaaaggttcttcttctgttatcttaattggttgaattaattcaattgttatatccagtgtttcccctggcatagccatatctatttctattggcaattgaatctctcctgttacatccgtcgttttgaaataaaactgcagacggtcatcatcaaagtatcctgtgtctcgtccaccttcattgatatctaacatgtatacttctgctgtaaactttgtatgtatagaggaagcttgatctatttcagactgtgaatctggaatatatttatccaccgcatccatcaattccatgatcttatctccccattctccatctggaccttcaagtgcttttaaagcagctccatagataaacggaatatcagatccaacaaatccacactgatatagttggtcacgaatccccatttctaccaattccagcatttccatatcatctaccatatcacatttattcataaatactacgatatgttgcattcccatatgatgagcaatcatgatctgttctgctgtttgtgacatgattccatctattgcagatactactaggatagctccatattcaatgctagatgtcaagcttatatttctctcttctcttgttgtaagagtttttttaattgcatctgttaaagtcgtttttccatgacctcgatgtccaattattcctatcgtgcaatgagtttttttccttcaaatgtttctttccccatatttatatctcccatcatcagttgttttttattcttcataaatcatgactttacagtctttcttataacaagcaacaccatatttaatgaaatttcgcattccatcttgcttcaatttagcaatatagtctttatcttcaatctgttttaaagcctgcttgcacgctgcatccatatttccatcttcggcatactttaattcaatgacgattcccgttcgattctccggagcctctatcagaatatcactgtatccgattcctgattctgcatttgactttatcagccagcttgacttatatccaagaagaccgagtaaaattccgtgataaaaattttctttcttctcttttgcgattgctgtatctcttatactgatcgtattccatagataatctccaaaaagctgttcaattttttctggttttttctctataaacgcattacaaaatatttctagtgtttttccatcattttttgaaacatcactaaaccattctttgatcttttttgtaaatagatttcttatctctgtatttggtatcgacaaaagatatttaccattttgagttcgtccctgttgtgttagatatcctgttgtaaaaagcacactccacaaattttctatactcttatccaactcattataggtaagctcctctacaatttccttttcaatacactctccactgatcaaacgctcaatctcattctttgtctgaatatctgccttatctataaatctgcgaacaatttcatttccactagaattagaccaaaaatcttctggtaatgcatcgggatccgcacatagacttttacaataacgaatcacatcccatgggcaatagatatctgtatttccgaaacgataaccatcataccactccctaatctgaaggtaatgatctgataaattataatcgctaagaatctttttcacttctgtatcggtaaatccaaaacattcatcatactgaacattgagaatagataaaacttcaaaattattaagtccggtgaaaatgctttctttcgaaattctaagacatcctgtcaaaactgcaaattgtagaaaatcatttgtttttagtacttgccccaaaagacctctcataagttcaaccatttcatcataatagcctttctgaaaagctttatctagcggaacatcatattcatcaataaggataatcgtctttttcccataatgtttgcacaaaagttctgataatagtctgatactatctgttatatcatcagcttttccatctaaaaggctctgaaattgcttaatctcttcttctattaatttatcactattttttagataatggtgtcttcgtgcttcatttttaataatcgttgtaatccgaataatcgcttcttcaaaagttaatccatcgattcctttcaatgacagaaagattactggatacttacccatatattcatcacataattctttatttttagaaatatataggccttcaaaaagtgatttatctataccaatttcaaaaaaagtacgtaacatactcatattgagtgtctttccaaaacgacgtggtcgtgtaaacagatttacttttccccaattttgtaagagctgttcaattaattttgtcttatctatataataaaatcctagcttgcgaatatcttcaaaattctcaattccaactggcagctttaatgtttgattcattcggatcctcctattaattttgccttacgaccaatgtgtctcttttattatagcttgttttatatttgctcacaacaaaaaagacccagaaagcctaaactttctgagtctcataaatattatcctaaattcaatcgtagaagtaagaattactcgatgattgtagcaactcttcctgatcctactgtacgtccaccttcacggatagcgaaagataatccctgagccatagcgattgggtgaattaattcgatagtcatttctacgttgtcaccaggcatgcacatttctgttccttctggtaattcgataacacctgtaacgtctgttgttctgaagtagaactgtggacgatagttgttgaagaatggagtatgacgtccaccttcatcttttgttaaaacgtatacctgagctgtgaattttgtatggcatgtgattgaacctggctggcaaagaacctgtcctctttcgatttcgtctctctgaacaccacgtaataatgcaccaatgttatctccagcctgagcttcgtctaacagtttacggaacatttctacaccagttacaacaacttttcttgtttcttctttgataccaacgatttcaacttcgtcagatacgtgaagaacaccactttctactctaccagttgctactgtaccacgtcctgtgatagagaatacgtcttcgactggcattaagaaaggtttgtctgtatcacgctgtggatctggaatgtagctgtcaacagcatccattaattccatgatcttatctccccatggtccagctggatcttcgatagcttttaaagcagatccctggatgataggaatgtcgtctcctgggaattcgtattcatttaataattcacgaatttccatttctactaattctaataattcttcatcgtctaccatatcacatttgttcatgaatactacgatgtaaggaacacctacctgacgagataacaggatatgttcttttgtctgagccattacaccatcagtagcagctactactaagatagctccgtccatctgagctgcaccagtgatcatgttctttacataatcggcatggcctgggcagtcaacgtgagcgtagtgacgtttttctgtttcatactcaacatgagctgtagagattgtgataccacgttctctttcttctggagctttatcgatatcttcaaagttctcagctgtgtttccttctactctttcagctaaaactttagtgattgctgctgttaaagttgttttaccatggtcaacgtgtccaatagtaccaatgttgcaatgaggtttagttctctcaaacttttcttttgccattttaattgtcctccttattcgccctatgggcaattacaataatgtttcaaacttcaatatagttgcccagcaaagggccgtcctaaatttgattatatttcatttaaacaaatatttcaagactattttgacaaaatagcctcgaaatatttatatattaattttcttacttgtcagcaagtactttttcctgtacgttctttggtactggttcgtatttttcaaagaacatagagtagttaccacgtccctgagttctagaacgtaagtctgtagaatatccgaacatttcagataatggaacgaatgcacgaaccatcttaccgctcgcgatatcatccataccttcgatacgtccacgacgagagttgatatctccgataacgtctcccatgtattcttcaggcattgtaacttcgactctcatgattggctcaagcaagatagctccagctttctgcatagcctctttaaatgccatagatccggcaatgtggaaggccatttcactagaatcgacatcatggtaagatccatcatatactgtagctttaacaccaagtactgggaatcctcctaagataccagactgagctgcttcttcgataccttctccaactgctgggatatattctttaggaatagatccaccaacaactgtagattcgaatttgaacagttcttctccattggcatccattggctcaaagtgaactttacagtgaccatactgaccacgaccaccagactgtttagcatatttgctgtcaacgtcaacggcttttgtaaatgtttctttgtatgctacctgaggagcaccaacgttagcttctactttgaattcacgaagcagacggtcaacgatgatttccagatgaagttcacccattccggaaatgattgtctgtcctgtttcatgatctgtatgagctctgaatgtaggatcttcttcagcaagcttagcaagtgcttcagccattttaccctgatcacctttagttttaggttcgatcgctacgtcgataactggttctgggaattccatggattccagaattacaggatgctgttcatcacagattgtatcaccagttgttgtagatttgaaacctactgcagctgcgatatctcctgaatatacgatatctaattcttcacgcttgttagcatgcatctgtaagatacgtccaacacgctcttttttgttctttgttgcatttaatacgtaagatcctgatttgcatgttccagagtaaacacggaagaatgcaagtttacctacgaatgggtctgtcataatcttaaatgctaaagctgagaatggttcatcatcagatgaatgtctttcaacttcgttaccatcttcatcgacacctttgatagctgggatgtctgttggagctggcataaattcgataatagcatccagtaatttctgaacacctttatttctatatgctgtaccacagcatactggaactgctttacattcgcatgttccttttcttaatgcagtttttaaatcatcaacacttggttcttccccttcaaggtactgcatcatcagatcgtcgtctaattcacagatcttttcgattaattctgtgtgataaagttctgcttcttctttcatatcttctgggatttcaacgatagagatgtcttcacctttttcatcattgtagatgtaggcttccatctcgaataagtcgatgattcctttgaagtcgtcttctttaccgataggtaactgaagtactgctacgttagctcccagacgatctttcatctgatcaactgctccgtagaagttagcacctaagatatccatcttattgatgaatgccattctaggtacgttataagtatcagcctgtctccatacgttttcagactgaggctctactccaccttttgcacagaagactgctactgcaccatcaagtacacgcagagaacgttctacttcaactgtgaagtcaacgtgccctggagtatcaatgatattgatacgatgctctaaagcaccttttttaggcttgcaatgatcctgcagtgtccaatgacatgttgtagctgcagaagtgattgtgatacctctttcctgttcctgctccatccagtccatagtagcagtaccatcatgagtatcaccgattttatagtttacaccagtgtaataaaggatacgctctgttgttgttgttttaccagcatcaatatgagccatgattccgatatttctggttctctctaatggatattctcttccagccaagattttttcctcctataagttttaacatagaagcatatctggcaagacgccagaacagattcttgaaattagaatctgtaatgtgcgaatgctttgtttgcttctgccatcttgtgcatatcttcttttttctttacagatgctcctgtattgttggaagcgtcaagaagttcttttgcaagacgttcttccattgttctttctcctcttttacgtgagaaagttgtgatccaacgaagcgctaatgcctgtcttctgtctggtctaacgtcgataggcacctgatatgttgctccaccgatacgtctagcttttacttcaagaactggcatgatgttgttcatagcttcttcgaatacttctaaagctggttttccagcttcttcttcgatacgggcaaatgctccgtatacgattttctgagcaactccttttttaccatctaacataatgttgttgattaattttgtcacaaccttattgttgtaaataggatctgctaatacgtctcttttcgcaatatgtcctttacgtggcacggttcttccctccttaataatcattaattcatcggtactcatacttagttattgcatgttcgtgcaggacttttatatctcctgtaacctttgtaggaaacaataaagttccggcacaactatacaaggtagcgtttaattacgctgctttgtaccaatttagttttgttttattttttcttaggtcttttagctccatatttggaacgagcctgcattctgttagctacacctgctgtatcaagtgtacctctaacgatatggtaacgagtacctggtaagtccttaacacgaccaccacgaatcagaacaacactatgttcctgtaagttatgtccttcacctgggatataacttgttacttcgattccgttagaaagacgaactctggcgatcttacgtaaagcagagttaggctttttaggagttgcagttttaacagctgtacatacacctctcttctgtggtgagcttgtgtctgtagctttcttctttaaagagttaaatcctttctgaagtgctggtgctgtagatttctttacagatgtttttctcccttttctaactaattggttaaaagttggcattgatttcacctccatacatgttttctactgtggttacttaaattcaccttgtgactatacatgcacttcttggttttgctccccaaaaaggcatgctaggctattataaaatgcctgcatgcctttgtcaagaccttttcccaagatttttattaatttctatatatttttatctttttagaaatctcattctatggatcttattcgaaatcttttcttatcccactgtcttcagaaatgctttctcgtcacatctctgatatcgaccctgacagcttctattctgatctcttttcttgatctcaatgtttcgatttctttgttatatggcttctttacgccattttcttaatatataaaaatcaatctcttattcttgagaaaatattcagttaataagttccaaattattttgttaacgggttacactttgctttagttaccagttacaaattttttaaatgctccaccggtcagctgatcgaatgtttgttgatctcttatctgaatctttcttgtttggattcctcgtctcttggaatctttcttgtttggattctttttctttgatcatcttctgatcttatcttaagatcttgtccattctctctattcttcgtattatttttatgaggttgactcctttaccgttctttccgcttctaggactcttatgttctctcccgagatcataatatcctgttgagtcagtctcatgattcccaatcatcttaatacttctgatccatcagctgccggttttaaaggtctttccgttagccttatggagcaacttgggcgattctcctttcttttaaaacttatctttcatttgttgattttattatatcaatatctgtttactttgtcaattaaatagttttttcagatttcttaaggattttacatacaataaacagattatagtttgatagactgaagttggtggaatattataaaaatggttatctgtctgcgacgcgctttcgctcttggtgctgacaggcggaagataaaagttctttacacacgcatcttcaataattcaaaatattgttactatccacactatagacttctggtatatgataaaaaataaataaaaaaccacaaacgcagcattggaattttgccatattttgaataaattcgcagcccaattggacgattgtctgagcttcaaagactcttgtcttagataaacttcagagcgagttatcgtaggaaattgggcggataagcgatttgttcaaaatatgagcaaaaattccaccgctgcgtttgtggttttttatttattttttatcatatactcaaagcctacagttggccaactacaaattcaaattattcttcaatatcaaattcttcatcctcgaaatcgatttcatctccgatcgtgaaatcattttcgtctgtgctgatcttgacatctctgtaacgtctcatacctgttccggctgggatcaatttaccaaggattacgttttcttttaatcctactaatggatcgacttttcctttgattgctgcatctgtaagaacttttgttgtctcctggaaggaagctgctgataagaaagaatctgttgccagagatgcttttgtgataccaagcatgatctgatctgctgttgcagtctgaagaccctgttcttccatctgtttgtttctcttctcaagttctaatacatcaaccattgctcctggtaagtatcctgtgtctccaccgtcttcgatacgtactttcttaagcatctgacgtacgataacctcaacgtgcttgtcgttgatatctacaccctgtaaacggtatactctctgtacttcgcggatcatgtaatcctgtactgcacggattcccttgattcttaataaatcgtgagggttgatagaaccttctgtaagttcgtctccggcttcaaggatctgtccttcctgtactttcaaacgagatccataagggatcagatatgtcttcacatcaccagtttctctgtttgtgatgatgacttcacgtttcttctttgtatcttttaactgcacttctccaccaaattctgcgatgatcgcaagtccttttggtttacgtgcttcaaataactcttcgacacgaggaagaccctgtgtgatatcatcaccggctactccaccggcatggaatgttctcattgtaagctgtgtacctggctcaccgattgactgtgctgcgatgattccgacagcttctccaacctgtacggcctgacctgttgccatgttagatccataacacttagcacaagctccaactccggatttacatgttaacatcgtacggatcttaacagatgtatatcctgcatcacaaacggctttcgcacgttttggtgtgatcatgtggtttgcttttacaatgacttcaccagtttctttattcacaagctcttctgctgcgtatcttcctgtgatacgttcttctaagctttcgataacttcctgtccatccatgaatgcttctacatacattcctggaatttcctctccagtaccttcacagcaatcctgttcacgaatgatcagatcctgtgatacgtctaccagacgacgtgttaagtatcctgaatcggctgtacgaagggctgtatcggacagacctttacgagctccatgcgctgaaatgaagtattccagtacgtcaagaccttcacggaagttagacttgatcggtaattcgatcgtacgtcctgatgtatcggccatcagtccacgcatacctgctaactgtttgatctgctggttagaaccacgggctccagaatcggccatcatgaagatgttatttaatcggtctaatcctgtgatcagtttatctgttaaaacgtcatcggcgtcgaaccatgtcttaacaaccgctttataacgttcttcttctgtcatcagaccacgtttatactgttctgtaatgaattctacctgtttctgtgcatctcctaagatctgaggtttctcaggtggcactgtcatatcggaaatggatactgttaaggctcctcttgtagagaatttgtatccaatcgctttgatatcatctaagacttctgcagtctttgttgctccatgaatgttgatacatttatcaaggatctgttttaactgtttctttcctacgtggaaatcaatctcatatgctaaagcattctctggtttgcttctgtctacaaatcctaaatcctgtaagatgatctcattaaacaggatacgtccaagtgtacaatctacaatctgagaaataggatttccgtctttgtctacacctgtacgtcttactttaatcttagaatgaagtgtaatcaccttattttcataagctaagtatgcttcgttctcagatttgaagtatttaccttcacctttgtctccatctttctctaatgtcagatagtagataccaagtaccatatcctgagaaggaacagctactggaccaccatcagatggttttaacaggttgtttggtgataacagaaggaatctacactctgcctgtgcttccacagataatggaagatggacagccatctggtcaccatcgaaatcggcattgtatgctgtacataccagtggatgcagacggatcgctttaccttctaccaggataggctcaaatgcctgaattcccagtctatgcagtgtcggtgcacggtttaacataaccggatgttctttaatgacgtcttctaagacatcccatacttctggctgaagtttttcaaccattttctttgctgatttaatgttgtgagctaatttgcgctctactaattctttcataacgaatggcttgaataactcgatcgccatttcttttggaagaccacactggaagatctttaagtctggtcctactacgataacagaacgtccagagtagtctacacgttttcctaacaggttctgacggaaacgtccctgtttaccttttaacatgtctgataatgattttaatgcacggtttcctggtcctgtaactggacgtccacgtctaccattatcgatcagggcatcaactgcttcctgtaacattctcttttcgtttcttacgatgatatctggcgctccaagttctaataatctcttcagacggttatttctgttgatgatacgtctgtaaagatcatttaagtcagatgtagcgaaacgtccaccatctaactgaaccattggacggatatctggagggatgactggaactgcatccaggatcatccattctggtttattctctgagttgcagaatgcttctacaacttccagtctcttaacgattctggctcttttctgacctgtagcagttttgaactcatcctgtaaggattttgcttctgcttccagatcaatggcctgaagcagttctttcactgcttcagcacccattcctacacggaatgtatctccgtatttttcatacgcttctctatattctttttcagttaatacctgtttatatgcaagatctgtatctccagcatctaaaacgatatagcatgcgaaatataaaaccttttccagtgttcttggtgaaatatcaagaatcagacccatacggctaggaattcccttaaaataccagatatgagatactggagctgctaattcgatatgtcccattctttcacgacgtacacttgcttttgtcacttcaacaccgcatcggtcgcagacaacacctttatagcgaacttttttgtactttccgcagtgacactcccagtcctttgtaggcccgaagatcttctcacagaaaagcccgtctttttcaggttttaatgttcgatagttgatcgtctcaggtttctttacttctcctctagaccactcacggatcttttctggggaagccaacccgatcttaattgcatcaaatgaaattttattgctttgatattcattgcttgattccatcatttaaggctgctccttcctaaattgctcgccaatctacatgattgtgttatcttcaccttctgataagtctccgtgtttatatcctaaagcaccgagttcagattcgctttcttcataattgttgaagacaccgtctccttcgatcattggtgcaagatcctgatttgcatctccaccatcaacatcttctcttaattcaacttcttcagcgttctcgtcaagaattttaacatctaatgccagtgactggaattcttttaataatactttgaaagattctggaacacctggttcagggatgttatctcctttgatgatcgcttcgtatgctttcacacgacctacaacgtcatcggacttgaatgttaggatctcctgaagtgtgtatgctgcaccataagcttccagtgcccatacctccatctctccaaaacgctgtccaccgaactgagctttaccacccagtggctgctgagttactaatgagtaaggaccagtagaacgtgcatggatcttgtcatctaccagatgatgcagtttcaggtaatgcatgaatccgattgttacaggactgtcaaattcttctcctgtacgaccatctcttaatcttactttaccagttgtatcaattggtacaccctgccattcttttctatggtctctgttttcatataagtaatccattacatcatcgttaactttatcacgccatttcgcgtcaaattcttcccatgatgtattggcatagtcatttgccattcttaatgtatctgcgatatcgttctcgtctgcaccattgaatactggtgtagcaacattaaatccaagaacttttgctgctaaggacagatggatctctaacacctgtccgatattcatacgtgaaggcacacctaatgggttcagtacgatatctaatggacgtccgtttggtaagtatggcatatcttctactggcagaatacgggaaattacacccttgttaccatgtcgaccagccatcttatctcctacagaaatctttctcttctgagcaatgtatacacgaacgctcttgtttactccaggaggaagttcgtctccattctctcttgtgaagatcttcgtatccataacaactccgtaagcaccatgtggcactcttaaagatgtatcacggacttctcttgctttctcaccgaagattgcacgtaacagtctctcttcagctgttaattctgtttctcccttaggagtaacttttcctaccaggatgtcaccggcacgtacttctgcaccgatacggatgataccgttatcatctaagtcttttaagacatcttcacttaatcctgcaagatctcttgtgatctcttcctgaccaagcttagtatctctggcttctgcttcatattcttcgatatgaacagatgtgtaaacgtcatcctgtaccagacgctcacttaacagtaccgcatcctcgtagttatatccttcccatgtcatgaaaccgatcaatgggttcttaccaagagccatctctccgttgcttgttgaagcaccgtctgctaagatgtctcccttttctactctgtctcctacaaatacgatcggacgctgattcatacagttaccctggttgcttcgtgcaaacttgataacattgtactcatctctctgaccgtcatcattacgaactacgatctttgtacttgtagatctttctacgactccgccatttcttgctgtgatgcagactccagagtcatatgcagccttggattccatacctgttccaacaacaggagcttctgtagaaagaagtggtactgcctgacgctgcatgttggatcccatcagcgcacggttggcatcatcgttctccaggaaaggaatcatggatgtagctactgagaataccatctttggagatacgtccattaagtcaaggtttactttatcaaattctgatgtatcctcacggaaacgtccagatacatgagtatttacgaaatgtccatcttcgtcaacaggttcgttcgcctgtgctactacataattatcttcttcatcagctgttaaataaacaactttgtctgtaacaactggattctcaggatctgatttatccagtacacgatatggagcttcgataaatccatactcgttaattctcgcataagtagcaagagagttaatcagaccgatgttaggtccttcaggtgtctcgatcggacacattcttccgtaatgtgtataatgtacgtcacggacttcgaatccggcacgatcacgagacagaccacctggtcctaatgcagataaacgtctcttatgtgttaactcagacagtgggttgttgtggtccatgaactgagataactgagaacttccaaagaactctttcactgctgctgttactggtttgatattgatcaatgactgtggtgagatagattcaatatcctgagttgtcattctttcacgaacaactctttccaatcttgaaagaccgatacgatactggttctgaagcagttcacctacagcacggatacgacggtttcctaagtggtcaatatcatcatcatgtccaattccatactctaaatggatattatagttgatggatgctaagatatcttcttttgtaatatgttttggaatcaattcatgaatattcttcttcagagcttcttttaattcttctccttcatatccttcttctaagatcttctctaatacaggatagaaaacatcttcatgaacaccgatctcttctggattgaaatctacatattcagcaagatttacttccatgttggaaagtacttttgtagcaccttcttctgtctggatcataacacttgctacggctgcgttctggatcttatctgcaagttccatgtccacattcgttccagcttctgctaatacttctccagttgttggatctaaaacatcttctgctaagataaatccactgatacgatttcttaatgctaattttttattgaatttgtaacgtccaactttcgcaagatcatatcttcttggatcgaagaacatgctgttgatcaagctttccgcactatctacagataatggttctcccggacggatcttcttatataattctaacagaccatcttcatagttatcagatgggtctttttcaatacttgcaaggatctttggttcttcaccaaataattctttgatctctgcgtttgttccgatacctaatgcacggatcaaaactgtgataggcacttttcttgtacggtctacacgtacattgaatacatcattggaatctgtttcatattcaagccaagcaccacggtttggaataactgtggaagagtataactctttaccaatcttgtcatgagcaattccataataaattccaggggaacgcactaactgactgacgataacacgttcagctccgttgatgataaatgttcctgttgctgtcattaaaggaagatcgcccataaaaatctcatgctgcttgatttcatcagtctctttattatgaagtcttactttcacttttaaaggtgcagcgtatgttgcatctctttctttacattcttcaattgaatatttgacgtcatctttacataattgatagtcaacaaattccaagcttaactgatcgctgtaatcttcgattggggagatatcttcaaatacctctgctaatccttctcttaaaaaccaatcataggaatccttttgaatttcgatcagatttggtacttcaaggacgtcatcctgtctggcatagctgattcgcatccctgtacctgattttattggctgtattctgttcttttccatggacgtttttcacctcttgatctaaacctggtttatatactacatcaactgtaagaaaccctctatcttactatatctttcttacaatcttattcttaattttacatagagtgtgggcagacaaacccacattaagacattttcttatattaccacatagaatttatcatgtcaataactatttttaaatacatgaaaaaagcacctgaaaatgtttctcatctgcctttttcaagtgctttttattgaattacgttttctacatttctttgatatacttcgcgatctcatcaatacagtcttgtgtctgtggaaggcttccaagacgatcgaagaacccatggtctagtccttcataataaatgacatcaacatcttttccttgttcttctaactttttcacaaattcttcattacagattttaaaataatcgaattctgcttcgatcatcagaacttttggcaaacagtcaagatgttcactgaacaatggggaaatttctccatctaaagttgattccccattttgtaaatacagctcattcatagaatcatttaactctttaaaacggaacaggcggttcatgatataatccttttgttcttcctccatctggtatagtgagtaatcccaattgtatggtgtatcttctgctacactcatatccataactccgtatacaggtacaaccagtttcattctttgttttttatctttcaggcaagcattaaccgccaaatggcctcctgcactttctcccatgattgccatcttatccgtatcaatattgaatctgtctgcattatcttctaaccagtcgatcgttccaagtacgtcttcttccgctcctggatatggagtttcaggtgccagacgatattccggtgagacaacaaccgcaccagattgttgtgcaagatagcggcattgatttccttttgtctttacatcaccaccgataaatcctcctccatgaacaaataacgcaagattccttttttcttttgaatctttttgatcttttctttcataaatggtgatctcgatcatatgatctttcaatggtatgatctttgtcgtttctatgatttcttctgttgtgatatcctcaccttcacgtttcatgtctattcgaatctgtccaagatcgatatcttccagcaaaatatcattttccttataaaattcaccaactcttggtgctccttttgctttttctctctgcaaaactttcttttcaaatgcatgttgtttcgtttcttccagttttttctttattaccttcttcataattatgcctttcttcaaaaaatcccaaagaatgaaattctctgggattttatctttatagttattttgtttcttctatcaggtaattcgcaactttctcgtctgtgatcagtacattcacataaccacctcgaagtactccgagaattgcctctttcttgtcaagaccataagcaactccgacacggattggtattttcttaaattcttcaagatcaagacttagcaaatgttcttcaaattcatctttcaccagctttccatctttatctaccacatgggaaagaatttctcctgtaccaccttttttctgtaatctctcaaattcttccatcggaataaattctgcatttgtcaaagctgagttatgatctaatgttcctataccagctactgcaatatcagcactctttgcaagatcaaacacttctttgatacttttctcttccatgaaaacttttttagcttctggagatgtcacatattgtggtgcaagcatctgataactatttccattaataatcttcgctacttcttcgatcagataatttgaataagccattcgatatcccttatccattgaaaccgatatattcgttgctgccatcaatggtacaacattcacatcatccgtttttaaaaatttaagtctcacatcttttccgagaaattctaccatattctgtagtgtaactcctcttgtaagagcgattgtcatatggttttttaaagttctcagcagatagtctgatgcaaaaaatgcgatctcttcttttaaatcattctcattaagtgaacttgcgatcacagcttccttcagaccaaatcgttcttccaatcgtccttcaagattaattgctgaatcttctggataattaatcttaatctgcacatatccctgtttcttagcctgtgccagtgctcttgatatcgttgttcttgatacatttaattttttaccgatttcttgttgcgacaatccttgtttataatgcatttcaactactttgataataaaacgttcttccctcaacttccctgccctttctatcattactcgtcattgtatatctttaaccatagtatatataacattagcaagggacgtcaatcaaaagctttgcagccttttaaataatcactccaatgcatcccagaaccagagaaataattgtaactcctaatgttgctgcaaaataattacgttttacttttgctaaatatccccagatacaaagcactacgatcaatggaagaattcctggtgcgatagaattaaggatagactgtaaagttgttgtatatgtacttgttgcaaatttgattggtgttgatactgttacatatgttgctgcaagtccacccatcatgaataatccaagaatacttgcacctgtgatgatcatattgattaatccagatttcagcatattttctgcaaatgaatatccaaatgtataacattttgatgttaagaaatatccaatcccaaaacagatcactgttaataatacgattggtccaataccacctaatggattcccctttttagcaagtggtaagaatagtccaataaacagatacattaatgttgaccatgagatcgtatctccaatacctgctaaaggtcccatcaaacctgtttttaaattgacgatcatttcacctggaatcgcatcataatttcttgatttcttttcttccatagcaagtgtcagtcctaaacatggtcctccaccccaatgagcttctgtgttaaagaatgtcatattacgttttaatgcttcaatataatgtggtttatcttctttatttggatagaatttctttaatgctggtactaatgctgcacaaaatcctggtgcttgcattctttcaaaactatgacagatctctgctgtaaaccagtagaccaaatatgattttaagatatctttcttagacaggattctttcttcctgttcaaattcttcttcatcctcgtcttcgtcttcatcttcatcttcatcatatctagcattgcttgtgtattcattctttgtaaatgttacataaaggaatgtgataaatgctcccatcattaacagtggaatcgttccaatctttgtatactggatcaggaaaaatcctgcaaagaaaaatggaataaattttggttttgagatcaggttagcaatgattgcaaaacctaccgctggcaagcatgctcccatagctgtcagaccgtttgttacaaatttagggatatcatctaaaacaccctgtagtgcaccacttccgaagtataatgcaactgtgagcagtgaagcaaagcatatcaatctcataagtcccacaccaacgatagaccatccgatcattccttttgcatcacctttttctgcgtaaacatctgctttttgtgcaaagaaccctgccgccagataaagcaagttcgaaatctgaactcctaaaagccctactggaactgcaagtgcaactgcggcattcgtgttaagtcctgatgccattgcaactggtattgcaacgtaagccgcaagacatgggtctgtaggctggtttccaccagcagcgataacgcctaaataaatcagctgtaatgatgccccgatcatcattgcatgtggcatatcaccaagaaccgctccaacgatcactgcattaaaaatgaccgtattatacataaatgctcccgctgtatatggaatacagcattttgcaataccacagaacagtccaagcaatattgcctgtgttaaactaattgtcatgttttcatcctccttagcttttcatatatttattgaacatttggaaatgtctttttgactatatccagagattcctttttatctgtaggctgtgtctggaaatataatttcacaccatctttctcaagatcaaataatgtctgtgcctcttcttctgtaaatcctgtagatttatagatctgtttacgatctccgataatagacatattacctaatgtgatctcatcaaatttcacacctttgtctgctaattctttgatctgttttacatctttaaacagtacgaacacatttaagtttccaaattgattcttctcccagatctcaacagccttatcaactgagaaaatacttactttgatctctggtggtgctgcgaattttaatacatttttctgcatcttgtctttcgccacgttattgtcaattacgacgatcttctgtgccttaaacacttttacccactgtgttactacctgcccgtggatcagtctgtcatccactcttactgctaaactctttgccatatgctttttctcctttcactcttcaacatttcaaaaagtttctttattcgtcgtcttcatcttcatcgtcacttaggaaaccttcggtatcaactctgaaaatcccattcttaccattctctactgtatctaaactaaagtcttttcctgatattccctctcttgcaagtactgcattcactaacattggaagattcattcctccaacaacttccagtggcttctctgtctcctgaatatgacgcattacctgattacaaggagttccgccgaacagatcgaccaagatcatgcttccttctggaaattcattgatcgtttctacaaatgcctctctatatttgtcaatatcatctcctggttctaaggaatatgctgcaatgttctcactctcaccaaacagcatcttcgctgtatcaactaatgaaactgcaaatggcccatggcttaataaaattattcctggcagatctttatttactttctctggcttataacatttcacgttttttctcctttaatgcatggttgtgaacattatttcactataatgttctttcgttctttctagtattattatatatctgttttgttcctatgtcaatacaaaatgaacattttttcatcatattgttcattttcactttttgtcactattatatactgacaaaagaaaaagaggctttggcagaaaccaccacgattgactctacattcgtaaatctttttacgagaaagtttttataaaaaaatagacagcgctctttttcataagaacgctgtctattttttatttacttatttcccataatatattctataagtttatctgaaaattccttcaccactgtatctgcctgatggagatcttgtttgatcgctccttctggtgcatatccaatgcatttcattttggcagatttggctgcctttactcctgcttcggaatcttcgaccacgatacagtttgccgccttctgtccaattgcctcagccgccttttgaaagatttctggatccggctttccgttttcacattcggaaccgcttacaaatgcttcaaagcagtctgtaattccaaacgtattcatatttgtcatgatatcttctttcaatgaagacgatgcaactgccagatgaaatcctttttcctttaatatacggatcagatcaacaacccccggcatcggctttagtccttcctggttgatcaactcttttctggttttaacccactgatctatataatatgaaacttctttatcaagactttcaaattctttcttcatctctgtccacatatattcatgtgtcgtacccaaaaacttatcatgataatgccagtcaacttcaatacctgcttgttttaagatgagatgctttgctttgacattaaaatattctgaatcagcgatcacaccgtccatatcaaaaatcactgctgtaatcatactttccattactgaaaacttataaaaagttataaacctttatgtttcattcctacttcaacgagtatgcttttgtaa

SEQ ID NO: 636 - DNA, 1406 bp, Unknown
  gut microbiota DNA sequence
caaccgaaaacgcagcggtggaattttaccatattttgaataaaattccaccgctgcgttttcggttgcttatttattttttatcatatactgaaagactacagttgaccaactacaaattaaaatttcactttcgcaatcaactgatcattctctacatcgatcaaaatcgtatcttctgcatcaaccccatcgctcaagatcaatcttgcagccagtgtctcaacactcttctgcagatatctcttcaatggtcttgctccatacattggttcataaccatggtcggcaacataattcttggctgctgatgttaattcaacgcttaattctttgtctgctaatctgcggttcagatctttcacaagtaagtcaatgatatttgtgatatttgcttttgttaatggcttgaacatgatcgtttcatccagacggtttaagaattctggtctgaaatgattcttaaggtcattcataaccatatcctgtgcttctggtttgatattgccatcttcatcgattccttctaacaggtaggaagatccgatattggatgtcatgatcagaatcgtgttcttaaagtctaccgtcttacctttggaatctgtgattcgtccatcgtctaatacctgtaataagatattaaatacatctggatgggctttctcgatctcatcaaataagactacggagtaaggttttcttctgactgcttcagtcaactgtccgccttcttcatatccaacatatcccggaggcgctccgatcagtcttgccacggagtgtttctccatatattcactcatatcgattcgcacgatattctgctcattatcaaataagctttctgccagtgctttagcaagttctgtcttacctacacctgttggtccaaggaataagaaagaaccgattggtttgcttgggtccttgattccggctttggaacggatgatggattctgtaacaagttccactgcttcatcctgtccaacaactctttcatgaaggatcttatcaagatgtaaagtcttatttctctcactttcagtaagtttcgctactggaattcctgtccaacgggaaatgatcttggcgatctcatcttctgtgacggattctctgaccatagaacgatcttctttcgctacgcgttcttcttcctcttctaactgtttcttcaattctggcaggcgaccatactgtaattcggctgctttatttaaatcataatttctctgggcaatctggatctcactgtttacagattcgatctcttctcttaatttggagactttctcaacggaagctttctcattctcccatcttgcttttcttgctttgaagtcttctcgcatctcggcaagttctttctgtaattcttccagacgttctttgcttaatct

SEQ ID NO: 637 - DNA, 2740 bp, Unknown
  gut microbiota DNA sequence
tattcttcacggctccttcaatcctcttttcaaatacaacctgataagctaccgtcatcacatcattttcaccaagatcttttcctgtttcaatcgtaaactgatggtctttcgcatcaatcttgcaatccgatgtaatatctttttcattaagttttacttcgatcttctgaaccttcataccttctttttcgaactcatccacgacttttacattctgtgctgtcatgccttcttttccttgtgtgatatgaagtttataatatccagtttctcctactgcataaacctttttatccgattgttttgtgatttgcagttttggtgctttcaccttgatcgtctcatctgccatcccgcttcctgacggaatctctttatcttcccggatcagatctccattgctgttttttgtcgcagcaacgtgcataatattctttacttcctgtccttcgagtccatcttcttcgatcactgcctgataagtgatctctatcttatccgtcatgcgaagattttcataagatcctgttttctttccttcttccgaacccattgctggaatcgtaccatttttcagtgcaagtggtgttatgatctcataacttcttccacttggatcaaatgtgatcttacactcagatgcaatgtttttcccaccagatataaccgctacggttcctggtatgatcttgatcccttctgcctgaagttcatcctgaatctccaaatttctcataaaagttcccggatttggattggtaatcactgcctgataagttacatgatctccttttttataaagctgtactggagctaattttatcacattattttttggcgagttgatatacacctgccttgatgcctttgtttctggaattcctgctgcccatgcagatacagtattatcgatcacttttccatttgtaaggactccactttttactgtatatgtgatctcgatcgtctgtccatatggaagggcataatcaccttttgacttcaaaataaatccattattttctgtctgtaatatgtaatcctccttatcaagaccattgatttttatatcctgtaacttcatatccatcacacttgcaaaggatgtatcctgaatcgtaaaataagctgtctttgctttttcgttttgatttttcactgttaccttataggtgatctcatcttttgcctgatattcatattgttttgtctctttcctgatcaaaagacccggcgtatctacattttcttttggcagctcgatatctacacgaacctcattggtcatttctatcttatcattaatgatcgttttcgctgtatttttttctgtgatcatcgtttcctttgtattataatgcccatgttctttccatatcttacgcaattgatctaactgttctttggatgcattctccggaatattcatctttactttgatctttaatttataaacagattttttataaaattcggcatctttcggattcttaagttctgctcttacaagattgccgttttgtgaaatatcaaactgactgcttacatcctcatcatctccgtaaaccttgatatccagaatctttaaacaggattcgatctgatcttcaaatgcaaacttatcaaaataatgtgcctttggaatttctcccgcaattacctgactgacttcataatcccaagattttgccagatcttgcactcttagatgttccgtcttggtcccatcttctccgatcacctctttggttgggtcaactgggtcaaagcggatcatattctgtccatatcctacatattgctcctcttttgttggtgctttttcaagactccttccgaatgtatattcaaaagaatctgatgcaaatgtaaatcctacacaagtaaaatcttcactactgtaattatctggaaaatccgcataataaatactagtttcccctgatcttttacaacttaattttgtattctttgatacatattctccgtgaatcttgtttgctttgatcccgatatactgatatgtatcaatatcctttaacgtcatattacttttgatcgttactggtgtattcgttcctgctttataaaaatcactttttaatgtcatctcttcgattccaacataagcacatccattgatgccgcttccaatcgccacataaccgtcttgattcttatacttttcgatcccagtaaccgtcatgaccaaatctaatttttcccaatggccattacttccatcggctttgcattgatagatctccatatttgtttttcggatcttaatattccctgcggtattttgtgaagtctgaaaccatgtatactttttaagaaaatccggcatctcgatctctggtaattttgctgctttctttcctgcttctatgatcgtcttcgtctgatctgttgcatgcatcttaaaaccgtaggatgcatccactgaaagtgctttttcatcgtcaaatgatgagaaaatatgtttctcatctgcccaactgcttgtgatcttccccgcattctcagtatttaactgtgctttcacctttcgctgtccaaacacagataagattacggatgccgtaaaaactccgatcatcccaaggcacatgaaccattgtctctttttcttcataatgtactctccgttactgaaaacttataaaaaagttataaacctttatgtttcattcctacttcaacgagtatgcttttgtaacgaatcaattcatgt

SEQ ID NO: 638 - DNA, 13984 bp, Unknown
  gut microbiota DNA sequence
gaatctgaaacatccaatatgaatgaacatgatgatggaattaatattgattctaatggaaatatgtatacagatgagccagaatttaacggtaaaaaagtggtcaataaattcatgtattgtattctcgcaatattctttggcggtttgggtctgcataaattttattgtagaaaaaaagaaattggtttattatatcttgcacttttttggacaggtatcccttgggctatttctattatagattttattattgctttaactaaaaaagctgactctaacggaaacattttaatataattctaaaaaaacagagagcatatcttttttttcatactctctgttttctgctactttacctctattgacgataatctacaatcgttccatctgctgcattaaaacatgcataataatttttatcaatatctaacccgtcacttgtaggactaacttcataatattgtgttacgactccttttttatactttaaaccataagcatccgcaaggccaaattctttggcacttgacttccatattatttttcctttggcatcaattttatatacatcatcattaaaatatcctgataaatataaattatcttttgaatcaaatgcaatattatgtccagcagctattggaattttaaactgttttaatttctttccgttggataaccgataaatttttagattcttgccatcaaataaataaactttattttttctctttttataagtcgctaaatatacttgatattcctcttttgccttcgccttatgtgaccaaatctttttattttttttattgtaaccacttataacaagatggctggctctgtcttttcctattttgtaatgcttctttacctttacagctttttgtgaagcataaattcctttctcctgagcttttgccgtaaaacagaagccggcacttaacattgtaatcagtaaaatatatttcatttttttcataagttatcattcctcctcgtatgttatgatttataaatttgtaatgcttcttccaagctatcaaatgtttgtactaccttatcgattctataattaggatgcgccttaaaccaaccatcttcctgatcataatatgttttataatacttgttatctctgcaaagtactgtttttttatttccacctgctgttgttataactgcaatataatagaaatatctatgttgaaattctttcctttcctgtcgtacttttctttcctccatttttcttttatattcttccctggagtaatatgatatacgggaaattgcatcgcatatcaaggaaacttctttatcacttagaagattttctgaaaaatagtaatccctgtatcctggacttgccatatccactaaataacccatgttaggtaatttcgacttatccatagataatttcacaccatgcaaaccatataaacagatattatacattttattaataaaatctatagatcttaaatatggaattttttcatataaatactcacttaaataattgcaatgatttaaattttgatatagaggattctgtgtttcatatacttgtcttcctatgtactgcgtccatttttcccctaccggactacctgcaaatgttcccattcttgcttttgcttcaattacctgaattccaaaatttccaaccacaacaatatctgcttcattaaaatctccatcttttttgggaatcatcacactgttaaaaattctaccattcattttgtgtttttttaaattttcttctgcacacattgtagcaatatattcaccatagattcccacatttcttgttacttctgatggtcgtattccagtatttctataccaactgctttttttatatgatattgcataataaaaataatgtggatcaaagaaaaataataacaaaactgcacattttaacgataaagtacatagccatacgcaaaatataaatattccccaaaataaccactgtgtttccttactccattgatccgtcctcgctttatgatcaactctccaatatttagatcgaaatgacaacttgaccaacgccgtataatctaaaacttcaaatttttgtgtgttcataaacatcttctctttcactactgtaatttattatacttcaatattttatttactttctttttccctaattttgaagaaatatatttcccattatatacgtaccctctgcgataatttttcccaaacacattcaccagtgttgattctttttttattttctttcctttatatttgtatgtcacaaatgtcatagatgatggatttgcactcattaatacaactttatgcttttgggctgaataataaaggcgtggtcttaatgagtccatttgaagcaattcttgacttttcaattttttcattttgtttttctgtgtcttatatgtgtaaatataagactttccatttaatcctactacaagtaattctgggatcttatcaccattaatatcaacaattttataatttccttcccatgctccatactcaccgtattccgtatcataagctgcttttttcttttttataaactttgtataacatacttttgcttctgaactctttttatttgccgcttgaacatgtactggaaatattaatgccatacataatgtaattcctaatatctgtaatatttttttcttcataagtcatcttctcctaactatcattatcatactgcaatcatcaaccgttgctttactaactacattctcaaaactttgttttaactgtttctctacaattttaatttccgatttcattgacatcttcataatctttttcaccacatcagcaaatttatcatctttcttgttatacaaactgctttctgttccatctgacatcaacacaaatccttttatttcttcaacacctcctttaatcaatcgtgtttccctcactacatccattgacgtcgtaaatactgttgtattaataaattccccattcatcggatgtgtagcaatttttaactcatcttgtttcaggtatccaatgatgccgtccccaatatgtgccataataaatttattatctttaattgcaacaaataataatgttgatgcaagatctatcatgtcgcattcttgttgttttgcagtttgctcaagtcgcttttctatcacttctatcatttgttgcttaacagtcatgccatcctcattgttaaaataatcatcaaacttttgtaccatttcttcacaaatacatctagtgacagtttcagctccaaaatgagataattttgctgatcctgctccatctgctaatgctattgtctgaacatcattttcaaatagtgcatacgttttgtcctgacatggcatattgactttttcatgactgcgtcctttgacagcacactgtattatattccacatttatctacctccggacagtaaattatatcatcttataattctgcccatcctttgattccttcaacatcaagtttgatactttcacctggcatagactgggaagtttttgatacacttttactaagccatgcaaaaaactcctgaaatttcattccttgtaattttagagctttacgacctggtgaaaatttatccaacactgacatatcactttcatttcctattccaattggaaagactgtcaattttctttcatcgaccattttccttgttctgttaattgctctatttaactgttctggatttccattcggtactccatctgtcatcaaaacaagccatggctgataataatctacacctttatctttatattcttgttttcttttttttaatagatcaagagcaagtgttactccttctcccatcgctgtatctccagttggtcgtaattgcggaattttttcctgtctatcaaggtttgcgaaatccatcacacaagttgccttactgtcaaatgtaacaatacaaatttcagctgaataaacagccacttcatcttcccgaattgcttcataaaatttttccacgcctttttgcaattcatccactcgtctaattccacctgttgcaacattccatgtacgtccatcttgatatattgtttctcctgtcgtctcacacgctccttctactgctgccattgatccactagtatccaagcataaacaaattggaactctcggagttggattgttgactaagtcttctaatctgattaaataattatctttcatcttgtattcctcctctaagataatattgattctaagtattcatacatctctatgtatttatctttacatgtttcaaatcgtttttgttctataaacttaagacatggctgtaaataattctgccacatatattgacaatgttcctcatatcgatcagatgcttttaatttactaaccattaatggggcagtattataatacttggttatcaattctacacctcctgattgtttcctaagccactcgtccctatattctcgtaaaatattaagttctatgcaatcatctgattttccaaaatactcacataatacagtagaaataaaacaaaatgttccgttatttctattatcccgattattataattattttttttgttttccctgcatgatggacatcgttttggtaaatcaaatccttttctcttataaaaatcatattcattattcgttatttcaatcaatttaccacaatctatacaatatctttttacttttacctgatttccataattataacattctgggcagaattcatatggttttacattcttaatatatttctgataatttgtatatattattttcttgccacatttcttacatctgtaaatttcttctttatttaaacactctctacaaattccatctacacatacatcttctggtttttcctgtccacataatcgacatcgaacatactcaattttagaacttcttttatgccttgttggaaacagctcctcagacatcggatcttgttgtcttaatattccatcatcgagtaaccttaaataatttctaaaacaagaaagccattcatctacttcaaatctatcattttctttagaattttctccgtcttgtcgaaatgtattataaaattttttcttcagatcatatattaaatgactccaaatataccgccatggtccatctggcgtttttttgttagagttctctccaaatggataagaaaaatccatattcttaatattatcccccggatatccgcctccctgctgtgaatatggtggtttacctggcaacatgatcataaaaagtaatgtagctaccgcaaagttttcattcccttttgttcgtaaaaatttgctaaaattatttccttgaatttctggtgccgtataattcgtcataccaactggacatggaaaatcttctatttgataactatcagtatctacaaaataaacttctttttgagatactaccaaaatatttgctggatttatatctcccataataatatttctatcatgaagatatttgatcttttccaaaattgtaatacacaattctacagtatctcttttcttccaatttggaaaattcgataaaaacaattgttttataaaaatacttttctgaagttcttttccttttgcttttggcattaaatatcctataaactctttattgacattatataattctgaaacaggataacagataccttcacactgtattttcttactcagcatcaatttgatttttgcatattttctttttgtattattctttcttttatagatttttgcaacataaggagtattcgttgtataaatttttccttctcctccttctgctactttagaacctaattttaccattccattagatgcatacaccatttctccttcatcaggaatatgacttactggtaattctgaatcaactatatcagttactttattacacactctaaacatctgtttttctaaaactattttattttctgtatctcttgtatcatcttgtctactatttttttgttttattgaactagaattccaagcataatcactcaaataaccatatctatcaattctttttgcacgaacctgttttgctttcacagatcgattattgttcaatgccaaaatatcttttgctaaattattatcttgtgtgatcagcaacaatctatttgtcattctaaattttgtaaagactacctgaaagacattatctgcaaaattgtcacttttttctcccctgatctcaacatatcctgctgtgagcaattgctgtaaaacctttaaactatttttagctttatttgccaaattgatattttctatatttctttcatgtttctgcaattcttctatcgtccttaaaggaataataattttattctgatatctatgaagaaatggtatgatatccatccagaatttatctattgcaggctctaatatactacaagtatccaaaaaaattttatagttttttgcataattttctaatacattcctggcatattcatctttcttatgcttactgtcaccttccatatgctttcctcctaacttataactccccaaccttttaattcatcatctttgttttgttcttgtatattctcactatttatatatattttttctatagattctttgtcttgaaaatcttcctcttgccactttctaaatcctttgccattttcatattttaatactaaaatatgaaatcctcccatctcatcgttatttaacgcttctatctgttttgctaattttctatcgcaagtgatcaatgctaatctgttcacacatttaaactttgcaaatactgaaacaaatgtactgatcacattagaatcactcttttcccctcgaatctccaccagatcctgcatttgcatatccattaaaatcttcatagctctttgtgccattgtaatttcttctctattcgtactgatcatctgattctgtattgcttctactgatcttaaaggaataataattttatttccattattctttaacaatcctgacaatggttgtattgcttctgaaaaaccattttcatacaaagctgtctgatccaaaaatactcgataattttctgcaatattattaaaatctgtttgatcaatgattcctgtgtcatctactccaaatcttaaaatctttgattcatctggaaaacatagaaaccattttttcaaaagcgatccattctctatcgtctcaaatatatttccatgattttcatcttcgttagaacataatatagtagaaagtatcggtaataattctggtttatccttcaaacaattatcaattacagcacatattgcaatatattgaatcgaactcatcttattcttctgagtctccaaattattaatcgtttgtcttgttaatccaattaaatcgccaaattcctgcactccaaatccaagaacttgtcttatctgtttcagcgaaacttgcatcgtctctaccatcctctgtcttaattgataataaaagtcaatcaatctcaacaccacctttcttatgtatttaaaatatcactttattttactgatgtcaatatattttacattttacaacttttattttataattatgtaaattttttttacattttaattttatttatacttgaatacggcactgattacaatttaagatttttcaaacatctcgataaatcggtgctgtaaaaactctttcatcttctgttaaggaataaaagattatcaaccaataccgtataacatacacactctgtagtggttggaatagccttcagttttatgtggcaggaataagataagaacaaatatttataagaaaaccagtggcaacaatcagcagattttaagtgcgttttttacaaattcgcagcgccctgtggttgattgtctgaacgtagctgcgggcattttggctcgcagccagtgagttatcaaaggaacaggcgcgaatcagcgatttgtaaaaaacgctcttaaaatctgcgtgttgccactggttttcttataaatatttgttcttatcttatttctgacacatatacgaatgcctaccgtccaaatcagaatttatgacagcaacatcctatcatttgcaaattctccaccgcttgcttcttcgaatttctgcagtagatctgctactttaagcttcttcttttcttcccctttcacatcataaatgatctttccatcactcatcatgatcagacggtttccaatattgatcgcatctttcatattatgtgttaccatcattgttgtaagattatctctggctacgatcttctctgtgatgtctagtactttcttcgcagtctttggatcaagggctgctgtgtgttcgtctaataatagcaggcttggtttcttcagtgttgccataagcagtgtcaatgcctgtctctgacctccggataatagtcctactttggatgtcattcgatcttctagtcctaagtcgagcatttgtaatttttctttaaacatttctttttctttttttgtgattccccagcttaggcctcttttctttcctctacggtttgccattgccatgttttcttcaatctgcatacctgctgccgttcccatcattgggtcttggaatactcttcctaacatgtaggcacgtttgtattctggaagatctgagatatccttgccatctagaatgatcgttccttgatcgatcggatagactcctgctaccatgttgagagttgtagattttccggccccatttcctccgatgatcgttacgaagtccccaggatctaagtgaagattgactccatttaatgcttttttctcattgatcgttcctttattaaatgttttatgtacatttttaatttctaacataactttgcccctctttctatgctggtgtcctgcggtgtgaatattttgatttgagagcaggaataccgagtgctaatgctacgatgatcgctgtgaataatttcatatcatcggtacttaatccgaaatgtaaaacaagtgagatgatcatgcgatataccattgctcctccgatcagtgatgcaaggatataagcaaagttaaaacgttttccaaagataacttctccgattacaatggatgcaagaccaattacaatagatcctgttcccattttgatatctccgtatccttggttctgggctactaaagctccagatactgagatcagtccattagaaatcaccaatcctaacactttggatgtatctgtatttccccctaaagcacgtaccataaattcattgtttcctgttgccctaagtgcacatccgatctctgttccaaaaaaccagtacagagctgcgatcacaatgattccaataatgactccaactaccaatgttgccagtgtctgatctactcctaacagatccattacctttgtaaatgcagtgtcttctccaagtaatgaaacatttggccctcccataactctgatattaacggaccataatgcgatcattgttaaaatacctgctaagatcgcagggatcataagtttcgtgtgcagccagcctgtaacaagtcctgctaacattcctcctacaagtgcaaataataatgttacaaatggattgaatccccttgtaataaggattgcactgatacatccaccgagtgcaaatgttccatcgcaggataagtctgcgatatctaagatcctaaatgtaatataaactcccagtgccatgattccccataatgttccttgggctaatgcactataaagatttgtaattaatgccattttctacctcttttctaaatgcacagaagtgcctcccgcaaatcggaagacacttcctgatcttcttgtaatcttatatgcaagaaaatcttatttattattctttatctgtctttttctgtgttgttaccatcttagcttctttttttaacttctctggaatcttaattcctaacgtctttactgtgtctttattgatgatcagatccgcattttcctgatattcaattggcatatcttttggttcagcttttccttctaagatctttactgcctgctttgctgtctgctgtcctaacttgtagtagttaactccgtatgttgcaagtcctccacctgtacacattccttcttcagctacgataaatggaatcttagcttcatttgctaccatggatactgtattgattcctgctgcgatcatgttgtctgttggtgaatagattgcatcaactttaccttttaaggattctacaacctgacggatctcactggattctgataccgttgcatcgactgttgttaatcctaatttctttgcttctttcttcgcaagtcctacctggaatttggagtttgcttctgcagaacaatataacattgcaactttctttgcatttggaattaactcttttaatagattcatctgttttgctactggtgttaaatctgatgtcccagatacgtttgttcctggttttttatttgattttaccagtttggcatcggctggatctgtaacagctgttactaaaatcggaatatcttttgattcattggccattgcctgtgctgctggtgttgcgatcgctaatacaagatcgcacttatctgtgacaaattgtttggcaattgtctggcaatttgactgttcattctgtgcgttcttatattcaatcttgatcttgtctccgtctttatatccagctttctcaagaccatccttaaaccctttgtaagatgcatctaaagcatcatgttctactaactgaacgactccgatcttcttctggtctgaactgtctttcttgcttgagcaaccaaccattgtggataatgctaatgcagcaactaatcctgttgccatgactttctttaatctcatatttttctcctccttaatatcgttcccgattgcattccttggctttaaacttctgaactttaaagcttcaatgcttttatgtactaaattgtaacactatgattttgtgtcgtcaagctaattttattgctttatatggtacatcatattccatacaatctaatatcaattattttatacgcatatttctatgcaaaaaaggatgaaagatttcccaaattctttcatcctttttcttctatcaatttcttctattgctgtgcttcttcggctgctttcttcgcattctcttctgcaactgtacgatattttattgtcagtgttctgatcagttcttttaactcatctgttaactgctcttctttcactctccactcccagttaccacctaccgtagatggtgtgttgatccttgcttcatttcctaatccaagataatcctgaagtgggatgatcaccatatcgcttcgactctctaatgcaagagaaatcaagtctaaatgtacagttcctgttctctcgatcgtactgtattttaaataatgctctaagaatttcttatcatcttctgataatgtttcgtaccatccaacaaccgtatcattgtcatgtgttcctgtgtatacaacactattttctttgtatttatgtggaagatagatgctgtcatcatatgctccaaatgcaaattccagaacattcattcctgggaatcctgtatcatctagaagtttatgcacgctgtctgttaagaatcctaagttctctgcgataactttcttctcaccaagttctttcttcattgcttcaaagaaatccattcctggacctttgacccattctccattaacagctgtctcgtcttctgctggaatctcaaagtattcatcgaatcctctgaaatggtctaatcttaaaatatcatataacataaaattatgacgtaaacgtttcatccaccattcgtaatctgttttcttatgatattcccagtcatatacaggattggaccatacctgtccatcttctgcaaatgcatctggaggacatccacctacaaccgttgcctttccttcttcatcgactttaaataattctttgtggtatgtaaatgctgttccatctaaggctacataaaatggaagatctcctacgatctgaattcctttgtcattcgcatatttcttcagcgcaagccactgtttatggaaataatactggcagaagcagaaataactttctgggaatttacttttcttctcgctcatatattctgcatattccccgatccagtattcattgtctttgataaatttcttataatcttcatctggatgaaatctgaaataagcttttcttaaaagctttctgtgatcttctctgattttctcatagtcaactttgcccttgttttcttccttaattgattcgagttcttttttcttaagaagtccttcttccagtaactgttctaagtcgatataatatgcacttcctgcaaaacttgaaaacgaaagataaggagaatttcccgcaccgatcgttcctaatggaaggatctgccagtacttctggcctgcttcttctaaaaaatctacaaatttgtatgcttcctttgaaaagcatccaattccgtaatctgatggtaaactaaaaattggcaataatattccgcttgttttcattgaatgaattctcctaaaatctcctaaaattttctcacaactcaatatagtatatcataaaacatacttcttgaacagaagtgctcttgtacttaatttaattctatcatttatttctggctttcttctgcaacagctttggctactgctttgcagactctttcatcaaatgcacctggaatgatatactcttcatttaactcatcatcactgatgatacttgcgatcgctcttgctgctgccatcttcatctcttctgtgatctgtccagctcttgcatccagagctcctctgaagattcctgggaatactaatacgttattgatctgattagggaaatcggatcttcctgttgcgataactcttgctccacctttcttcgcttcatctggcatgatctctggtgttggatttgccatggcaaaaatgatcgcatcgtctgccatagtagataccatttcggctgtcacgatatttggtgcagaaactccgataaatacgtctttatctttgatgatctctgttaatgttccagtctgtttctctttgtttgtgatctctgccatatctttctgtgctggattcatccagtcttctcctggacataatgcacctttctggtcaactaagacaacatttcctgcgccaaactgtaataatagtttacagatagagattccagcagatcctgctccattgatcacaatgtttgcatcttccattttctttccgacaaattttaaggcatttaataatcctgctgctacaacgatggctgttccatgctgatcatcatggaatactggaatatctaattcttcttttaaacgtttttcaatctcaaaacatcttggtgcggaaatatcttctaaattgataccaccgaaacatggtgcgatattcttgactgttttgatgatctcttctgtatcttttgtatcaagacagattgggaatgcatcaatatctgcaaattctttaaataaaagggcttttccttccataacaggcattgctgcttctgggccgatatctccaagtcctaatacagctgttccgtcagatacgacagctactaaattaccttttgctgtataacgatatacttcttctttattatcacggatcttacgacaaggttctgcgactcctggtgtataagctgtacttaagtcatctcttgtctttactgttactttagaacgtactgcgatcttacctttgttttgttcgtgcatttctaatgccagtttgttgtaatccatttttgtatctcctttatggtatggtgtttcagatttttgttcttttatcattgtatcataacataattcgattgactatggttgaaaaaaacgatataataaaaaagtgtcttcgacacttcaactcccctgcc

SEQ ID NO: 639 - DNA, 646 bp, Unknown
  gut microbiota DNA sequence
aaacagaatacaaaactttttcgatatgccaatactgccagattcgcttataactgggcgttaggaagaggaaaagaaaactataaaaatggtggtaagttcctatcggatagtaatctgagaaaagaatttacacaattaaagaaaacagaggaatattcctggttaaatgaagtttcaaataatgtaacaaaacaagcgatcaaagatgcttgtcatgcatataagagatttttcaaaggatgttcaaagtttcctaaattcaaaagccgaaaattttctataccatctttttatcaagataatgtaaagatccaattttcagatacgcatgtaaaaattgagggttttgctgcttccaaaaagaagaataagcaaaagataaactggatcagacttgcggaaaagaatcggatacctacggattgtaactatagtaatccccgtattaaatatgatgggatcaactggtggatcacagtaggcattgaatacgaagactctgttaccgttccctccaatgatgggatagggatcgatttagggatcaaagatctagcgatatgttctgacggtaataaatataagaacatcaataaaacgaaaaaagttaagaaactagagaaacaaaaacgcagattacagc

SEQ ID NO: 640 - DNA, 145 bp, Unknown
  gut microbiota DNA sequence
atcaactggtggatcacagtaggcattgaatacgaagactctgttaccgttccctccaatgatgggatagggatcgatttagggatcaaagatttagcgatatgttctgatggcaataaatataagaacatcaataaaacgaaaa

SEQ ID NO: 641 - DNA, 23873 bp, Unknown
  gut microbiota DNA sequence
ggatacagatgatggaatcttaaaacagttagctgcaggtggttttaaagatatcacaagaatcgcatcttcatctccagtcgtatgggagcagatttctttatcaaataagaagaatatcaaagaattactgcaaaaagcacagaatcatttaggctatgtgatcgcagcacttgatatggaagacagagaatatttgaataattattttaaacaggcaggagaatatagagattctgtaccagacagtgcggttggtctgatccagaaatcttacgagatctttattgatattccagatgaaccaggaacgatcgcaacaacgacaaccttgcttgctttgaatcatgtaagtatcaagaatattggaatcattcacaaccgtgaattcgaagaaggtgttttaaagatcatgttatatgatgatgaatcagcaaagaaggcgacaaaaatcttaagagataaaaactacacagtatacgagaggaaataaaaacatgaaattaacaaaaagtgcgggacttagaggagaattatcaattccgggagacaaatcgatcagtcatagagcagttatgtttggatctttagcgaaaggaacaacacatatcagcaatttcttatcaggagcagactgtctgtcaacgatcgattgttttcgtaagatgggtgttttgatcgaacagaatggaacgaatgtcactgttcatggaaatggacttcatggcttaaaggcaccaagtgagacattagatgtaggaaatagcggaacaacaacaagattgatctcaggaattcttgcaggtcaggattttgaaactgtattatctggagatgcatccttaaataaacgtccaatgggaaggatcatcaaaccattagagcagatgggtgcaaagatcacaagtgtgaatggaaatggatgtgcaccattgaagattgaaggaacaaaattaaatgcaacacattatgattctccagttgcatctgcacagataaaatcctgtgtgttattagcaggattatatgcagatggcaagacaagtgtgacagaaccagcattatcaagaaatcatacagaattaatgcttcgttcttttggagtgaaagtagaatcacatgatacaacagcgacgatcacacctccagaagagatgatcgcaacagatatcgtggttccaggagatatttcttcagcaactttctttatcgtggcaggactgatcacaccaaattcatgtatccgtttaaaaaatgttggaatcaatccaacaagagatggaatcctgcgtgtatgtaaagatatgggagctgatgttacattagaaaatgtaatcgataatgggggagagccaacagcagatatcgttgtaaagacaagcaaattaaaaggaacggtgattggtggagaagtcattccaacattgatcgatgagattccagttattgcactgttagcagcatttgcagaaggtgagacagtgatcaaagacgcggcagagttgaaggtaaaagagtctgatcgaatcgcattaacggttgataatcttgtgaaaatgggtgttgatgcgacagcgacagacgatggaatgatcatcaaaggtggtaatccattacatggagcaagcatcaattgtaaatacgaccatcgaatcgctatgacattttcgattgcaggaatcaatgcagaaggagaaactgtgatcgaagattcagaatgtgtggatgtgtcttatccaacattttatgaacagttaaattcattgcaataaataaaatgctaagataagagtttataaggagtagataacaatggaaaagaaatatttcttttttgatattgacggaacattgacagatagatcgacagggaagatcgtgccaagtgccagagaggcgttggatcgtttagaagcaaatggacattttgttgcgatcgcaactggaagagcacattacaaagcacgtaaattcacagaagccaatgggtttaaaaatatggtctgttgtggaggcaatggctgtgtgatcaacaatgaattagtggaaaatatgcctttggataaagaagggtgtttacagatcattcatcagtcagaagaattagggtatggatggtgtgtagctcttgatgatacgaaagatgtctatatgacagacgataaatttctaagacaggttggaaagagaaaagaaccaaccagatatatcatcgatgatatgttagatattgacagtgtcgatgcgatttacaagatttatgtagctattccaaaagaggaagaagagaaacttacaaagaaagagttgatcgggcatttgagatttgaaccagaatatttaatgttccagccagataataaacgtggtggtattgtgaagatgatggaatatcttggcgcagacattaaagatgtggttgtattcggggacgattacaatgatatggatatgttctgtaaagactggttttccattgctatgggaaatggatgccaggatttaaaagatatggcaagttatgtgaccgatacaaatgtcaatgacggtattaagaaagcatgtgaacattttgaatggatttaataaagtaaaacagcagacagaagatacatcggagggaaatatgaaacatttaaaattagggaagatacaatggatcgcattattggttgtcagtgcaatgtttgtgaatttatgcagccatatggtattggcagcagcaagagatggaaatgatccggcacagggaacaacggcagaagcaacaacagcttcagaagcgacaacagaagcaacaacagcttcagaagcgacaacagaaactacaacggaacagcaggaagagacacagtctatgggagaatataaagcattctggttttctttctacgattatgactcttatcgtgcaaaatataaaaagagaacggcagcaaatttccgtacctactttacaggtgttgtcaaaaaaggaaagagtcttggaatgaatcgcgtgatcgtgcaagtaagaccatttggagatgccatttataagtcaaagtatttcccttggtccaaatatatttctggaaaacagggaagaaatccaggatttgacccattaaagatcatggtagaagttgcacatgacaatgacatgaagatcgaggcatgggtaaatccatatcgtgtaacaacaggttctacgaattataagaaacttgcaaagaataatcaggcaagaaaatggcatgccaagaagtctacaagaagaaatgtattatcttatggtggaagtttgtattacaacccatccaaaaaagcggtcagaacactgatcacaaacggagtaaaagaaatcgtacaaaattatgatgtcgatggaattcatatggatgattatttctatccatcttttacaaaacgtaatgtcaaaaaggcatttgatgcaaaagaatataagaaatcttcttataaaaagaaaaagaaaagtatctatacttaccgtcgcgcacaggtaaatactcttgtgatacagatgaaaaaagcagtaaaaagtgtagatccaaatgtaacatatggtatcagtccagcaggaaatattgacaatctgacaagtaaatattcatattatgtagatatctataaatggctaaattctacagagtatgttgattatatctgtccacaagtatactggggatttaaacatccaactgccaaatttaataaagtcacagaccgttggatcaaggcagcaaagagtaagaaagttaaactttatattggaatcgcagtatatcgtgcgggacataatgttggccagaatcgtgcagaacgaaaagaatggaagagtgatacaaaagtcttgaagaaacaggtccagtatgcaagaaagaaacatgtggatggatttgcattctttgactatcaggatctaaagagcaagacaagtgccaaagcggtcaatcagctcaaaacagttttaaaataaatattacagagatcattgcatagagatatgtgatggtctctttttagttacagcagatttcttttcatgtaaattacgctatataagaaatctacagcgagttgacataatatgaaaaatataatattatatggcatataatatgatgtaaggaggatgccaatggtttttaatacaggagctgcgctgttagatgcggtagttctggctgtcgtatcaagagaagaagaaggtacgtatggatataagatcacacaggatgtaagagaagtgttagaagtatcagaatctacattatatccagtattaaggagacttaagaaggatggctgcctggaagtttatgataagcaatacggcggcagaaaccgcagatattataagatcacatctgtgggaatagcacagctttcgttatataaagaagaatggaaacaatattcccagagaatatctggaattttcgaaggaggagagagagtatgaaccgggaggagtacttaaagagattgtcttttttactaaaagatcttccagaagaagaaattgaagatgcgatcgcatattatgaagattattttgaggaagcaggagaagagaaagaagaacaggtgatcaaggaacttggttccccagagaagatcgcgaagatgatccgtgattctgtacaggaaaatcaggcaagcagtgagtatacagaagaaggatatagacaggaaacttacgaagattaccagcagatgagtagaaaagactcacaaaaggaagccaaacagggcagcagatggcatatgaagggaagaagaaaccggaatatcattttgatgatcttaattcttgtctttgtgggaagctggctgattcctggtatttttggcattgtgattggaattgcaggaggaatttttggcagttgtgtgggattgttgtttggaggacttggactggtcggtgctggaatttataagatgtttacgacagttccatatggtttattgttgatgggcggcggttttctgatgatcgctggtggaattttgttattatggttccttgtatggatctgtgcaactgccattccatggatcattgcaaagatccgtgaattttggaacagaaattttgggagaggatgtgaatcagtttgaagacgtttaagaaagtatgcatgatattaatatcagtaacggctgttgcagggatcggatgcatcatagcagcatttgttatgggtgcagatccaagacagatccgaaattatacagaaggaaagacaagcggcaaattacagacagaggaacgaaatataagagcagatcagatccggaaattaaatattgatattggaagtggaaatgttaagctacaaaatggaaatcaggatcatctgatcataaagaaaaaaggaagctgggagccagtgatattaaagtcagatggagagattgaaatcaagcagaagagcagacattttaaattgttttggtttcaatcaaacgatgagatcacagttattctgcccaaaggagttacctttgagaaagtttccatggattgtggcaatggagacattgcgtcagattctttgaatatcacagacgaacttgacatagactgtggaagtggagatattgatctgacaacgatcacaacatcaaagacagagattgatctgggttctggagatgtcacattgacaatggcaggaacagaaaaagattataactataatatagattgtggaaatggagatgttaagattggagatatacttttcgaagatgatctaaaaaaacgaaatatcaatgcattaagatggattaatatagattgtggaagtggagatcttacgatcgatttcgataatacaatattgtaaaacaaagtaacagatagatggaggaaaaggaaatgaagaaaaccttatataaatcaagaaaagatcgttttttatttggtgtatgtggaggattagcagaatattttgaggtagatccaactttggtacgaatccttacagcagcattatgcacaacaggaacaggattgttgttatatattgtggcagctgttgtcatgccggagcgtgtcgagtaattgtctttttcttgaatcaatccaaagaatgtgataaaatagacaatcatgtcaaaattcaggtcaaataagactttgatcatgaagataaatacacataaagaagaggagaaatcatatgaaattaccaatattgatcgcaatggttctctatatggcaatggttatctggattggtgtcatttacagtaagaagacaaagacatccgaagactatttccttggaggacgaggacttggaccatgggttactgcaatgagtgcagaggcatctgatatgagcagctggctgttgatgggacttcctggacttgcatacgcaacaggattcagccaggcaggatggacagcaatcggattgatccttggtacatacttaaactggaagatcgtggcaaagagattacgtcattatacagaagtagcagataatgcgatcacagtgccagactttttcagtaaccgtttcaaagatgataagaaaatcttaagcagtatttccgcaatcatgatccttattttctttacagtatacacagcatcaggatttgctgcatgtgggacattatttaactctgtatttggattaaattatcagaagagtatgatcgtctgtgcgatcgttatcgtattatatacatccatgggtggattcttggcagcaagtacaacagacctgattcagggattattaatgtcatttgccattgtgatcgtactgatcgttggagttgtgaatgcaggtggagtagcgaatgttattgcacacggtcaagcaatggaaggattctttgatgttatgaagtaccatgacccagcaacaggagatgcagtatcacagggtgtgattccaatcttatccggacttgcatggggacttggatattttggtatgccacatattcttgtaagattcatggcgatccgtgacccacaggaagtaaagaaatcaagaaatatcgcaatgatctgggtactgatttctttaagtgtagctgtatgtatcggatttacaggagcagcactttatcccaatgtagcagaattagctggaaatggaaatcagagaatctttatctacatgacaacacatttatttaaaggactgatcccattatttatggctggaatcattttatcaggaattcttgcagcaacaatgagtacctcagattcccagttactgatcgcatcatcctgtgtatcaaagaacttattccagggattatttaagaaagaaatgtccgaagaaaaagtactgatgatctcaagactgacaacgatcgtgatcgcattgatcggtatcgtgatcgcaatggatgaaaatagttctgtattcggactagtagaaaatgcatgggcaggattcggtggagcctttggtccattaacactgtttgcattattctggaaacgaacaaacttaaaaggagcgatcgctggaatgttaagtggaggtatcatcgcacttgtatggccagtgactctgggtaaattaggtggaatttttggaatttactgcctgttaccagcatttatcatatcttctattctgatcatcgtagttagtttatgtacagaagaacctagcgatgttatggtgaaagaatttgaagaagcaaaaagcctcaatgattaaattgtgatttgaatgacgaaaatcattggtggatattataaaaagagatcatatgtttgcaacccactcgcgttcggactcccacgtagctgtactaagatcctgaatggtctaatgaccatccactcgctaagtgcagacgtgtccgtacggttgccaacacatgatctctttttataatattcaaataatttacgttattcaaaccactacacagtgtgtatgttttactgtatgggcatttataataaacatttgtctgttactaaaaaatttgaaaaccgataacgttcaacatacaatacttaattttatacgagaatgtcttcaggtattcataaaaacataaagaaagatagaggtacgaaatagtagaattccataggattttttgcaaaatcgcagccaacacgggcactgtttgaacgcagtgagttgtgcaggagtgttggcgaatcagcgttttgcaaaaaatccgtcaatggaattcgtttttcgtacctctatctttttttacgtttttatgaatactcgatacatttccgttatacaattacaatttaattagtaaatactatccctaaacacaatcttacgatatgcttcaaactgtaaccaacggttaaagaattcgcttcctggtttatatccttgttcttttaattctgcaaacagtttgtctgctttttctttggagtcaaccagaatcttaaatcctcgtccattgatcagtggcaggcctttgtattcgtattcttcaattggaagaattgctgatacttttctgtctctgatctgtacggctactttgtctctgaatacgataacatcaaagtagtctggatactgataactttctccttctactggaatttcatctccgatcgtgtaggattttccagatggtttgatctttgtgactgtcatactttccatgttgtagtagaattcttcaaagatgtctccattggcttttaattttccatgtgcaaagacgcattttaggtctgtttcttcgtcaacttcggaatttttgatcactccgcatgcagatgtcatgtttgtgatacggtcgatcaatatcagctctcctaaggctttatgatcatcaaattcgtctaagacaatttcttcctgcaagataacatcacatactgcgatctcattctttcttaagttgtttgctggaatgtattctcctgtgttgacatcgatcttgtactgaatatttgttacgattcctagaatttcttttgttccgatctttacgaaatattcttttcctggtaacaattctccgtcatccatccaaagaactgtcgctgtaaatgatttgctgactggaagttctgttttattggccagtacgcatcctctggatacatcaacttcacggtctaactgaatcgttactggacggcctttttcagctgtctgtgcatctttatcaccaattaataaactcttaacctttgcatgttctttgcttggtaatgtcacgatctcatctccgacagaaatctgtccggattcgatctgtccctggaatccacggaatgtgtggtttggacggcatactctctgaactggcatgtagaatccttcttcttcagatttctctcgtacatccaccgtctctaggtattctagtaatggttctcctgtataccatggaatgttatctgattttgttgtaacgttatctccttctgttgcagatactgggatgatctttacatttgcaagtgataattcttcttgtaattctttgatctgttcctcgatctttcggaatgtttcctgatcatattttacaaggtccattttattgactgcaaatacgaagtgtctgattcccattagggcgcagattcttgcgtggcgtcttgtctgtactaatactccttgggatgcatcgattaagatgactgctaaatctgcaaaggatgctcctacagccatgtttcttgtatattcttcatgtcctggtgtatctgctacgataaaacttcttttttctgttgtaaaataacggtaggcaacgtcgatcgtaattccctgttctctttctgccattaatccgtcaagtaataaagaatagtcgatctttccaccacggcttccaactttactgtctaactctaatgcttcttcctgatctgtatataataactttgaatcatataaaatatgtccgatcagtgtagattttccatcatctacactaccgcaagtaataaattttaataatcctatcatcttagaaatacccctctctctttcttctttccatgcttcctgctgcttcattatcaataactctggttgttctttctgaagaaaccgcacttaatgtctcgtcaatgatctcatcaagtgttgaggcttttgattccactcctccagttaatggataacatccaagggttctaaatctcacactcttgtattcgatcttctcatctggtcttaattttaatctgtcatcatcgaccatgatgatatttccatctctctcgatcactgggcgttcttttgcaaaatataatggaacgatatcaattttttcgcgtttaatatatttccagatatctgtctctgtccagttagagattgggaatacacgaatgctttctccttttttgatcttagagttatataatttccacatttctggtctctggttctttggatcccatgcctgattttcatttctaaaagagaagattctttcttttgcacgagatttttcttcatcacgacgtccacctccaaatgcagcggtaaatccatatttatttaacgcctgctttagggcctgtgttttcatgatatctgtgtaagcggctccactatcaaatggattaaccccctgttttacaccatcttcattgatgtattctatcatttctaatccgtatttctttgctgtttcatcacggaatttgatcatttctttgaatttccatgttgtattaacatgtaaaaatggaaatggtggtttctccggatagaatgcttttaatgctaaatgtaacataactgagctgtcttttccgatagaatatagcataactggtttttcacaagaagctgcaacttctcggatgatgtagattgcttccgcctccaactggtcaagatgtgataattcgctcattttgatgtcctccaatctaatatttgtttgaatctttcttgttgatctctatggtttgttcttccccggtatattttttgatcttccagagaatcgtatctttgctttcgttaactgtcatttcacttcccattccaccgatatcggctcctaggaaaaatgcgatggctcctgttttacattcttttaaacaggatgtacatccccagcagtcttttggatatttgatgtatgctttgccagttgcatcggtctttatcaaacttccaggacagacgtctaagcatcgtttgcatccaacacatttatttttgttaattctgatgctcatagtgctcatcctcctttactagttctcgtaagataactttgatctttccttccactttctttgtattgacgtattttttccaatcatcactcttttgtggatgatcaagattttctgcaaaactgtgccatcttgtctcttttcttgcttttaaatgttcgatcagagtcagacagatcgttaatcgttcttttagttcataataaaacattaattcatggtaatcctgagcacttaactgtccagataatgtgatcagattattaatcttttcttttgcgagatttaagcagttttcattaaactgataatgacttgaaattccgcctgcataagcatccatgactttctgcatcgcttcttccatttgctcgatcgtaaaaatactgtctttgtctgataaaatattgttgtattctttgactttctcgtctaataactgttcttctttgttatctgttatatcaaacgtctgatcttttaatttctctacgatatccagtgctgcaagctcaccttctaccaaagctcctgtcacatatttctgtgggcatccacctgcgacatctccggctgcgtacagcccatggattgttgtctctcgatttgtgtttacccagtaaccactggcagtatgtccacccacgatatatggttccgttccctcgatctctacattttgttcacttggatctttgccttgctcgatccattttaaggtctggcttggtgccatatttaaatatgctttcttaaggtctgtatctttttccttctcaattccttcggttcttaggtaacaaggtcctcttccttccagattttcctgtgttgttccatagacacgctgagaagttgtgattccgtatttatcttcgtaaatctctcctttagcgtttacctgctttgccccgactccctgtgcgatcgttcccgttggtgcgatcgtatctttacaccttaatgcgataaaacgcatctcaaaggttgtcatctcagctccagcatcaattcccattgcgtatccggcaccagtgttaaatggtggataccacatcttatgtcttgaaaatccaggattatttggcttataaagccctgctgcccctccagttgcacaaagtactttcttggcacggatctcataagctgttccattttccatatggaaaccgaaagctcctttgatcgtgttatcttccacgatataatcggtgatattcaaatgattgatcacctctacgttatctagctgatttactgcatctgcaaggattggcttgatattttctccattgatcttaatatttcgatttcctctggcaacatagtcaccattttcatcctttaaaataaccaatcctaactgttccatcttgcttgtcacttcatttaaatgttctgacattgtaagaagcaggtcacctcgtacgatctcatctgcatctttcctcgcataatcaacataatcctgtggttttcttccctttacgatataagcattgatcgcattaactccagctgctaagcacccgcttcgtttgatattagctttctcggcgatgacgatctttgcatcacttttttccctgatcgtaagtgccgcataacatccagctgttccgcctccgatgatcaggacatcggtatgtatgatctgttgttttgtaatttccataatcggtcctttctggtatatttcttaaatatagaagacatcgccttcctgcatttctttattctctaataaataagtttccttttcatcaaatacatataaacggtaaataatgatatcaacttcttctccaacgcttaccggatccttttccaaagatctctcagctgtcactttgattccattgatatttacaactacatccagtcgacttccactaaagatcacatcttctacaattcctttttctgatgcactcatatatcgttttaattcccctttttttgctaactcaaggaattccggtctgacgatcgctttctgtgcatgttctattttttcaaatccttttaaggattcataattttctacgatggatgatcttccaacaaactgggctacaaatggcgtctttggtgatttataaatctctaatgggcttcccatctgctcaatctttccatgatttgtgatcaagatctcatcagcaacctctacggcttcatcctgatcatgtgtaacgaaaatgcttgtgataccaagttttgataccatttcttttagccagagtcgaagctctgatcttacttttgcatcgatcgctgcaaatggttcatcaagaagtaatacctgtggatttggagccaatgctcttgcaaatgcaactctctgtctctgccctccagataactggttcggatatctattttcaagtcctgataaccccgttaattccagtaattcaaaaactcgttctttgatctgtttcttcggcatttttgcaatctctagtccaaatgcgatattatcaaagactgtcatatatcggaatagtgcataactttgaaatacaaatccaattcctcgttttgctgccggaatatcattgactctctttccatcaataaagatatctcctgcatttggattttccaatcctgcgatcattcgaagcagggttgtctttccacttccacttggcccaagcaacgctgcaagtttccctttttcaattccaaaacttacattatctgatgcccggaagtttccgtattgtttatagatatttctcatttcgacatacattttatcttccgtcctttccctgttgtttgtcctgtgagcggtaccatgcaatatttcttaagatcagtacaacgaccgcgatcaatactaaaaccgatgatactgcaaaggctgctgtgatcgatgatgttgttcctgacatatataaggcatcgatctccaatggtaaggtaaatgtctcacctcttgttttggaaagtgcattaactgcaccaaattctcctaatgccctggcactacataagatgatcccatagatcaatccccatttcatctgaggaagtgtgatctttcgaaagatcgtaaatccactggctcccatcaatgctgctgcctcttcttcgtcttttccctgtgagtttaagatcggtatgatctcccttgacacaaatgggaaagtcacgaaaatggttgctaaaatgactcctggaatcgcaaatgcgatccggatattcgttccaaagaaggtgttgatcgctcggattgctggatacatccatccaagtcttccaaatgtcatcaagaatgcaaggcctacgataactggtgaaatggaaaatggaatatcgatcaaagttgctaaaacctgttttcctttgaaactgaatttagtcaataaaaatgctgccatgatcccgaaaaatgtattgatcgttaccgcaacaagcgttgccagaatcgttacaaataaagcacttcttacatactccgttgatatggaacttacataaaatttaaatccatcacttaatgaatttgtaataacggaaaataacggtaagaccaacatgacgatcataaataaagcactgatcgtgatcaggatgatcttcgttcgctgttttcttttttcaaacttctgctgttcattcatgatcttctccttactgtgcattgactcttcttgcctgtcttacctgtatgatattgatcacaaataacatcacaaaggaaatgatcagcatgacaagagcaatagctgttgcacttttatagtcgatatagtttaatttctgcatgatcacataagagatcatctgtgtatgttccttggcactgtttcctgagatatagatcacacttccgtattccccgattccccttgcaaatgccagtccaaatcctgttaataatgcaggtcttaattctggtaaaatgactttaaagaatgttcttgtcggtgttgcacctaacatatacgctgcttcttcatactggtcatccattttctcaagcactggctgaaccgctcttacgatgaatggaatcccaataaacacaagtgcgatcaaaagtccgatccttgtataagaaatcttaatcccaaagtgtgcaaagtatcgtccgatcattccatcttctgcatacatttttgataatgtaataccagcaactgcggttggcagtgcaaaaggaagttcgatcatcccatccattaatcgtttccccggaaattcatattttacaagtacccatgcgatgatcagcccaaacacaacattgatcaatgctgcaataaacgaacttccgatacttgtgataaatgcatttcttactgtttctttcgatattaatgtaaagaattcattcggcgataattttagtgcgtatgcaaatacggatgctaatggaatcagtacgatcaatgataacatcgttactgtaactcccatcgttaatccgaaccctggaatgacccttgcttttttcgctttttttaatgtcctattctcgttatttgtattactcatcttcattcctgcctttttattgatttatataaatcttgtcaaacaacgctccatcttcaaaatatttcttgtaagcctgatcccatcctctaaaatcactgatcttatatagtttcatgttcagattaaatttaccttgatactgttttaagattctttcattcgatggccggtatccttcttcggctgcgagtttctgtgctttgtcactgtagagatattttaaatactctgttgcgatcttctttgttccattgacctttacgttatcatcaacaaggcttacacttggctgtgccaagatactgatgcttggtgtaatgatctcgtatttatctggataattcttaactgtctgaattgcttcattctcccatgcgatcaagacatcaccttttttattttctacaaaggttgtcgtagaacctctggctcctgaatccataacagatacattctgatataattttgtcaggaattgttcttcctttttctgatcgtgataggtatcgatcgcataaccataagctgctaagaagttccagcaggcacccccgctgctctttggatctggtgtgatgacttccactccttttttgatcaagtctttccagtctttgatgcttttcttgtttccttttcttacaagaaagacgatcgttgacgtatatggtgcagaatcatttgaaaatctcttctgccaccctttatttataagtcctgtctgttcgatcagcgaaatatcatgttctaaggccagtgttacaacatcaccattgcttccttctactactgatcttgcctgacttccagaaccaccgtgggactggatcacttcgactttctttccatatttgtctttataatatttgataaaatctttgttgtatttctcataaaactctcttgtcggatcataagagacatttgtgatcgtaagattttcttttctcttatttccacatcctgccatagaaaccataagaatcatacagaaacttaaaaggatcattttcttacagatattcttttctatggttctttgttgtcttattttcatggtttcttctcctttattttaattccatactatttctgtatgttttatatgaattggattatataagatttctgtatacatgtcaacaaatagcgttataaaaatttataataactgattcaaagaaatttttattatgttcatctttgctcataaaagcacgaaaaaaagacgttttgacatatgttttcaatacgtcaaaacgtctttctttcatttattatttcatatattttttcagattcttcttttgtttgtcactgatctgataaaaagtctgttttccattcttatcttcgattccaatgacagtacgatctccgagaagtatttttgttaatgtaccacttgtatagaaacgatactcattccatgaggctatatccagtgtggcatcttttccagataacttctgcgctttctcaataatcttagatactttgatcgctgtatcattaaatttcatcttcttatctgttacaacgatctgagcatctgcaattcttgctgctacgttactgtaattcttctgctctttggcatcgatcaacgcatctccaacagttgaagcaccattatatgcgtaaacattctctggaatctcatcaaacacaatataactgtcaccatatactttgaattcaaacgttgtattatcttcatcaatcaacgcataagaataactttgtttatactgcttctctacatcggttggtgtgattccgatcattcgattacatccagttacaatcttctttacatatttgcagacaggaatattcgttactgcaaaactctgattcttgatcgtattcgttgcaaagtcaactttaatgatcctgctgtctttgacacgacttttgtagtctgcaatcttttgatctccagaagttgcatggattgctttgatcttcttatttagtgaatttgtttttttcttttcttcttttaactgaacagacagtttatctctttgatctttaagactctgataatattttgattccacgacagcatcttttgacggcttaaagcatcccgtcatcatcacgctgctcattgcgatcaccgctgctgttagtatatattttgcacctttcatatggtttccctccattacaggtcctatcgtttttgagcgatctctcctgcgttcttatagatgctgtttggtgcgatacatccacgtaccatagataatggataaatattggtatcatgaccaaccactgatcctggattcaagatagttccgcatcctacttctacacgagaacttaagatcgcaccgatcttctttcttccagtctcaatcttttcttctccgtttttgatcacgacgtttgtcttgtcagattttacattcgatgtgatggatccagctcccatatgagacttatatcctaaaatagaatctcctacataattgtaatgaggcacctgaacattattaaataaaatatcattcttgatctctgtagaatttcctacaacacatcctgccccgatcaatgcatttcctctgataaatgctcctgggcgcacttctgtatctggaccaatgatcgctggtccattgatcgttgccgtcttggcgatcgttgcacttttcgcgatccatacatcttcttctacctgatcatattcatctgctgatagtgttggtccaacttccagtacaaaatctttgatcaatggaagaatctcccatggatacgttgtctgttcaaataattgagctgcaattgtctgatctaaatcctgaaagaattctttgtttgttaattctaccatctgattttacctctttctgttcttattatctgtttcaatccacagtctgtaattttcatttgaaatccaactcgatcggacagtgatctgatcccatcacatctgttaagatcttcgcatcactgatacgatcttttaaacactctgatacaataaaatagtcaatgcgccaccctgcgttattctttctcgcattgaagcggtaagaccaccaggaatagattcctgtctggtctgggtataaataacggaaggtatcgataaatccattgctaaggattgttctcattttttcacgttcttcatccgtgaaaccagcattttttctatttgtctttgggttcttaagatcgatctcctcgactgcaacattcagatctccacaaaagatcaccggctttttctcttctaacttcttcaaataagcaagaaaatcctcttcccacttcattcgataagaaagtcttgccagttcactttgtgaatttggtgtatacactgtgataaagtaataatctttaaactccagtgtgatcacacgtccttcctgatcatgttcttctatcccaagaccataaaaaacgctgatcggttcttcttttgtaaaaatgcctgttcctgaatatcccttcttcactgcataattccagtactggtgatatcccggaagattcaggtcaagctggccttcctgcatcttactttcctgaatgcagaaaatatcggcatctgtctcattgaaaaaatccaaaaatcctttcttcacacatgctctgatcccattgacattccatgatatgaatttcatctaatttcctccacgtctcttattataaagaaacataatcactcctgctgcaatgatcacacaatatcctacaaaactcagcatatctggaagctgtccaaaaacgagaagccccataattgctgagaacatgatctgtgtgtaatcatatacagaaatttcccttgctggtgcatacgtatatgccgctgtgactccaaactgtcctcctgcagcagctaatcctgttaataacaaaaagaatatctgccttgctgaaatcggatgaaaatccatgatcaaatatggtacacacgccaacatagaaaatgttgagaagaaaagcacgatcattggtcctctttctcctctaagtccaagttttctcacacaggtatatgcaaaacctgcacacattccccctgcaaagccgatcacagctgctggtgtcatcccgcctgcgaaacttggttttacaataaataaactaccgacaaaagctgcgatcacgcatgcgcattgtgtcggtgtgatcttctctttcagtactaaataagaaaatacaataacaaaaaatggcgataacttatttagacatgaagcatctgaaagcaccaggtgatctaccgcataaaagttgcagaaaatacctaaggtcccaaaaagggaccttagaataaaccaatgcaaatttcttttctgaatctgaatcttttccttgctacgaatgatcataataaatgccatgaccgccgcaactaaattgcggaaaaaactcttctcgatcgctggaagatctcctgacagctttaaaaacaatgccataagggcaaaggaaaaagctgacagtatgatgcatataattccacgattcttatctttcataacaagattatactcttgaagaatattctccagttcttgtatcgatctttaacgtatcaccttcgttaacgaataatggtaccattacctgagcacctgtttcaacgatacatggttttgtagcaccctgtgctgtgtttcctttttctcctggttcacattctgtaacaagtaattctacagagattggtggctcaacctggaatgcatttcctgcgtgagaaacgattgtaacgttttcgttttctttaacgaattttaaagaatctccgataacatctggtcctaatgcgatctgatcaaatgtttcgttatccatgaagtagaataattctccatcattgtacagatactgcatttctttacgttcgatatgagcgttttcaaatttctctgttggacggaatgttttctcaacaactccaccgttcttgatattttttaatttacaacgtacgaacgctgctccctttccaggttttacatgctggaattcgatgatctggtaaatattattctcgaactgaattgttaatccattcttaaaatctcctgctgtaaccatattataattgtcctccttaaattatatctttttttattttatcttaaatctatagttgaatcaactatttatttgctaatttatagatttcgtatatgtcattctcatcacagaccttaaaagaaccgatcgttctggttccttcataggaacatccatgtgccatttgcttcacttcttcgtctgtttttgaaccaatttctttcgcctcacgaaaacttgtcggcatattaagtgatgcaaaatatgtaactgtttttcggattccttcctgtgctgccttcacatcgtcagcttcttctacattccagactcttcttgcatactgcgcaaatctggctggttttgcatcatatacataagttgcccatgctccccagacagcggataaacttgccccatgtgcaatatcaaacttcgcactcagttcatgtcctaactgatgcactgcaaagtctttctcagctccaagtcctgtaattccgttgtgtgaaagacttcctgcccacatgatctcactcatcgcattataatcgtgtgaatccttgatcgcaaccgcaccatttctgattactgtacgaagcagaccttctgcaatctcgtctgtcagttcattattctctgtctgtgtaaaataacgatccaatgtatgcatcataatatccacaatgccgcatcctacctgatactttggtaatgtatatgtaagttcaggattcatgatcgcaaatgccgggcggttgaaatctgtggaaagacctctcttgatcttcgtctcttcattcgtaagtactgctgaatcgcttgtctcacttcctgccgctgcaagtgttaatacaactccaacaggaagagatttcttcactgtctgtttcttagaccagaactcccagatatctgtatccggattcgctgttccatgtgcaacagcctttgaggtatcgatcacacttcctccacctactgccaatacaaagtccgttccaaattcaatggatttcttcactgcttctctcgcaaatgaaagccttggattcggcttcacgcctccaactgtcatatattcaagaccggcttcttctaatgaagcagttacctcatcaagtaatccgcttcttacaacacttcctccaccatagacaacgaatactttggaagctttcaggcttttcgcaagttctcctgcctgcttctgtgtctcttttccaaaaatgattcttgttggtgtatactgggtaaatccatgcattcgctcatcctccatctgcccataaacaggggcaaaacttgtatgttactgattaatctgcatctcttgttaacttcacaacgatctcttctgcgatctcttccacagtcttataatctgtgttcactacaacatctgctgccgcttcgtactttggacggcgttgttccatcatattagaaataaattcagtattcttattcccacgtaataatggtctgtcatcattgtctttgacacgctctaagatcacttctggagatgctgttaataaaacgacctttccattcttcttcatctcagcaacgttctcatcacgaagcgcaactccaccaccacaggagatgatctggttattcttcttctgaagctcaatcaaaaggtttgtctcacagtttctgaaatatgtctctccatattcttcaaaaatcttattgatagacattccttctttcttcacgatctcttcatccatctctacctgtggagatgcaaggatcttacttagatatgtagaaacagtactcttacctgctcccataaatccgatcaataagatgttatgtgtaaataatgtctttgcctgaattcttctgctgttttctacaatataagtaaatatatcaagaatctcatccttataggtattctcatccacatgtgtgagcagcatcttacgctgtctcttttcctgttctggctgaaggattggcaatccattctctttcttgtagaccatgatctctttgatgatatccattctctcttctaatacagagacaatcttcttatcacacagatctaatctctctctaatctcttctaactgactcatcttcttgttctttccttttctatactaaatgtccccatacttctcagataacgaagtgtggtcttgttcagtatatcatacattcctatattttttcaattcattgcctctataatttaggcaaattcactttgatctgtaataaatgaaataaaatctttcacaaccggtgtcagatatttttctttttttagtacaagatatatatatcgttcgatctctggtgatatgatcggacgaacacacacatccattgtatcaagaagcggaatctttggaacaatcgcaattccaaatcctgctgcaacaagccctgcaacagaagaatcttcttccccttcatatgcaatcgttggttgccttttaatccttgaaaaacaactgtcgatcactggccttaatccactgttctttgtaaaatatacgtaatcatattcaattgtatccagaagatcgatttcttccttttgagccaatggatggtcctttggtgtgatcaaaaccagttcttcctgaccaaccggaataaattcaagttcatcttccccttccacataagaagaaaatgcaagatcatatttcccatcttttaattcttccacgattttcttcgtcgttccctgtccaaatgaaaaatgaatatgattcttccctttttcttccagataacctttgatcagatttggaataaaatgacttcccaaagtaaagatataccccatatcaataaatccaccgctggttcctgatgtttctgttaccaccctttttccttcatccaacatatccagcgactgctccacataacgtaaaaacaatgctccatatttcgttaattttgcatttctcccctgtttttcgaataatttcactcctaattcactctcaagacatgagatcgcatgacttaaacttggctgcgtaatggacagcatatctgcagttctagtatagtgttcttccttagctaatgcccg

SEQ ID NO: 642 - DNA, 35310 bp, Unknown
  gut microbiota DNA sequence
ctttatgtttttatgaatactcgatacatttccgtgatacaacttaaaacttcgccctcccagtgctttttcgtttcacgataaatggttcaaattccaacttcgtaacaaagcttcgaggctggttcttggtctttgagtcgcggatgcgcacaatgatatcaacggcttctcttccttttgcttcgatagaatgttccaccgtagtaagtgaaatacgattcatatcggccattgggatattatcgaaaccacagacagagaagtcatttggtactttgtattttaattcatataatgcatctaggattccaaatgcaaccatatcattgtatccaacgaaggcggtagaatccgttccctcttcgagaatctgttttgtcagattgtatccggaagaatattccagcatatttggagacagcagattatactctccgggtgagagggaacgaatactgacgcagtcatctccaaagccgtgttctttgaaggttgcaacaagtgcatcgtaacgttttgatctggaacgttcaatatcactgatcggtgttgatatataagtgatcttgcggtgcccaagggagatcaaatgttctgcgacgagtctggcaggtttggagctgctgacatggatcgagtcaaaagtaatctcgtcatttttatccccgatattgacgatgggaatctgttttgacatatcattaacttctggaagaaaagaagttggatacagataaacgattccagcagtatccagatcatttttcataagatccagataatattgttcggtgctcgggtttcgcagtgttggtgcaacaaaggtaagatatccgtaatcatgggcgcgttctgtgatcgaatgaaccagagttgtataataatggttagataagaacggacacatgatcagaatgaccttggataacggtttcgatgtctgctcaatggattttttcttcttttgatagccaagttcttttgcagcgtcccaaactttctgtctggtgctgtctgaaaaagagacattagtcttattatttaagatcatggagactgcagactgggaaagaccgacgtgatctgcaatgtctttggtcgttactttcttctttaaacccataaaatcctccttaatcaaaattattttaattaattaataacaactaataaaaaatagaaatattagtaataaaataataattattaattaaaactacatttatcatagcatatttttttacggaaaaacaaggaaaaacgagttttttttaattgaaagaaattgaagaaagcatcttgaaaaaaaacgaaaaaccatgtactattaataaagttgaaaaatattaataaattcaatgaatattgctgaaatctgacagtttttcgagtttgacaagacattttatccatgtttaaataaagccataaacaaaacaacgaacaaaacaacaaacaatgttttaggaggaagtaagttatgagatttttcgtggacacagcagatgtagatcagattcgtaaagcaaatgatatgggagttatctgtggagttacaacaaacccttcactgatcgctaaatcaggaagacagtttgaagatgtgatcaaagagatcacttctattgtagatggagctatcagtggtgaagtaaaagctacaacaactgatgcagaaggaatgatcaaagaaggaagagaaatcgctaagattcatccaaacatggtagttaagattcctacaacgatcgaaggattaaaagctacaaaggtattatcttctgaaggaatcaaaacaaatctgacattgatcttcaatccaaaccaggctttattagcagcaagagctggagcaacatatgtatctccattcttaggaagactggatgacatttctcagaacggattagatttaattgcagacatcagagaaatctttgatgcagcaggagatatcgatacacagatcatttgtgcaagtgtacgtaacccaatccacgtaacagaatgtgctaagatgggagcagacattgctacagtaccttacaacgtatttgaacagatgatgaaacacccattaacagatcagggaattgctaaattccaggcagactacaaagcagtattcggagaataagaaagggtggtagatacaatgacaaccgcagaattaaagaaaacagcaaatgaggttcgcaaaggtatcattaagtcaacacatgctgccaaatccggacatccgggtggatctttatcagcagctgatgtatttacatatttatattttgttgagttaaacgttgatcctaagaatccaaaagatgaaaacagagatcgtttcgtattatctaaaggacatgtagctcctggatattactcaacattagcagaaagaggatttttcccaaaagaagatctgttaacattaagacatgtaggatcttacttacagggacatcctgatatgaagaagattccaggcgtagatatgtctagtggatcattaggacagggaatctctgccgcagttggtatggcacttgctgcaaaacttcagaataaagactatcgtacatatacacttcttggtgatggtgagatccaggaaggacaggtatgggaagctgcaatgtttgcaggatccagaaaacttgacaatttagtagttatcgttgataacaacggattacagattgatggaccaattgatgaagtaaactctccatatccaatcggagctaaattcgaagcatttaactttaatgtggttgaaattgatggtcacgactttgatcagatcgctgatgcgttcaaacaggcaaaagaatgcaaaggaaaaccaacagcgatcattatgaagacgatcaaaggtaaaggtgtatcctttatggagaatcaggtttcatggcatggttctgcaccaaatgatgaacaatgtaaacaggcactggaagaattagaaaaggtgggcgagtaagatggcagaagtaaagaagattgcgacaagagaaagctatggtaatgctttagttgaattaggacaggaaaaccctaatgttgtagttttagatgctgacttagccgctgcaacaaaaacaggaatgtttaagaaagcttttccagaaagacatattgattgtggtatcgcagaatgtaatatgatcggtatcgctgctggacttgcagcagcaggaatgactccatttgcaagtagttttgcgatgtttgcagcaggacgtgcattcgagcaggtaagaaactctgttggatatccacatttaaatgttaagatcggagctactcatggtggtatttccgtaggtgaagatggagctacacatcagtgttgtgaagatatcgcattaatgcgtacaattcctggaatgacagtgatcgttccatctgatgatattgaagcaaaagcagcagtaaaagctgcagcagcgatggaaggacctgtttatatgagattcggacgtctggctgtaccagtgatcaacgatgaagattacaaattcgagatcggaaaaggtaaagtcttaagagaaggaacagacgtagcgatcattgctaatggattatgtgttgctgaatccttagatgcagctgagaaattagcagcagaaggaattaatgctcaggtgatcaatatggcaactgtaaaaccattagatacagaacttgtattagaagcagcgaaagcaactggtaaagttgttacagtagaagaacattctgtgatcggtggattaggaagtgctgtatgtgatgtattatctgaacagcttccaacaccagtattaaagatcggtgtgaatgacgtattcggacattcaggaccagcagtagaactgatcaaagaattcggattagatggtgacagtatcgctgccaaggtaaaagaatttgtaaaatagattttcttttaagcataataaaccaagaataaaaagcagtacacttgtttttgtagcaggtgtactgcttttgtgttatgatgaaaatgattttaggatcaaaacaatttacaaaaaggagaggtgaatgaatatgtggacaagaagtgaattgaaggaacgagggaaggcagcactgcatcgcaattattggatcgttgtgcttgcaacacttgtagtgacagcattaacgggaggaactggtaatgcagcagggaatggttccctgcaggaaggaagtaatatagcagcaggaaatggtgatgcggcatcaagtttgatacaaacattattttcgttttttggagttgcaggtgatatgatctataaaaatctgataggtccgatgtataatggaatgtatgtgtcatttattctgatcttgatcataacagcctttagtgtaggtttgttgtttaaaatttttgtaggaaacctgtttgaagttggaggctgtcgtttttatgaggagaacagcgaacataagacaaggatcgcattgatcgttgatggatttctcaatggtgcatatttaagaaatgtcgctacgatcttttgcagggatctttatacagtgctgtggacgttgtgtttaattataccaggaatcgtgaaaagttatgaatataaaatgatcccttacattcttgcggaaaaccctcggatatcaaggaagagagcgtttgagatcagtaaaaatatgatggatggagaaaaatggaatgcattcgtacttgatctgtcatttatcggatggaatctgttatcaacgatcacatttgggattgtaggagttttatatgtgaatccgtatgtgaatacaacatgggcagaattttataaagttatgaggaaaaatgcattggaaacaggaaatgcaacaagagaagaactgatcgggcttagaaaagaagcagatatttaagaaaacttcatggattctatatttgatagacgatcgtaatcatggtataatgtcaggtggtaaaaacaaaaacgatacgatgcaaggagtattaagatgggaaaatattttggaacagatgggttccgtggagaagcaaatataaatttaactgtagaacatgcatataaagttggacgttatattggatggtattttaaccagaagtcaagcagcagagcaaagattgtcatcggtaaggatacaagaagaagcagctatatgtttgagaatgctttagtagcaggattgacagcatctggagcagatgcatatatgctttatgtaacaacaacaccaagtgtggcttatgtcgtaagaacagaacagtttgactgcgggatcatgatctcagcaagccacaatccatactatgataatgggatcaaattgatcaatgccaaagggcataagatggaagcagaagttgaaaatgagatcgaagcatatattgatggggagatccatgaaatcccatttgcaacaaagaaagagattggacgagcaaaagactatgcagccggaagaaatcattatatcggatatctgatctctacagcaacaagatcatttaaaggtgtcaaagtcggattagactgctctaacggaagctcatttgcgatcgcagagaatgtatttaaagcacttggtgcagagacacatgtgatcaataatgaaccagatggaacaaatatcaatacaaactgtggatctacacatatcgagatcttacagggatatgtaaaagaaaaccacttagatgttggatttgcatatgatggagatgcagaccgttgtatcgcagtcgatgagaatggacaggttgtcgatggagatctgatcctttatgtatgtggacagtatctgaagaaacacggagacttgaacaataatacagttgttacaactgtaatgtccaatcttggattatataaagcgtttgatgcagcaggaattgcttatgagaagactgctgttggagataaatatgttaatgagaatatggtgaagaatggtcacgcattaggtggagaacagtctggacatatcattttcagcaagtttgcaacaacaggagatggtattttaacatccttaaagatcatggaagcaatgatcgagcagaaacaaagccttgcacagttagcagaacccgttgagatcttcccacagatccttgaaaatgtccgtgtatatgacaaagcagttgcacaggcagatgaagacgtacagaaagcagttaaggaagtagaagcagaacttggagatgaaggaagaattcttgtacgtgagagtggaacagaaccattagtacgtgttatggttgaggcaagaagccatgagatctgccgagagaaagtagataaagtggtcaaagttttaagagagaaaggtcacgtaatcaaataatctatggaaaaattatatgcggatataattattaatatttcacatgaggcactggataaggtgtttgcctataaggtgcctttttccatgatcaaggatattcgggtgggacagcaagtcgttgtcccatttggacgttctaataaggaacagacgggatatgtagtcaacctttcacggacagttgactatgatgagagtaaagtcaaagaaatcttaaggattgagacggatcatgttggtgtggagtcaaatatgatcgagttagctgcgtggatcagagagaattatggatcaacaatgattcaggcattaaaaaccgtacttccagtgcaggaaaaagttgcacgaaaagcgagaaaatacattgagctatgcattgagaaagtgcatggaccagcgatgcttgatgaatatttcagtaagcattatgtggcgaaagcaagacttcttgcagctttattagaccatgggaagatctcatgggaaatggcatcgaaagatctaaagatttcaaaaagtacagtagacagcatggaaagagaaggaattcttcatgttgtgacagaatattattaccggaatcctggagagttcagtatagcaaaagcagaagcgcatgtgttaaatgaacagcaacaggaactgatcgatgaatttcgggaagattttttaagagaagaccacaaaacctatcttttacatggaatcacaggaagtgggaagacagaagtttatctcgcagcgatcgaagaagtgatcaaacaaggaaaacaggcaatcgtcctgatcccagagatcgcattgacttatcagacggttacaaggtttaccaaacgatttggagagcgtgtatcaattctgaattcacgattatccaaaggtgagagatacgatcagtggcttcgtgcacagaggggagacgtggatgtgatcattggaccacgctctgcattgtttgttccatttacgaatcttgggctgattgtgatcgatgaggaacatgaaggcagttacaagagtgaacaaactcccaaataccatgcaagagaagttgcgatcaagaaagcacagatggaaggtgcatcggtgatcttaggttcggcgacaccatcagttgagagttataaacatgcactggatggaacttatcggctgtgggagttgacaaaacgagccaaagaagcagtgttaccgcaagtctatattgaagatctaagagaagaattaaaagcgggaaaccgcagcatgttcagccgaagactgaaagaactgataaaggatcgtttgaataaaggcgaacagatcatgttgttcttaaaccggcgtggttatgcgggattcgtttcatgcagaagctgtggtcatgtcatggaatgtcctcattgtgatatttctatgacatatcacagagatggaagactgcgctgccattattgcggatatgaacagccgatgctgaaggtttgtccagagtgtggaagcccgtatattggaacattcggtcttgggacccagaaagtggaagctgcattatacaaagaatttccacaagcaaaagtgcttcgtatggatatggatacaacgaagagaaagaatagtcatgaacagatcttatcggcattttctgatggagaagcagatattttagtgggaacacagatgatcgtcaaaggacatgattttgcgaatgtaacattggtaggtgttttggcagcagatctttccctgcatgccaatgattaccgggcaggagaaagaacattccagttattgacacaggctgcgggaagagcaggaagaggcgacaaaccaggagaagtagtgatccagacatattccccagaacattacagtatccagactgcagccaaacaggattatcacgcattttacaaagaagagatcagctaccgaagcttgatgagatatccaccagaatggcagatgttggtcgtatttgcatcaggagaagataaagcatggcttgataaagtaatggatgcgatggcaaatgtggtaaaacatatggatctgatggtgatcgggccgagcgaggcaggatttggcaagatcaatgatcaataccgcaaagtgatatatattaagaataaagattacgagacactggtgaaagcaaagaaccgtctggaacagtggatcgatttaaataagatcaggaaaaatttactggtcaattttgattttaacccaatgaacagttattaaaagaaagggagaacaattatggcaattcgacagattcgagtattaggagacgatgttttaagaaaaaaatgtaaagaagtaaaagaaatgacaccaagaatgcatacattagtagaagatatgtatgatacaatgtatgaagcaatgggtgttggtcttgcagcacctcaggtgggaatcttaaaaagaatcgtagtcattgatactggagaagagggagaatgtgtaactcttgtcaatccagtgatcacactgaaagaaggagagcaggtaggagaagaaggatgtttaagccttccaggaaaagtagcagttgtgaaacgtccagatcatgtgatctgtgaagcatttgatgaagatatgaatccgatcacagtagaaggatttggattatttgcaagagcgctctgtcatgaaacagatcatttggatggaattttatatccagatgtagcagaagaaccagcaagagatgtcgcgatggaagaggtagaataagatgaaagcagtatttatgggaacaccggagttcgcagtaccaacactgcaggcactgatcgatcaccatgaagtgcttgctgttgtgacacagccggataaacaaagaggtagaggaaagaagatgcagtttcctccagtcaaagaaaaagcagtggaatatgatatcccagtatatcagccacagagagccagagatgaggaattcattgaagagttaaaaaacctcaacccagatgtgatcgttgttgttgcttatggacagatcttaccagaaagtatcttaaatattccaaagtatggatgtatcaatgttcatggatcactccttccaaaatacagaggagcagcaccgatccagtgggcagtccttgatggagaagaaaagacaggaatcacaaccatgtatatggaaaaaggattagataccggagatatgatcgataaagcagaagttgttttagataagaaagaaacagctggttctctgcatgataaattgatggtattaggagcagatttattattagaaacattaaagaaattagaagatggaacagccgtcagagaaaaacaaaatgacgaagaaagctgttatgccaaaatgctaagtaaagatatggggcagattgatttcacaaaatcagcaagagaaatcgaatgtctgatccgtggaatgaatccatggccaagtgcttatacatccttagatggaaagacaatgaaagtttgggaagcagatgtgcttgatgcacagagtaaagaagaaccaggaacgatcgtagaagtcaacaaaaaagagatcatcgtagcaacaggaagcaatgatcttgcacttcatgagattcagctggcaggaaagaaacgtatgcaggtacaggcatttttacttggatatcaggtagaagccggaacaaaattaggagaatgatacgatgcaaaatccgagagaatgtgcattggatgtactgatcaaagtagataaaaaagaagaattatcacacatcgcaatttcaaatgtattagaaaaataccagttttctgaaaaaagagatcgcgcattttttacaagactggtggaaggaactttagagcgtcagatcacgatcgactatgttgcagatcagttctcaaagacgaaaatcagaaaatgtaaaccactgatccgtgcattgcttcgtatgggaatctatcagattctttatatggatcaggttccagattctgctgcatgtaatgaggcagtgaaacttgcaaagaaacgaggattttcccgattatcaggttttgtgaacggtgtacttcgtaatatttcaaggaagaaagatgagatccaatatccatcaagagagaagaatcttgagacatatttatcagttgcttattctattccagaatggatcataaaattctttcagaagacatatgataacgaaacagtagagaagatcatagcttcttatctggaagagagaaaaacaacattatgttgtctgatctccaagggtgggaaagaagctgtcagaaaagaactggaagcagaaggcgttacagtagaagatgggagtttgatcgaaaatgcagtgcagatctcagattatgattttttgtatcgtttgaaagcatttcgtgaaggaagttgttatgtacaggatgaaagttctatgttgtgtgccaaacttgccagtgtccagaaagagcagtttgtgatggatctttgcagtgcaccaggtggtaaatccttatatgttgcagatcagctgaagggaagcgggcgagtgttatcaagggatcttacggaatacaagacagatctgatcgaagataatattgatcgtgttggatttacgaatatggaatccgaagtatttgatgcgagagtgttggatgaagaacatattgaggctgcggatgttgtaatcgcagatgtaccatgttcaggacttggaatcatgggaaagaaaaatgatattaaataccacatttcagaagaaggcatgaaggatcttgtgaagttgcagcgagagattcttgcaaatgcagtgcaatatgtcaagcatggaggtacattgatctatagtacctgcacgatcaatccagcagagaatgaagaaaatttccgatggattcttgatcacttcgattttgaagcagttgatattacaaaagaactgccaaaggatctaaagattgaaactgcccaagaaggatttattcagttgttgccaggaatacatccatgtgatggattctttattggtaaattaaggagaaaataaagttatggatttaaaatcaatgacacttcaggagatgcaggaatatatggaatccattggtgagaagaaattccgtgcaaaacagatttatgaatggtttcacaaacatcttgctctgtctcttgatgagatgaataatgtaccaaaaaaattaaaagaaaagatcgaacagacgcaggagatttatggtgtaaaacctgtagactgctttatttcaaaaatcgatggtacaagaaaatacttatttgagttatatgatgggaatattatcgaaagtgttttgatgaagtataaacatggaaattctgtctgcatttcatctcaggcagggtgccgtatgggatgtaagttttgtgcatctacgcttggaggattagatcgtaatctgacgccatctgaaatgctttcacagatttattatattcaaagagatacagaagaaagagtatccaatgttgtcatgatgggaacaggggaaccgatggataattatgataacgtattgagatttttagaactgatcacatcagaggatggattaaatatcagtcagagaaatattacgatctcaacgtgcggaatcgtgccaaagatcaaagaacttgctcagaaacatttacagatcacattggccatttctcttcactcaccaaatgatgagatgagaagaggactgatgccgatcgcaatgaaatattcaatcgatgagctgctagatgcatgtcattattattttaaagagacaaaccgtaggatgacatttgaatacagccttgtggcaggggttaatgaccagccagttcatgcagaagaattagcaggcagattgaaagggtttccatgtcatgtaaacctgattccagttaatccgatcaaagagcgtgattttaagcaatctatgccgaaatccgttatggaatttaaaaagatacttgaaaaaaatcgtgtaaatgttaccataagaagagaaatgggcgcagatatcaatgcggcctgtggacagcttagaagaaaaaaactgcagtcaagattgtaaaggagaacgatatgcgatccgtaggggcttcacatataggcaaggtaaggacagagaatcaagataggattttctttcatgaccagcctgttggaaacttaaaaaatctttatatcgtggcagatggaatgggaggacaccgtgccggtgggcatgcctcctcttttgcagtggaacgatttgtacagctgatcgaggaatcgaaacagaccgatccgatcgaattaatgaaatcatccattgcgtctgtgaatcaggaaatgatcgcagaaagccagagtaatgaagaatataggggaatgggaacaacattcgttgcagcaaccatctctgatggcaaagtaacggttatgaatattggtgatagtagattatattatggaaatcaagaattaacacagattacagtggatcattcttatgtggaagaactgattcatgcaggaatcatggaaagagaggaaggaagattccatccaaagaagaatgtcatcacaagagcactaggtaccgtaatggcgacaccagatttctttgagtttgatgccaaagatggatatttgcttttgtgcagtgatggactttccaatatgatatccgacgaagaattgaaggaacttcttcttgagcacagtcagattgccaataaggtcaaccagatgatcacccgtgcgaacgagtacggaggaaaagacaatatttcattggtaattgtggatttaaagagatgaggtgaatgatagatgttagagattggcacgatgctgtcaggccgttatgaagtgctaaagcgcgttggaagcggtggaatggcagacgtttatatggcgaaagatcataaattaaaccggaacgtcgcagtgaaggttttaaaaagtgaatacgtagaagatgagaaatttttaaagaaattcgagacagaggcacaggcagttgcaaggctgtctcatcctaatatcgtgaatgtatacgatgttggaattgaagatgggatcaattatattgttatggagcttgcagaagggatgactctgaaagaatatatccgaagaaaagggtatttatctccgaaggagacggtagagatttccctgcagatcgcgtcagcgatctcacatgcccataagaatcatattattcatagagatattaaaccacagaatattttagtttcagagattggaaatgtaaaggtcacagactttggaattgcgaaggcaacaagcagcaataccgttacatcaacagcaacagcgatgggatctgtgcattacatttctccagaacaagcaaaaggaagattctgtgatgaaaaaagtgatatttattctttaggtatcacgatgtatgagatggtaacaggacatgtgccatttgatcatgaaaatggtgtaacgatcgcattgatgcatctgcagaatgagatcacaccgccaagtcaggtcagagatggaattccagacagtttagagaagatcattttaaaatgtacaatgaagaagccagaagaccgctatcagacagcagatgaattgatcgcagatctgaaactcgtgtttgaagatacttctggtgaatatgtgggaattgttccaacgatcgatgattctccaacgatcatgatcgatcagaacgaactgacacagagaatccagacaaatgatgacacacagcctgtggaagattcagatagcaatgcatatctggaagaggatgatgaggaagaagaaacaggaatgaactcaaagatcgagaaacttgtcattgttcttgcagcagtggtaggtgcgatcattttgatttctattgtcgtatttgttgtcaaaagttctggattattcaaatcaggaaaatcaacaacacaaagtacgatcgcagcaacaacagaagccaaacatcacaatactacagaaaaatacacagttgataattatatcggattgtctttagaagcagctagagaggcgattgataacaagttcaagatcaacgtgacagaagaatattccgatacgtatgcaaaaggactggtcatgcagcaagatccagaaagcgatacggaattagaagaaggaaaaacgatcaagttagttgtgagcaaaggacagaagatcgaagataaagtttcagtacctgatgtgcgaagtaagacgaagtctggtgcacagagtgaattaaaagcagcaggactcaaagtctcaataaaagaagcttacagtgatgatgttgcgaaaggagaagttatctctcagactccatcacatggaagtaaagtttcgaaaaatacaactgttgtgatcacagtcagcaaaggcaagaaggaagatcagacggtcagcgttccaaatcttcgttattacacggaatctgaagcaagtcaggaactgcaaagattcggattatcattgggaagtgttttaacagaatatagtgacagtgtggaaaaaggacttgtcattcgtcagaggatcagttctggaagcaaggttaagaagggaacagccgttgggatctatgtcagtcttggacctcgtcagacagcgacaacagcggatgaagaatcaacaacaacagatgaagaataaaggaaaagcaggtgcaggagatatttcatgcaaggaaagatcataaaaggaatcgcaggattttattacgtacagacagaagataaattatatgaatgtaaggcaaaaggaatcttccgaaacaagaagatgaaaccgttagtcggagacaatgtagaaatcgatattttagatgaggcagagcaggaaggaaatattacaaagatctatgagagacataacgagctgatccgtccagctgtgtcaaatgtagatcaggcactgatcatatttgcagcaaagaatccaaagccaaattataatctgttagatcgttttctgatgatgatggagaaacaggatgttcctgtgatcgtctgctttaacaaggtagatcttgcaaaagaaaaagaactgaaattattagagaaagtctacgaaaactgtggacatatcgttcgttttatcagcgttaaggaagaagaaggaattgatgagatcagggaactgatccacggtaagacgacggttcttgctggaccatcgggggtcggaaaatcatctttgatgaaccttctgcagccagaggcacagatggaaacaggggaagtcagtgagaagatcaagcgagggcgtcatacaacaagacattcagagctgatacgtatcgagaaagatacgtatgtcctagacaccccagggtttagttctttattcattcatatgtttgaagaagatgagatcaaagactattttcaggaattcgcaccatatgaagatgaatgccgattccagggatgcagtcatacacatgaaccagactgtggagtgaaaaaggcattggaagaaggaaagatctcaaagatccgttatgataattatgtaaatatttatacagaactaaaagaaaagagaaaatggtaatgcgagtattgattttaacaggcggaacagtcgaagaaaatttcgcgaaagactatatcagtaaatggaacccagatcaggttattacagctgataaaggactgctttatgctaagagactgaatataaaaccagatattattttaggtgattttgacagttgcagtaaggatataatgcaagaattttcaacagacaagaagattatcgtaccatgtgaaaaagacgatactgatacaggacttgcaatacaaaaagcaattgagacaggtgcagatgaaatccttatgataggtggaactggaacaagactcgatcatgttatgggcaatttcggacagttgttttacgcacacagcaaaggtgtgaaggcagaacttgttgatgcaaacaatcgtatcagggttttaaatcatgaagatacaatatcaaagaaagaccagtttggtaaatatgtatccttgataccaatatatgaggcacgaggtgtcacactaacaggatttaaatatccattaaaagaccatacattagtgtttgagcaatcgctcgcgatcagtaatgaattagaagcagaagaaggaatcatttcatttagtgaaggaaaactgcttctgatagaaagtagagattgaggttatacaagatgaagaaagaaaaagtaacaacaaacaaagtaacaagtaagcttgaaaaggttctctgggctgttatgatcctgatgtttatcgtatcattgatcggaatgtttttaggacaatatatggatggtaacgtattctataaaatgtgtgtgatcatgacagtattagctgccgccattttatcagcagaacgtttttattttggaaaagaaatgggaagagatatgccagaagcatttaagatcggttactggctgatcatcgcatgggcagtgatcttactgatccacgcagcaggactggcatttttaccatttttaatggaacttgaatacagagtattatgggtagtggttccaacggtcagcttattatggatgacaagatatatcttcggagacaacctagactgggataagacagacaagaagggttggaaagaaggaagaatgaactactctcagaagagcaataagaagaatatcgggagatagaacatgaattacaaacaggcaaagatcgctgattcagcaaaagtagcaaaagaaactgttttagttgggaatattactataggagaagaatctacggtactgttctttacagcaatgcgctgtgaaggagaagagtctattgtgatcggaaatcagagtaatatacaggaaaattgtacgatccatgtagatgaagggaatagtgtaaaaatcggcgatggagtgacagttggacataacagcgtgatccatggatgccagatcggagataattccatgatcgggatgggatctgttgttatgaatggagcaaagatcggtaatcactgcttgatcggggcaggaagtcttgtaacacaaaatacagtgatcccagatagatctttagttatgggaagtccagcaagagtcaaacgtacattgacagaggacgagatcaaatatcttgagggaagcagagaagaatatgtagaagtaggaaagctgcttcgagaagatgggatactttaagaatcagttagaaatggaaggtatggaatgaaacctggaataaaagatgtggcaaaagtagcgggagtttctcccacaacagtatccagggtattaaataaccgaggatacatcagcgaagaaacaagaaaaaaagtatatgatgctatggaagagatcaattattatccaaatgagattgccagagcgttgttaaataacagaacgtattttgtcggggttatcgttcctactgtaacatcaccatttcatggagaagttgtagaacagatagaatattatttatcacagaaaaattataagatgcttctgtgtaacagcaaaaatcagatggatacagagaaagcctatattgatatgctaagacgcaatcaggtagatggaatgatcgttggaacacataacgcagtcgtagagacatactccaagttaaagatgccagtcgtaggaattgaccgttatcttggagaacatattccagtcgtttcatgtgataactatgcagcagggcagatggcaactagacatttgatcgataaaggatgtcagcacattttatgtatccgaggaaacagtaaattaaagatgccaggtaacaatcgaagtcaggcttatattcaagagatggagaaagtagggcttcctcagatgattttagaagtaccgttcatcatggagaatgtggagaagcaaaaacttatttatgatatgttaaatgcacaccctgagattgacggtatttttgcaggagatgattcgcttgcagtgatcgcacttcatgtcgcaaggcaaaaaggaatcaatattccgaaagatctaaagatcatcggagtagatggaacaaagcagattttaggatttgttccagaactgacaacgatccagcagccagttaaacagattgcaaaggtagcggtggataagctgatcgatctgatcgaaggaaaaacagcagaaagctgcatggatcttccagtaaaattactggaaggacagacaacataacggagaataaaaaaggaagagaaaatactactcttcctttttttgatgcctaaaaatatgttagaacgtacaaaataaaatgagttttgtgcaaaactaccaaaaatcttcctaatattttatgcaaaaataaatgtggtaacgattgacatatgaaaacgtttgacatataataaagccatagaaagcaacaaggtaaatcaaagaaaggattaaattatgtatcagttatattatcagccagaaggtatttgggtaggagatattatgccttatggaaaagaaggtcagttttatgtatatcatcagagagatacaagaaatccaggaccttttggagaaccattcggttgggcattagcaacaacaaaagattttgtagattacaaagactatggagaaagcttaatgcgtggaacggatgaagaagcagatcagtttatctatgcaggaagtgtttttgaaacagaggcaggatttcatgcattttatacaggatataatagagaattcttaaaggcaggaaagacatcacagacattgcttcatgctacaagcaaagatgggattacatgggagaaatcgaaagaagcattagagattcctccacaggaaggatatgataagagaaactggagagatccatttgtcctatgggatgaggaaagagaagaatatctgttgatccttggagcaagaaagggagaagataagagaaaacagacaggacgtctcgtacatttcacatcaaaagatttaaagaaatgggaatttaaaggagatttctgggcaccaggaatctacacaatgtttgagatgccagagatctttaagatgggagactggtggtatcttgtattctcagaatacagtgagggtaataaaatccattacagaagaagcaagaacctatacgggccttgggaagcaccatttgatgatgcatttgacggtagagcatactatgcaggacgtacagcatttgatggagaacgaagagtactttttggatgggtgccaacaagaatcgataacgatgacaagaacgcatacttgtggggaggaactttcgtgccacacgaagtattccagaaagaagatggaacacttggggtaaaaccggtagaccagatgatggaagcattcgatggttggaaagatttatttaacccttgtatgaaaacgattgacacaaaagaagaaacacttctttgtgaagatacaggaagcatcgcagcattcaaaacaactgtaaaatttgaagaaggaacgaaagaattttctatcagattttacaaagatgaagaaacagaagtttcatatgaatacagattctttgtggaagaaaataaagttgtctttaacaaatgtccaaattatccatggtatcagtgctttaacattggacttgagcgtccgatcaaattggaagcagacaaagaatatgaaatctgtctgatcatagaccaggatatttcaacattatatattaatggaacggcattaaatgcaagattatgtgatcatccaggaaatggattggcactgacagtgacagatggtacactagaagcgaaaaacacaaaaatagcaacaaaaataaacaaataaaaagagagaaataaaggagacaagtatagatggattacaaaaaaatatcacaagatgtggtagatcacgttggtgggatcagtaacatcaaaggtgcgacacattgtgtgacaagacttcgactgattttaaatgatgaaacaaaatatgaccgtaaagcattagagaatatcgaaggtgttaaaggtgtcttatttaatagtgggcagctgatgatcattttcggaacaggaacagttaacaatgtctatgatgcatttattgaattaacaggtgtcaaagaaatgtctcagtctgatgccaaggcagaaggaatgagcaagatgggaaaattacagcagggattcaaagtattctctgatatatttattccgatcattccagcatttgttgcagcagcgatcctgactggtgtcaaagcattattgacagccaatggattatttggattagagggatccttagcagatcagagcaaacttgttgcagatattgcagaattcttagcgatcatggcaacaacatttaattatctgccaatccttgtaatgtatagtgccgtcaaacgattcggtgggaatccgatccttggtatcttagtcggaatcgttatggtacatccagatcttgtaaatcgtaatacattcgtattagatccatctgcagcaagctactggcatttcggaccattagcaattgcaaaggttgcattccaaggaggagtcttcccagcaatcttaacagcatggtttatgtctaaagtagaaaaaatcgcacagaaatatgtaccagctgtggtatcatttgtattcgtaccaacaattactattttctttgcaaacgtagcattatttacagtatttggaccagttggaaatatgatcggtaacggattagcagcagtgatcgatattttatacaacagtttcggagcatttggagcatttgtctttgcagcattattacagccattagtagttacaggaacacatcaggcaattcagggaattgaagcaaacttgatcgcaactacaggatttaactacattcagggaatctggtctgtatcgatcatcgcacagggtggtggagcgatcggaatgtacttgttagcaaagaaacactctaaagacagagatatcgcaatgtcaagtttcattccaacattagtaggaatctcagaaccagctatctttgctgcaaacttaaaatattccgtgatcccatttgtatgcgcctgcctaggagctggatgtggtggagcattcatgaaacttgcaggagtaagagccattggacagggtctaacaggagtattaggacttctgatcgtagtacctaataaattagtattctatatcattggaaacctgatcgcatttatcgtaccaatcgtgctgatcgtcatttataataaaacaaaaggtgttccacatggtgaagaagaggaagaagaggaagaagctgaatctgcactaacaattgatgaaacagcgaaggtaccagtcaaagcagttgttgatggaaaagtaattgcgattgaagatgtaaaagatggaatcttctctgaaaaagtattaggagacggagtggggatcatcccaacaagtgaaacagtattagcaccggcagaaggtgaaatctgtacagtgatggaaggttcaaaacatgccatcggtgtccgaacaacaaacaatagtgtatttctgatccatgtaggaatcgaaacagtatccatgaatggggaaggatttgaataccttgtaaagaaaggacaacacgttaaggaaggtcagccaattctcaaatttgacaaagcaaagattgtagcaaaaggattaaatccagtcgtcgtgtttgtcaaaacggatgaaggtaaccagacacctgtagcatttaagacaggaatcaatgtcaaagcaggaaaagacgtgatcggggaataatatgaaatttttagatgtagaaaaatatacaccgatccaaaaaaaacatgaagcatatttaaaggagcttgtggagtattgtaaagatactccacggcatccatcctatcatattcatcccccatgtggattagtgaacgatccaaatggtctggcttattttggaggaaaataccatgtgttttatcagtggtttccatttggaccagaacacggaatgaaacactgggcacatgtgatctcagaagatctcataaaatgggaatggtctgatcagatgctcattccagatcaggaatatgagaaaaatggatgttattcaggaaattccatagaagcagatggtaagctttatctttattacacagcaaactataagacagaacaaggaaagatcccaaaacaggcaatggcagttatgaacagcgatggtacaattcttaaatctccaaacaatccgatcatcgatgaacagccagaaggactgatcggagagatcagagacccatttgtctttgaaaaagaaggagcatactggatgcttttaggtggtggaagcaccgatgggcaggcaagactgattttgtataagagcacagatcttgaaaactgggtatatcagggaaatattgaactgacaggaattgacctggagcttggttatatgtatgaatgtccatcttatattgaaatagatggaaaagatgttttattcttatcattaatgggacgtacaccaatgggagaacgttttcacaatgagttttccagtgtatattttgtcggtgagttaagtctggaagataaaacatttcatgtggaatcatttgatgagatcgacaaaggatttgatttttatgcaccacaggcattctatggaaaagacaaacaaccaatgatgtttgcgtggcttgggtgtggggcacaggaactcccatatgcaaaagaagatatgtggatccatagtctgacaatgtcaaggttcttaacgatcaaagaaggaaagttatgccaggaagtgccagaaaatattaagaatgaatatgcacatcttgatatagacagtaaaagaattaaaccagaagaagatacatggtatatcaatctgacagataaacagatctcagaaattcagatcggagatcaagaagatcatctaagtattaagattgactgggcagcaggacatatagttgcagaccgaagtacgcttaagcatcagtttagtacagaatacggaattcaaagagaagtttcaatgtcagaagaactcaaaaacattgagatatattatgataatacatttattgaaatttatctaaatgatggaaaagatacaatgacccttcgtgcatttccagaaaatgtggaaattaatttaatttagaaaagatatggtggagaaatctgccatatttttttgttgatatataacagataaagtcgagcaattcttgaaaacactaagattatatgataccatttccataagataaaaacgaatcagtaagaaagcagggcctatgaaatacgagaaatgtccaatctgtgaagaaaagttaagaaatggtgtctgcccaatgtgtggttatgattttaatcgcttagatcggtcaagaatattaaaagatggccattgggatatattaacgactgacaaaaagacttctcagccaaaatatattcatgatgaaaaacgacatccagattttaaaaatatcaagaatacaaagacgcagtcaatgaagacacagaggaaaatatcaacctataaaaataaaaaagaaaagaagagatcaaaaaaaggaaagtgggcggtgattgtctttattctttatctgttgtcatttttagcagatcttgtaccagaggcattcactcacatagaagattttataaatcagatcctgaatggattaaatttttaaaaaaagtaagcaaaagtctgtcatttttaagaaaaaacggcagacttttgttcatttttatattttaaaaagataaaaattatggtaacattaactctataggcaatttaacaggaggaagacttatggcaaatcatattgatgatgcaacgattgaatatgtcggaattttagcaaagcttgaattatctggcgaagaaaaagaacaggccaagaaagatatggaaagcatgctcgactatgtagataaattaaacgaactagatacaagcagtgtagaaccaatgtctcacgtatttccagtgaagaatgtattcagagaagacgtggtaacgaatggagacggaagcgaagacacattaaagaacgcaccagaagcgcaggacaacgcctttgtcgtgccaaagacgatcatataggaggcagaagatgagcattttagaattaactgccgtagaattaggcaagaagatcaaagacaaagagatcacagttgtagaagcaacaaaggcagcacttgaacagatcaaggcagtcgaaagtgatgtacatggatatgtctcttacgatgaagaaagtgcattaaagagagccgaagaagtacagaaaggaatcgatgacgggacttacacaggaccattagctggagttccaatggcaattaaggataatatctgtacaaagggatatacaacaacatgcagttctaagatcttagagaactttgtaccaacatactccgcacaggcagttgagaacctgatcaaagaaggagttgtatttttaggaaagacaaacatggatgagttcgccatgggaagtacaacagagacttctgcatatggtgtgacaaagaacccatgggatttagataaagtaccaggtggatcatcaggtggttcagcagcagctgttgcagctaacgaatgtttcatggcgttaggatctgataccggtggatctatcagacagccagcatcttactgtggtgttacagggatcaaaccaacctatggaacagtatcccgttacggactgatcgcttatggatcatccttggatcagatcggaccattagcaaaagatgtgacagactgtgcaacattattagaagcgatcgcatctcacgacgagaaagattctacatctgtcagattagaatcttatgattttacatcagcattaaaagacgatgtcaaaggaatgaagatcggtattccaaaggattactttggagaaggtcttgatgaagaagtcaaagaagctgttttagcagcagcaaaaacattagaagaaaagggagcaatcgtagaagaattcgaccttggattagttgaatatgcaattccagcatattatgttatcgcagcagcagaagcaagttctaacttatctcgttttgatggagtcaaatacggatacagagccaaagactacgaaggacttcacaacatgtacaagaagactcgttccgaaggatttggagccgaagtgaaacgtcgtattatgttaggatcattcgtattaagttcaggatattacgatgcatactacttaaaagcattaagaacaaaagcactgatcaagaaagaatttgacaaagcatttgagaaatacgatgtgatcttaggaccagtcgcaccaacaacagctccaaaattaggagacagcttaagtgatccgatcaagatgtatttaggagatatctatacgatctctgtcaaccttgcaggacttccaggaatctctcttccatgtggtaaggataagaatggaatgccgatcggacttcagctgatcggagactgcttcaatgagaagaagatcattcaggcagcatatacatttgagcagacaagagcatatgaagctccagcaattgctaaaggaggggctaaatagatgagcaagaattacgaaacagtcatcggacttgaagtccatgtagaattagcaacaaagacaaagatcttctgtggatgcagcacagcattcggaggagcaccaaatacacacacatgtcctgtatgcacaggtatgccaggatcattaccagtgttaaataaacaggtggtagaatatgcgatggcagttggacttgcaacaaactgtgatatcacacagaactgtaaattcgaccgtaagaactatttttatccagataatccacagaactatcagatctctcagttatatttaccaatctgtcgaaatggtaaagtagagatcgatgtagatggagagaagaaagatatcagaatccatgagatccatatggaagaagatgcaggaaaattagtgcatgatccatggacaggagattctttagtagactttaaccgttctggagtgccattgatcgagatcgtatcagaaccagatatgcgttctgcagatgaggttatcgcatatcttgagaagttacgtctgatcattcagtacttaggagcatcagattgtaaattacaggaaggttccatgagagctgacgtgaacttatctgtccgtgaagtgggagcggaagaatttggaacacgtacagagatgaagaacttaaactctttcaaagctatcaagagagccattgaaggagagatggaacgtcagatcgacctgatcgaagcaggtgagaaagtcgtacaggaaacaagacgttgggatgacacgaaaggagcatcttatgcaatgcgttccaaagaagacgcacaggattatcgttatttcccagatccagacttagtaccgattgagatcagcgatgaatggatggacaaagtaagagatgcccagccagagttcagagatgagaagaaagtccgttataaagaagaatacgatcttccagattatgatatcgacataatcacaggatcaaaacaccttgcagatatcttcgaagcaacgatcgcacttggatcagagccaaaagaagtctctaactggttaatgggagagacgatccgtctggtcaatgaatcagagatggatatcgatgatgtatcatttaagccagaacatcttgcgaaactgatcgagatgattaagaacaatgagatcaaccgaagcgtaggaaaagaagtcttcgagaaagtattcaaagaagatattgatcctgcagcatacgtagaagaacatggattaaaatccatgaatgatgaaggagcattaaaagcaacgatcgaagagatcgtagcaaacaatccaaaatctgtcgaagactacaaagctggtaagaagaaagctatcggatttttagtaggacagacaatgaaagcaacacagggaaaagcaaaccctggaatcgttaataagatcttaaccgagattttagataatatgtaaccatagcattccaagaggtcttaaagtccttgagaattgcatagtagtgaaaaagatacttttatcaagagaagatagaagtgtctttttctgatttatgaatctttaaaaaaaaataaaaaaaagggaaccaaacggcaagtaaatccatcgaatatgtgaatcaataaaagagggaaaaaagaaaagagaggaggtaagaatgaagaaagagacattttgtcggtatatcagacagtatgaaacagatatgtttcgatttgcaaaaagtatcgtgggaacccaggcagatggagaagatgcgatgcaggaaagcatcttaaaggcttatgaaaatattgatacattacgttcaagaagaaaattcaaagcatggatctttcagatcctggcaaatgaatgttatcagatcttaagaaacaggaagagacaggaaccaacagatccgtttgaatttccagaacaggaacattccagtgattactggacagaagatatggtatcagaggatggagaaattttaagttatattttaagaatgccaaaacagcatcaggaagtattgatcttatattattatgatgaattttccacaaaagaaatcgccaaaatcttagatataccgcaaggaaccgtaaaatcaagacttgccagaggaagaaaacaattaaaggatttattagagatggaaggagaaggtgcatatgaaggagcatgagttaagaaaaaggatcaagagagaaaaaatacaggaacagatgccagaatcaaccagaaaaaggatggatgatctgttagatggattgccggaagaaacaaaaagaagtaaaattcatagaatctggaaaaatgccgtggtatttgtggctgtattatctttatcaacagtgacagtgtttgcaggtgtgaaattgatcacattaggaacaggaaaattggacacaaaacatggaagcaggcaatatcaaaggtctgtgaaactaaacgagattcaaaaaaataatgcaaaggcaggaataagcagaacagatcagggaattacattaagaattgacaatgtcggtctggatgaaggtaatttattattgtattatacagtgtcattaaataaaacaacgacagccgaaaagcttgaaaaagttaaaaaagatagtttacaagagcgctggaaccttaacagtatatggcttggaccacagatttccattgatggaaaagcaaatgatgaagtaaatgaaacgggagtaacggaagcttacaggatcaacaaccataagattaaaggagtttatcgttttaatcttactggaaaattaaaaaagaaagtaaaactggatattaaaaccaactatttatgggataccaaaggtgactggtttatgcagcttgcggttgatcgaagcaaggtcgcaaagaagacaaaagtgatcacacgatctaagaaatcaatcgtagacagagttattatatctccattaggaaataccttgcgaagcaatgacaaaaaacatgatcttgtgatcagagataataaaggaagatatctctactatgaagaaaaaactaattcagaaaaaagcaaagatatctatcagtttttcaaacatacacacacaagatcactggaaatcattccagttaaaaaacaatctgtggtaacaaagaatggaaaagtacagaaagcagtattaaatctgaagaaaaatgagattgtcaaagtcagtgatcataccaaattaaaagtggcagatgtaaaaaaacaaaaacacaatctgagaatttactttaaagttctagattatgacggagcaatcttaacagacggactagagggcagatttatcgtagataacaaggaaagatccctgatcaaagatggtggaagtattgacacatggacagattatgaaaaagaacagctggtacttgaattttacaatgcattcaaaggcgttgattatacgaaagcagcgaagattaatttcttaaaacagaaagcagttctcaatgaaaaacagaaacagaaaatagaaataaagtaaatatattaagtgagtataaaataaaaataccagatttcgattcataggaatctggtatttttgttggtaaaatcttgaaattaaaagctgtagaaagtaaaataaagtgtgtattatatatagagaaaataagaaatgaataaaatgggagaaagcaaaattatgaaaaagtacaaaggtgtcgtattttttgactatgatggaacaacagttgatgaagtagatgagattaaaacagcaacaccaacaactgtagaatcattgaataaattaaaagaaaatggatatctgacaatgttatgctcaggaagaacacagcgatttttagagatggatattgataaatttatgggagcgatcacatgtaatggttcacatacagaagttgagggagaagtgatcagagacatctgtattccagatgaattggtatttcaggtagtcaacgaatacttcccaagagatacgatcattcattttgagacaagagatatcagttattatctacatatggatgaagagtttttcaaaaatcactgcaaactttttaatctgccacaacgatggtatgcgccatggaaattccgcacaaaaaacactcacatcagcaaacttgttatgaattacaaggatattcaggtgaagaaggattttgaagaagagtttaaagatgtatttacttgcgctaaacatgttcgcgaaaattttattgatatcacattaaaaggtgtaacaaaaggagatgcgatcacagaactgatcgagaaacttggaattgacaagaaagacacatatgcatttggagatgcagataacgatgtagaaatgatgcaggcagttggaacaggaatcgcgatgggacgtcatagtgagaaagtaggagaagtcgcatctatggtaacaggaactgtcaaagaagaaggaattacaatggcacttaagaagttaggattgatttaagatgaagaatgttatatttgatgttgatgatacattgtatgatttaatggaaccatttcaaaaagcccacaaagaactgatggcagcccgcacagatgcagactgtgaggaattatttgaagcatcaagaacttacagtgatgaagcattctgtatgtcaagagaaggaaaaatctctgaagacgaagaatttgcatatcgtgtccagaaaacatatgcagatgttggagtagaagtcagcaaagaagaggcaaaacaattcgaagaacgataccgttattaccaaaagcatattcaggtaccagaaattacaaaacagatccttgatcattgcaaagaaaattacagaattggaattttaacgaatggaacaacaaagaatcagggaaagaaattagagacattaggattagaccactggttcaaccttaaaacaatgttcatctcagacagcatcggagctgcaaaaccagatgttaaagcattccatactgttcaaaaagaaatgaagattgatcctgaggaaacatggtttatcggagacacctttgaaatagatgtcgtaggagccaagaattctggctggcatgtcatctggttcaaccacagaaaccgcccaatgccagaaggagatatcgttccggacgtagaagtaacaagtagacaggaattatttgaatatataaaaaaattataatttaacaccgtctaacatacacacatgtggtggtttgaatagctgtccatgtatatgagaaaaacgaaataataggataaaagatttagaacttttatcctattatttcgtttttttatatgcattgaacaacgcattcaaattacaacttggttacattagatgcctgttttccgcgaggtccttcttcaatctcaaaactaacactctgtccttcttccaaagtcttaaatccttttccctgaattgcagaaaaatgaacaaatacatcatctccggattcctgtgaaataaatccataacctttttctgcgttaaaccattttactgtaccattactcatctgggtacctctactttcttaaataaaaaatacatgtaactgttaatgacaggtgtttcaataaaaatctttataaaaaagaaaaagtccacgaaccgttacttgctttatgcattcatagaaataaatgaatgcatccgtatcggtcgtgaacattaaaatctatcaataacaagattaatcatagcacaacaacttaacgattacaaatacttttttaaatcctgaatacttttttcgtggagagaaataagtttgtcaccgaaatgttttgcttctttggaggcatcacagtaaagatgatttttctggattgctttgatcattcccatcgtatatccctgaatacacatttcagaaagatgactgacatttttatcagacatagcctttaatttggtcatccattcagaatatgttttcaaaagatcatttaattcttctgtagaatcaccattggaagtgatcgtatcttttatagaatctgataaattttgatattcttcttcctggctgatgatcaaagccttaaaatcacagtctgtcgtgatctttcgaatctcaggaatggtttctaaaaccattgcaatgttctgataaatactgtttaataaattttcattatccataattgtaaaactccttttgttcataggatgttccatataacagtttctatacataaaagtggaaatatgataaaatggcagacataaaatgaaatctacatacatcgattttatggtgaaaagaaataataagcaggagaaaaagatgagcaaagaaaattttgagaagcagatccgaaaaagaatggagcagttagatgagatcaataaacatggaatatttaaagaattaaaaggaactgtcacagattttaactatgataccaaaagtttaaccatgacgttcgaggccacaaagtttcatgaaaatgcatttggaatcatgtttggaggttctctggcagggatgtttgatattgcatttggaacattgactgctggattgggcgattatagtgtagccccaacggtgcagctttctacaacatttttaaaaggaataccaacaggagcaaccgtaagaacagaggtagaagcagtgtccacaggaaaaacgatcatgaattttgttggaaaagcctatgtaggagaagaactcgtcggaagcgccagcgggacatttatgacaccgcggccatttaagaaatttaatacagaaaaataaagaaaaaggatattgatcgtgacgccaatatcctttttatatcataggaaattccaagggaatccacttgataaagttattttataaagcaacttgttcaatctcttttacagcatcaaggatcatatcaggagttacttcataaggccatacacgtacatcaattccggataaagcctttgtgatcacagcatccatatcatcaatcgtcgcatgaatatccgcaagtttcacaggaaatcccatattcttggagaattcatagattttcttaaattcctcttcctgatgatcaacttttaataagatcaggatacaataagcaacgatctcgccatggagatgtccatgttcttcggtagatttacatacagtaaatccgttatagcaggcatgtgcaagtccagtatttaaatcaattccgacaagatttgatacaaaaccagtagaaacgataattccaagaatgacttcttccagagcttttccaggagtatgatttcgacattcttctaaggcttctacaccgtattttactaatggtttggcacaaagattactgatctggacgcccatggaagtgctatggtctagatcattatcaccacgggcactggttgtacattcataaaatttagccattgtatcaccaattccagcccataggtacttttcaggagcattggcgatcacttgtgtattgataaagatccattcagaaggtttctcctggaaagaatattcacgaagtgaaccatctggatgatagatgataccaagtgatgtacaagaagcacaagtagaagcaatcgttggaaatgtaaagaatggtcggttgctttcctgtgacaatactttacaagtatcaatcgcttttccgccaccacatgcaaagatcatatcagcatcaataacttcttgatgagaatttaattcatctatgtgttcacgactggcttcaccaccgtattcaaagacaccggtgatcatgatattgctgtcagcaacagcttctttgatcaaatcggcagcggcagccaaggcatgtgttcctccgatgatcacagcttttgttccgtatttttcacataccatagggatgtcggcatatgcgtcggttccaatggagtaatttgggtagtattttctcataagtcatataactccttccgttttgttaatttttttcattatactcttgaaagaatgttttgacaaatattatggaagtagtaaaatatatttgttccctaatcttaagttttctgcttttttcaaaagaaaaaaaacggaaagtctaaggtgacaggaaagataagaatagaacataaaggaaggtaatataaaatggcaaagattgatatcatatcaggatttttaggagcaggtaaaacaactctgattcagaaattattaaaagaagcattaaaaggagagaaagtcgtactgatcgagaatgaatttggcgagatcggtatcgatggaggatttcttaaggacgcagggattgaagtaacagagatgaattctggatgtatctgttgttctttagttggagatttcggaagtgcattaaaagaagtagtcacacagtacaacccagaccttatcatcattgaaccatcaggcgttggtaaattatcagatgttatcaaagctgtacaaggtgttgcggaagatgttgaactagacttaaacagctttgtgacagttgcagatgcaaagaaatgcaagatgtatatgaagaactttggtgaattctataacaatcaggtagaatatgcaggatctatcatcttaagccgtacaggagatgtagcagaagataaattaaatgaaagtgtagcactgcttcgtgaacataatgaaaaagctgcgatcatcacaacaccatgggatgagctttctggagaacagatcttaaaagttatggaagatggaaatgatatggtcaaagaattattagaagaagaggaaatctgccctgtgtgcggtggacaccatgatcacgaacatcatcacgaccatgatcacgaacatcaccatcacgatcatgatgaagaatgcagctgtggatgcggacatgatcacgaccatgatcatgaacatcatcatcatcacgatcatgatgaagaatgcagctgtggatgtggacatgaccatgatcaccaccaccatcatcatgcagatgaagtatttacaagctggggaaaagaaacacctaagaaatataataaggaagaattggatacgatcttacagaaattatccaaagatgacagctatggtatgatcttaagatccaaaggtattttacagacagaagatggatcatggattcagtttgatcttgttccaggagaatatgaaatccgtgaaggaagtgcggattacacaggaagaatctgtgtgatcggatcaaaattaaaagaagatgaattagaaggtttattcttctaaataacaggaggtgtttaactgttaaaataatcttataaaaaattataaatatgtgttgggttttataatttttattggtagaataaattataaatattataaggatttgtttatgagtaaatattattctatcaataaattttcaaaaatattaggtgtattggctcaaacattaaggaattgggataaaaagggtaaacttcatccacatcacacttccagtaatggatat

SEQ ID NO: 643 - DNA, 4087 bp, Unknown
  gut microbiota DNA sequence
agtcatttctgactgttatccccctgtacagggcaggttacccacgcgttactcacccgtccgccactcagtctacaaaacgtcaattccgaagaagatcagttaagcagcttcgttcgacttgcatgtgttaagcacgccgccagcgttcatcctgagccaggatcaaactctcatgttcaatgttgatccaagttcaagaagcactagcttctttatccttgttaattactgttctctataaagaacgttcgttgatttttactaaaatcatctgaaaaattcattagaattttcaaggttgtcttattgttcagttgtcaaagatctttttgtgatccgcttcttgtgtgcaagaagctttattattttatcacagttctttttgtttgtcaagaacttttttaatttattttgttgttctgagctcttctgctctgcaacaacttttatatcatatcatctatctccttgtctgtcaagaagttttttgatgatatttattatgtatcgttctgatcgttctccgtcagtaacttttacataatatcatattattttctccttgtcaagaacttatttcatctatgatatgttatattttgtcgtatttcagcgacgttgattatattatcatgaacacacgttgtatgtcaagctgtttttcacaaatatttctttgttcttttcataacatcttctaaaatctctatatcctttataatatctcctgtctctagtgaatgatctgctttcttatacatgtatattggtacattctgctcatttgaaagcatttttacatttgctgtattactccatagatcggaagttccaagaaatgcgattgcatctggatgttcaaatttatatgtttgctctaatggcgtatataagatctgcttgcaccgaatcttatgcttctgtgcatatgcagatgatataatagtacctacactttttgaaataaataatacgttttcatattttgaaaaatcaattgtttctaatagtttttctgcctgttgatataaaacatcaaatacctccttcattcttttctcatttcctcgaatatttttttcagtgtaagaatactctaatgagatgatttctttatattcttgctctttcgctaactttctagaataatataaaattggtttatcgcaatggtatcctattcctggaaatattactgctaatctttttcccattttttcctccggatcaatatattcttataaatacaacttattttcttttctccctgaacagctttttttcatttttttactcgcgatcaattccattactttattacaatgtcttgctttttgaggacaaactgctacacaatgcatacaggaaatacatttctctttatctgttacttttggatcatcttttgaaatcgctcctgctggacattcttttgcacaaattccacaggaagtacatttgccatttgcaacaggttttaaaggtacaccattatattctctataattgtgatttcctggtagttctaccttcatacactccatttttgtttctatttttttcatgatctgttctgaaaatctaatcaattctttctcatcctgttgatctggccgtccagttccaaactgatgcatcagagaatgttctgctactgcctcaactcctactacacaaacaaatcctgcattttctaaaatatcttgcatttcaactaatgtatcatcaatcgctctgtttccgaatacagcaaccaatattgcttttgtccctttcgcttgtaatttttgaaatttatcaactgtcacagatggaattctacctccataagaaggaactgcgattagacagatatcatcttccgaaaattctgtctgtagtattttatctggatctttgatcatatcaatctcttgtgcatcttttttcattgctttgatcataatgtctgctactttttttgttccacctgtaggactaaaataaatttcatataaactcatatatttttctcctattgctctcttttttatatacaaagttctccatctgcttaaatcttcagatggagaacttgcttgatgtcttatcctattgtcattatactctttctacatatttttgtaaattattattcttttgcagtactttctaatttcctgaacatccatgcttatcttctccacattgatgtcctccacaagaatgttcatgtgcatgatgagaacattgtacattaggattgaaatctagttttccctctaaatatgcattcacagcttcatcggcatctcctgatacgccaccatataatttaatttcagcttctgctaatgcaatttgtgctccaccaccgattccgccacagatcaatacatccacttcaccttgtgataagaaacctgataaggctccatgtccttgtccattcgtttcaacaatctgtgtagatgtaatcttaccatcttcaatatcataaagtttaaactgacttgtatgtccaaaatgctgataaatctttccatcttcgtatgttactgcaattctcattttcttaccttccttttttaaaatctttgattgtctgacggaatttgctgctctattgcagtgttttttacaaaaaggacatgtcgtgccatcgcaaaactgataatttcctcctgtgatcagaagcttctttccattcacaacgctgtctgccatcttgtatcttgcgcttttataaatctctgctgtggttgtcctggaaatattcatctgttttgcacattcatgctgtgtatattcttcaagatcgatcagacgtatcgtttcatattcatctaatgtcatgataacttcttcccctgtcaaaaatccatctggaaaaaaactatcataagctggttccatacatattcttctacatcttgttggtcttgccatattatcttctccttgttgtattttatttccgtcatatgtcgataactgtattataacattcaaatatttatatttcaagttactttatatctaatcgttcttctttgcagaatatcggatcaaacaacttgaccccaaatctccgtgtgaacaaatcacatttgcataggaataaataatatgggttgattccttcctgatacatagattcaaaattgcccatgcctttggctatgatcacatttgcactgtctaactgttttctcgcttctttgcttaactgttctttaaccgttccagcaattgcagctccattactgataactggaacaatctttgtaagacctatttcttgcgcatcttctatcgttgcatcattaattgccagaccacctcttaccataactatgatttcaagatttccataacgtttttttaattcctcaataaaaatcttatcaagaacgatttcaccacaattatctgtgatatacaaaagcgtttttgcttgttttaattcttcttccagatatttaatttcttgttcaggtatatttagactatcaactttcttcaataaatcatctaacatctgatcatctatatttccagtgacaccaaaatctatataatttccaacacatacatatttaatataatcttttatattctttgcttccttcaaatgctctttgatctcgtcttctctttccaacatatattgattatatttatgttttaatgctacataatccgtttcctcttcataatattcattataaatgtcctgaattcttttatccaacattggtgttgattctatatccccatatttatataaaattcctgtaactttctgaataaattcctttttctttttttcatctgaatgttttcgaattttttcttcttttttcgaaagattacatgcaatacatcttgaattcgcaatcatgatttttctccttatgtcatcaaagtcttattctaatcctgcttttattatatcatgatggtattttctatgaaataaaaaaagcatccttatctctaagaatgcttgaatcttcatattaaatctatatataaaggatataccttcaaaacaacatacaagaatctttctacatctcttacacttcagccttctttggtt

SEQ ID NO: 644 - DNA, 41962 bp, Unknown
  gut microbiota DNA sequence
tgtgtgtaagaagctctgttattttatcacagttctttttgtttgtcaagaacttttttaatttattttgttgttctgagctcttctgctctgcaacaacttttatataatatcatttctgatctcatctgtcaagaactttttaacttttctttcagatctgatctctattgctctgatcgttctccgtcagcaacttttatagattatcacatctgatcacttgtgtcaagaagtttttttattcttttcagaagccagatcagctccgatgttatattttcctgccgctctttcaacgacgttaattatcctaccatagatgtacacagtatgtcaacaactttttttctattttttaactattttttacatctttgaatatgttgtttttgcactgattccttctacctttccaagttttccagctaacgtattaataatatcctgcggtgcatcaattgcgatgctgataatgttaacccccttctcgtggtatggtatccccattcttcccagaatatacattccataatcatgtaaaatatcatttacctttgaagatgcatctatgtcttctacgataattcctatgatcgctattctactttccatctatattctccttattatcttcttatttcagaaatgtatcctgcacgaaactccatattgatttctcttagttctttctttccatcaatatagtcttgatacatttccacaatacctacactgcacccatcacatgcacctgcaatatttccaatagattcctctacgatttttgctcgttcttcttttgttgtatctttaatcaatatactcatagtcttctccttctttttaaatatataaatgcgatcccgcacacaataactgataataatgatcctgctggcgctgcacatcccataggatataaagtgtctataaaccatttagaagcaaaataagcccctggaatacgaatcagtacaatcgataatacattatgaagaaaagaaattcccgactttccatatgcgcaaaaatacccgctaaaactaaaatgaattccagcgatcatgcaatcccatatgtaacttcgaatatactggcttcccatgtgaataaccatggtatcgactgtaaagattcccacaacaaaatttgaaataaactgcatcagcactgcaacacataatccaaaactcatagaaatcataatcgcatattttaatgtctttgttgcacgttcatcttttccagcgccaatattttgtgctgcaatcgcagaaactgctgacagcatagaagatggcactaaaaatacaaaactgatgatcttttcaacgattcctacagctgcagcatcatttaatcccctttgatttacaatgatcgtaattacaataaaggaaatctgtataaacccatcttgcaaggaaattggaattccaatccctaaaatattcttcaatgtttttccttctggttttaaatcactgcgttttaatgaaataccagtatctttcttccgaattgcaataagtgcaacgatcacactgatcgtctgtgctaacgtagttccaagtgctgcacctgaagctccaaaatgaagtcctccaataaaaacataatccagaacgatattcactccacaagcaactgctataaaatacattggactttttgaatctcccaatcccctgaaaatggaactgatgatattatatgcagtgatcaaaggaattcccgcaaaacatatggttaaatatgcggttgttccttctactgcctgttgcggtgttgacatgatacgaacaattggatgaacaaaaaataataacaccactgtaagtacaacagaaagacatacaaacaaactgacagtatttccaatgatctttgaagtttctttcttttgttttgcacctacggatttaccgatcataacggtagtccccatcgcaattccaacgatcataaccgtgatcatatgcattacctgacttccgatagaaacagcggttgtgctagcaactccattaaattgtccaataataaacaaatccgccattccatataaagtctgtaaaaaatatgacaaaaaatacggaagtgaaaatttcaaaatattccttccaatacttccagtcgttaagtctctttccataaaacatctcctgtatcttaattccttatgcccgtaactccttcgaacgctcctttaaatgtttagtctatatattcttcgatcaaacggaccgcttttgatttatacaatgctgtaatgatcacagctgcgatcacagtcccacaaagcgtacttgcaaggaatggccctacaaatgtaaataaagctgctttctgtcccatcatcatagatgcgatcggatagcaaagcattccacctaaaattcctgttccaatcacttctccaagatatgcaccaatcttagatcttgtatatttaaaaatcatagcactgacaaatgccccaaccatacttccagggaacgcaagcaggcttcctgttccgagtagatttctgatcagtgctgtgcaaaacgccatagaaactccatatacaggacctagaaacactgcagccagtacgttgaccatgtgctgaatcggaaagcatctgctcggtccgatcgggattgaaaatgatgataagataaccgctacagctaccaacattgcggatattgttaatttttttaaattcatataatgtcacactcctttattgttcttccaaggtcttttttctcgatcccagccttttttactccaataggcgagatcggcctcatcccaacctctggtatgaagcattctcataaaataaaagcaaatctttgtctttattcctgttttcacatgtccagcattcttcttaatctgatatgccattttatttgtatctttttcaatttttgcttttatttttggttttatgtctttatacgaagttgccataacacgaacaccgtatttatatacctttggcactccccagtaaaaaaagctgtctgccatatctttatttgtactcttcattcctgcaccagcagctgttgatatacataccgcctgtttgtgaaacattgattcttctggtctatgcaacatccatcgataaccataatgatctaaaaacgctttcatagaaccagtcacatgataaacatacactggactttcaaaaatcaatacatctgcttcatcaagtgcttctgttaatggattgatcttttcataatgtggacataatgtctcggatttacgaaaacattgtgtacatccaatacagaattccccaaaatctcttggcagaaaaaactccttgacttccccgccaatcttgtctgccagaattttggaaatatgatatgtagagcctttatgactctgtccatgtataattgttactttcattttatactcttttctatttctgatctgcttcgctctctggctgcacagatgtacaatgaggacatctcgttgcacgaatatcgatctcactcatacaaaatggacagatttttgtagttggctgtgcaggttcctctggttttgaaccaaatgacatgaccttattcattgcttttaaaagacaaaataagataaacgccatgatcagaaaattcacaacagaagatccaaatgcagatgcatatcctgaaatttcttctaatgtatatacttttcctgtcataaccaattttatgatcggctgaataaaattatctgtgagcgatgtaacgattcctgaaaaagcaccaccgatcaatacaccgaccgccatatccatgacatttccacggagtgcaaacgacttaaattcttctaaaaattttttcatatgtctccctcctttatataattttttataacgttttctattttaacacatctttcgacaaaacaatatactctcttataatttgcagcttaaaatacgataaaaagattcaaaatgccctcaaaaaaagaccatattaaaaataatacggcctttaaaatcatcttatattgttgatcacttctctgattctttcattgcaattactttcttgatcagatcaacacttccatcaattcctaaataactgctgtttaagcaaagatcatatgattttgcatccccccacttattagaactgtaatagttgtaatagctggaacgttgtttatctttcttcatcagcatctctttgctctttccattcggaattccatattcattctcaattcgtttgatacgatcctcaaatggtgcatgtacatatacactgatgcaattatcaaagtcttctaacgcataatctgcacatcttccaacgaacacacaaggtccctttgatgccagttccttaatcgtatcaaaagctgccaaaaacaccttatgattcaatggcaagtcaaaagaattggaattgtatcctaatgaataaggatccattaccagagagtaaaggaaactagtcgttggtttttcatcaaaactttcaaagatctcttcacaaatgccactttcctttgcagcaactttaatcagttcactgtcataaaaagggattcctaaactttcggcaagcttctctccaatcaagtgtcctccgcttccatattgtcgttcgattgtaataattgtgttagtactcatatgaatcgctcctttccccaaaggataaaatattcaagttattctttgttatgaatattatactacaaataagtgatttttaaaagaaaaattgtacatttttatgttcaattatgcttcatatccataatgttcttttgcatatcttcttgcaaattctgcatcctcatgcatctgctgacttaaagattctagagaatcaaatttcatttctggtcttttaaaacataataattccacttctatttctttatgatagatattcttatggaaatctaaaatatatgtttcaactcccatatgtttctttccttcgatcgttggctttactccaacattactaattccgtaatacgtttcatctttataatggattcttgaaacatatactccatttggaggcaataacttattctccaatgggatctgattcgctgttggcatctgaagtacttctgctcccatatgatttccatgaactacaggtccacagatcataaacggatcttccatcagacgattagcttcctccactttaccctcagatagcaaacgacggattcttgtacttgatacaatttctccttttaattcaagtttgggaataacgatcaatttaaaatcatattcctttgacatccgtttaagtaattctacgtttccttgacgtttataaccaaacccacaatcatcaccaacaactaaaactttcattcctgttttttcaagaagtactttgatcacaaaatcttctggtgataaatgcgagaattcatctgtaaatggatgttcgatataaatatcaattcctcttcttgcaagaagttttatcttttcgttggtcgtgtagatcactctcatatgtttgtgttttaacatattaagtggtggacggtcaaaagaaaatacagccgcctgatatcccagttgcttatactgaatcagttcatcaaagatcaactgatgccctttatgcattccgtcaaatttgccaagagctaccactgtattatgaaattgaaattgttctgtattatgaatgtattccatggcttcctctcattggttgttgtcataaaaaatcttatctgggaaaaacatattttttttccagtaatatattccgataaactgttcactttcatcatatacccgaagtttctttgttgtatcgagatctatttcataaaacatctctttctttaaaggatttccgttaaataaaaccttatcatagtctttctttacggtacctttttgatattttagaaaaaccttttcaattggaattatccattcttcgatctttccagttttcactgcttcctcgatctctgataatgtatgggcatattctaattgaaaaccactggatcttgtacggactaactttgtcatacacgctccattttgaagcttatgtccaatatccctgcaaagacttcggatatatgtacctttgctgcatgtaactgtcattgtaacttctggataagagatttcaatatctgaaatatcatagatcctgatccgttctggtttgcgctcgataatttttccttctctggcaagttcatacagcttctttccattaattttctttgcagaatacataggtggtacctgatcatattccccaacgaaagacaaaatcgtatctttgatcggtgcatcttgttttagcggttcatgtgttttcgtaacagttccccatatatcttctgtgtctgtctctttttcaaacacaaagcttaccttgtactgtttcttcgttcctgttaacatgtcgcataactttgttccttttccaaggcagaccggcaatactccttctgcatttggatccaaagttcctgtatgaccaatctttttctgacgtaagatccctcgaagttttgcgacaacatcatgcgatgtaaaatctttttctttatatatattcaataatccgttgtacataaaaacctctaccttataattgttctgtgatctcgcttatgatcgtactttgaatgtctttcagtgttcctttcatggaacatcctgctgcacggatatgtcctccacctccatgtgctttagcaatctctgaaacgttaactttctcattcgaacgcatacttactttatagccattttcgatcggatatagaaaaattgctgcttccacaccttttgtaattcgcagctgatcaataatcccatcgctgtcggatgttgatgcatgaagctcttcaaaatcttgttctgaaagattcgaaacaatgatctgtccctctgcataaagttgactttgtaataatgcttttcctaacaactgattttgtacaaatgtcttctgataaaatgtctcatcaatgatctttgtagttgaaacacccttctccagtaacattcccgcatattccatcgttttacgtgttgtatttgaatgcttaaacactccggtatcatgcacgattcctgtgtataggcactgggcacattcttttgaaatcttatcctcttcaaaaatctggcacaaaacttcacaagttgcactcgcctgtggatcgatcttataaaagtccccaaatccatcattactgatatgatgatcgattccgatcaatgtttttgcacatctgaccattgttgcaaatggttcataacgatcttcagagccacaatctaaaacaaaaaacagatcatagctttcatcatctttcgactccgtgatgatctcctgcgcatgacttaaaaaacgaaactctgtgctgatcgattctaaataaacatcaactttcttcccagaataattatctaaaatatactgttttaaggcaaggcaactgccaatacagtccccatccggatggatgtgtcctgtaatggcaattgttttagcctttgaaatctgttcattaaagtgtttcattctcactcccatgatttaattcatcaatcttctttgacatatttactccatattcaatggaatcgtctaaaataaatgtaatctctggtgtatttcttaaattaatagagtgtgcaagttctcggcggatataacctaccgcactgtttaagcctttcatcgtttcttctttttcttcatcatttccaagaacactgatatatgctttgcactgtttcagatccgatgtcacaacggcatcaacaacagatgtcattggtgcaattcttggatctttgatctctctgctgatgatacggcttaattctctctgaacttcaccattgatccttgtatttttaatgctgttttttctcatattgctactcccttcaggaaattatcttgggacctcttccataataaaggattcgatctgatccccttctttgatgtcattatagctttccataacaagaccacattcaaatccgctgcgaacttctttgaccgcatcttttccacgttggatagatgcaagttttccttcatgaacaacaataccatcacgaataatacgtgctgagctgtcacgctgaattgttccatctaatacataagatcctgcgatcgttccaactccagaggctttaaaaatctgacgtacttctgcatgccctgtaactttctctacaaattcaggatctagcatacccttcatagctgcttcaatatcttcgatcgcattgtagatgacacgatacagacgaagatctactttctctgcacttgctgcatctttagcagctggttctggacgaacattaaatccgataatgatcgcattagaagctgctgctaagtttacatcagattctgtgatagcacctacaccaccatgaatgactttgactgcaacttcatcattagaaagttttacaagactctgtttaaccgcttctacagatccctgtacatcggcttttacaatgatattcaattctttgacgcttcctgcctggatctggttaaatagatcatctaatgataactgctgttttgtctcagataacatcttttcacgtccataagcaataaatttctctgctacggatcttgcttctttttcgctatccataaccatcataacttctccagcatttggaacttcacttaaacctaagatttcaactggtgtagatggtcctgctgttttaatacgttttcctttgtcatttatcattgcacgaactttaccatgagcacttccgatcgctactgcatcaccaacatgtaatgtacctttctgtactaatacagttgcaactggtccacggcctttatcaagctgtgcttctaagacaatacctcttgctttacggtttggatttgcttttaattccagaacttctgctgttaaagaaaccatatctaataattcgtcgattccttctcctgtatgtgcagatactggacaaaagattgtgcttccgccccagtcttctggtactaattcatattcgatcagttcctgttttactctttcgatgttggcactttctttatcaatcttattgatcgcaacaatgatctcgattcctgccgctttcgcatggttgatcgcttcgatcgtctgtggcataacaccgtcatctgcggctacgactaagattgcgatatctgtagactgggcacctctcatacgcatagatgtgaatgcctcatgtcctggtgtatctaagaatgtgatctttccattggatgtttcaacaacataagctccaatatgctgtgtgataccacctgcttctcctgttgtaacatgagaagaacggatcttgtcaagtaaagaagttttaccatggtcaacatgacccataacgcagacaactggtggtcttacgatcatatctgtttcgtcttcttcctcttcttttaacagttcttcgatcacatctacctgttcttccatctctaccagacgatcaaattccattgcgatctcttctgctttttcaaaatcaagttcagagtttacatttaacattccagctccgctgatcagtaatttcttaatgatatcatttgcaggaatagataatgcatctgcaagctctttcaatgttaatactggaggaatctttactggcgcatttggatctacttccggtttctttactggttctggtttaataaaggcaccaggtcctgatgtttttttctttttcttatgctcctgattctggttctggtttttattgttaaatttcttattctttttattatttttcccaaacttctgagagttctgaggattatcttttcttaagatctttttatccccatcattatttttattttttgaattatttttattgttctttacttcctgagtttttttattatttttcttttccatattctgtgcttttttattatcttttctttttgaattttcctgtttctttgaattatgatcctgttttgcttctttctttggtttcaacgcattctcgatcattttgatctgctcatctcctatggtactcatgtggtttttcacttctacatgattggctttcaagatttctaaaatttctttattgtctttattatatttctttgcaatttcataaactctgaattttgccataaatatacctcctgcgattcttatttatcaagctgttttaaaagagcttctgcaaaaccttgatcagtcactgcgatcgacgctcgaaactccttcccgatcgcatgcccaagctcttcttttaatccccagcaataaaaaggtacttgataatgtttacattgattctcaaacatcttttttgtattatcggaagcatcattggctacaatgataagagctgctgtctttttcctgacagcttctcttgcggcaaattctccactgaccagattaccggatctgaatgcaagacctagaagagataatcctttattcataaagttcttccatctccttttttaatgtctcatagaccgattccggtactcctatcttaaaagaacgatctagtccttttttcttaaatgcttgttttagacactgtggatcagggcatatatatgcccctctcccatttttctttccagtcatatcaagactgatctcgccttcttttgatcttacgatccggactaattgattcttttcttttaattcaccgcacccgatacattttcttgttggaatttttcgattcattttatcacctgctgatatttcctattcttcaatatcctctgcatcaaaatcttcaacagcttcttctgtattctctgcatcttctacgaaatcatcattgatctcttcgttaaaaagatcttcttcaatctcaaattcatctgcctctggttcttcactgacttttgctgcttcttcagctgcctgtgattcactcttaatgtcaatcttatagcctgttaatcttgcagctagtctcgcattctgtccttctttaccgattgctaatgataactggtaatctggaactacaacttctgcgctcttttcttctacatcaactgccacagaaacaacttttgatgggcttaatgcattctcaatgaatacacaaggatcttcattccagttgatgatatcgattttctcgccttttaagtcattgacgattgcattcactctagcaccatttaatccgacacatgctccaactggatctacattcttatcattggaccatacagccatctttgttcttgatcctgcttcacgcacaatgttcttgatctctactgttccatcctgaatttccgcaacttctttctcaaataaacgttttacaagatctggatgtgttcttgaaacaagaatacgtggtccacgatttgtttcttttacttctacaatataaagtttgattctctctgttggtttgaacacttcacctctgatctgttcagatttcattaacagagcatctgttttgtcatctaagcttacacttacattctctccaacataacgctgaacaacacctgttacgatatctttttctttgcagtagaaatgatcatatacaactcttctttcttcttctttgattttctgcacaataacgcttcttgcatgcattgctgcaatacgtccgaaatcttttggtgtgatttcaattcttacagtatctccaagatttaagttctgatcgattgcctttgcttttccaagactgatctccagagcaggatcataaacttcgtctacaacttctttgatcgcataaacataaatatctcctgtttcacgatccatattaactacaacgttatctgcacttccaaaatctcttttacatgcagcaagcagggaattttcaatggcttccatgataacgtctttatcaatacctttttccttctccaactgatttaatgccgcaattaattcactcattctctttcttcctccttaaaaatctaacgacaaacgagcacttgcaatgctctttttctcaaatgtaatatcctgatcttcgattgttagtacaatctgatcttccatgttttcttttaaaataccagtaaattccttttgcttatcaattgctttataaagcttgatgtcaatggactttccgacacttcttacataatctttttctttttttagtggtcttccaagtcctggagaacttacttctaaaatatatgcatcttcgataaaatcttctgcatccagtttctcttctaagcttctgctgatcagcacgcagtcatcaattgcaattccaccttctttgtctgcgtaaactcttaaataccagtttgctccttctttgacatattctacatccaccagttcaaaattgttggcttcaatgatcggtaataccagttcttctgtttttgtttcaatatcaactcgtcttgccaatgtatcaaccctttcttttgtagtgttatttcttcattgttacacaaaataggagtggacatatgcccactcctaagtcatcttttcttaagctatatttagtttaacatgaaaaatatctcttgacaagagttttttcatatattatcaaagaaaatcgaaacttaactgatcagtatctgatagatctcccataattccaagttctttcattttctcgatacatgcttgtggtgcttttgttctgtttctaaagttttccaaggatgtaaatggttctcctttggctgcttcttctacctgctgtgccgctttttcacccattccatcaatactggtaagtgctggcatgatctttccatcgatcacttgaaaatcttttgcctttgccttgtaaatatccagtggccagaattcatagcctcttgcatacatttcatccgcaatcttcatttctcgtaacagatcaagatctgcatttttaacttcgtgttttggtgtattcttaataatactcatcttttcatccaaacgttcttttccaagacacatatcttcataagaaaatgccttcgctcgaatactgaaatatgctgcataatatgccaatgggtgataaaccttataccatgcgatcctccatgccatcataacataagctgccgcatgggctttcgggaacatatatttgatctgtttacaagaccagatataccaatctggcacattgtgatctctcatcatctgttcttgttcatctgtaagtccctttccttttcggactccttccatgatcttaaatgacgcttcctgttccaatccctgattgatcagatataccatgatatcatctcgacaacagattgctgtggaaataaccgcatctccattctcgatcaatgtctgagcatttccaagccatacatcggttccatgagacaacccagaaatacggacaagatcagaaaagctctgtggatgcgtatcctgaagcatttgaattacaaagtctgtcccaaattccggtactccaagtgatccaagcggtgtcccatcaatatcttctggtgtgatccctaaggtttctgttccatgaaataatcccataacgcctttatcgtccattgggatcgtctgtgcatcaattcctgtgatatcttccattcttcggatcatagatggatcgtcatgtcccagaatatcaagttttaataggttctggtcaatcgaatggtattcaaaatgtgtcgtaatgatcggtgtattcatatcattggctggatgttgtaccgctgtaaaatcataaatttctttatcatgcggtactacaatgattccacccggatgctgaccagttgttctcttaactcccgtacatccaagtgctaatctctctatttcacaacgacgtttactgattcctcgttcttccagatatttcaacacataaccataggctgttttctctgccagtgtaccgatcgttcccgctcggaatgcttttccttttccaaagataacttctacataagcatgtgcttttccctgatattctcctgagaagtttaagtcgatatccggctctttatttcctttaaacccaaggaatgtctcaaacgggatatcctgtccttctttcgtcatctttgctccacactttggacagtatgcatctggcatgtcaaaacctgacatacccatcttcgcatatttttgcacctgttctgagtcaaaatccacaaaatgacattctggacagatataatgtgctggcaacggatttacttccgtgatccctgacatcgttgctgcaaaggaagatcctaccgatcctcgtgatcctaccagatacccatggtcattcgaatcccataccaatttctgtgcgatgatgtacattaccgcatatccatttccaataatagagtttaattctttttccaaacgacttgtcactcgttctggaagatcatctccataaatctcatgtgctctattataacagatttctcttaatgttttgtctgaatctgggattaccggcgggcatttatccggatggattggagaaatattttcaatcatatcattgatcttattcgtgtttgttatgacaacttctttggctttctcacttccaagatacgcaaactcatctagcatctcctgtgttgtcctaaaataaagtggtgcctgctggtcagcatctttaaatccttttccagctaataaaatagaacgatagattgcatcatctggatttagaaaatgtacatcacatgtcgcaacgactggcttatggaattgttctccaagatctacgatcttttgattgaatttctgaatatcttcaatcgaattcacattctcaacacgttcggatccaatcataaattcattgtttcctactggctgaatctccagatagtcataaaatgatacaatattcgcaatcgtttcatctgagcgttcatcaagcaatgcctgatataattctcctgcttcacacgcagatccaatgatcaatccatctctatatttattgatcagagactttggcattcttgggcgacggttaaagtaatttaaatgtgattctgataccaagcggtttaaattaacacgccctgtattattcttaaccagaataattccatgatacatgcgtccttttttgattagatcgacattatcatttgcaaattcgttgacctgatctagatctgtaatatctttttcttttaacatagaaatgaattctacaaaaatctttcctgttgctgttgcatcatcaactgctctatggtgtgtttccagtatgatatttaaatgtttacaaatgttatccagtgtaaatttaccaagatgtcccattagacatcttgcaagccccagtgtatccacaactgtatgatcatatggaagattcaaccttttcgcattttcgcggataaaccctgtatcaaatcctgcattatgtgcaaccaaaacagatcccgcacagaattttaaaaactgtggaagaatctcttcgatcgttcccgcatcttttaccatatcatctgtgatcgttgtcagctgagtgatcttatatggaattgggcgctctggattgacaaattcactgaatgtttctttaatctctccttccacgactcttaccgcaccaatttctataattcggtcattgacactgttaaatcctgttgtctcaatatcgaatacaacataactgtccattagtgactgcccttttgaatcaatgatcaaatctccaaggtcatcaacgaaatatccttctaccccataaatgatcttaaatggatcatcttcttttagtctcaagtcttcgtatgcatgacgtgcgattggaaatccctgcaatacaccgtgatctgtaatcgcaaccgccggatgtccccattcgtaggcgcgatttacaatatctttgatctgtaccacactgtcattatcgctcatcactgtatggagatgtaattccacacgtttttccatggatgtgtcctgacgtttttccctgaaatctgtaatcgccttgattcctgccacagatcctagagagatctcatgatcaaatttgtcatacatcgcaactgctttgatacgatagaatccaccttttttcaaaccatctaaaatatcgggcagctgttcatttcttacgaaaaccttgcagctgatcgtatctgtaaaatcggtaatatgaaaaatgatgattgttttttcattacggatttctcgtgtttcaagaaatgtgatctgcccatgaatcacaacttccccgatctcatcatagatatccttgatctccatcagctcgccatcacaatttcgtccatataataaggttggatcatctgaatattttggttttttcttaaacatatgctcttttttcgttgcagctgctttctttcttgcttttttctcttctttttgttctttctcaacgatatctgcgtgctccacgatcgtatggatttcttgttgtaagcgataatcactttccatcttaaggcttcgatcaatcgtcttagagaaatcaaatccgacttttgcatcaatagaaaaacgttcttttaaaatcatctcaaaaaattctttgatctctggggctttattgcggtttacaaatgtatcttcaaagtaaaaggtgatcacatcatcttcaattctataatccccttttctcacgacattaaaaataacctcccctttgccttttaactcaaagaggaagcttttcatgtaatgctccattagatatttgagattatattgttctgacaggtgataactttcctgaaaacgaatctttacaaaacgctttgaaaacagctgttcccggatcgtgcgttccattctccatgtatcgactcttgagatcagatgatcacactgaaaagaaatcttaagcgtgttttcttttttctttagtgtgatctctctaatattcgcatcttcaaacaaagatcttacatcgtcagaaactttcaaatctggaaatacactgaaaaatggttttgttgtcacttccattttattcaccccagtgttctaattcatatcttaaagtatcaagtaattgatcttctggtactttacggataacctcgcctttcttgatcagaagtccctctccatttccaccagcgattcccacatctgcttctttggcctctcctggtccgtttacaacgcaccccataacagcaaccttaagattcagattttcaaaatctgcagccattgtctctacctgattggcaagtggaatcagatcgatattcgtacgtccacatgttgggcaggatacaacttcaattcctccggaacgaagtcctaatgtctttaagatcagtttcgcactggcaatctcgttgactggatctcctgtcaatgatacacggatcgtatcaccaattccttgatttaagataattccaagtcctacagctgatttgatattaccactaaaaactgttccagcttctgtgatccctacatgcagagggtaattgattttgtctgcgactagacggtatgcttctgcacacatcaaaacatcagaagacttaatactgactaccatatcatgaaaatcatatttttcaagcatagcaactttatctaaggcactttctaccagtccttgtgcagttactccgttatattttttaacaagtggtttctccaatgatccgctgtttacaccaacgcggatcggtacatgatatttctttgctgtttctaccactttgcggatattctcttctccaccgatattccccggattgatacggatcttatctgccccatgttccatcgctgcaattgcaagtttatagtcaaaatgaatatccgcgaccaacggaatatgaatctgcttcttaatctctgtaaaagcttcggcagctttcattgttggaacagtacagcgaatgatctggcatccagccttctcaagagcaagaatctgtttgaccgtctcttccacattttctgtctttgtatttgtcatagactggatggcaactggattgcctcctccaatcttaacatctccaatcgaaattactcttgtctgatttcttgtatacatgcaaatccccctttacatgaaaatctttacaatatcctgatacattacaaataccatcaaaagcattaataagatcaatcctgcagtgtgtaccagcgcttccatattctgtggcacagcctttccagtaattgcttctatgatcaaaaacaataaacggcctccatcaagtgctggtaatggcaataaattcatcacaccaaggtttgcgctgatcaaaatgatccagtttaccattgtcaaaaatactgttttaaatccataggcggcagcctgtgtatattggtctccgaccgttttgacaattcccactggtcctgaaagatctttcacaccaagtttttgtgaaactaacatctttacactctttaaagtaatctttacctgcaatcctacttctcggaaactgtattcgatcgtttttaacggacctactttctgatacccattccaggtaatcccgatcagatattgtcctcgttctttatcatactctggtgtgacgtttatatttttttcttttccgttttgtaatatcgtgatcggaattttccctccatcataatctaaatacatataataggaaaactctctgtaattgtgcattttctttccagcaactttgatcatagtatctcctttacggattcctgcttcatatgctggtgaatctttttctactttggaaatcttcggaatgtcagcaccagacattccgatcactataattgaaaatataaacgctaagataaagttaaaaaatggtcctccaaaaataactcccatccttgcccagacggacttattattaaacgcattttcttcaggtcggtcttcatcttctcccatcatacatgcaccaccaaatggcagcagtttgacagaataaaaagtctctccaacctgctttcctataatcgttggtccaagtccaatgcaaaattcatctacctgaatcccatttttcttagcgatcagaaaatgccctaattcatgcacaataataataattccaaaaattaaaattgcaatgataatattcaatgatctacctgctttctatgtgttcatacacccattgctctgtctctaacacttcttccagtgtcggattctcaataactttatgggcattcattgtgtcttcaatgatgtcgtaaatatctaaaaactgaatcttacggcctaaaaataatgcaactgctttttcatttgcagcatttaagactgttggcatgcttccaccgatcctacctgctttatatgcataaggaagtccttttagaacatccactggtggttcttcaaatgtaatttcttttaattttgcaaaatccagacgttctcccgcaagatttctatgttgtggataaaataatgcatattgaatcggtaatttcatatccggtgttccaagctgtgcgatcacacttccatccttaaactgaatcatagaatggatcacactctttggttgtactacaacatgaatattatcaaaatccactccaaacaaccatttggcttcgatcacttcgagtcctttattcactaacgttgcggaatcaatcgtaatctttcgtcccattgaccaatttggatgattcagcgcatcttctactgtcacatgttttaattcttctgtcgttttcttacggaacggtccccctgatgctgtaatgatcagagaatcaagatcatctcttttcccgctctgtaaacactgaaagattgcagaatgctcactatctactggataaatagaaacacccaattcttccgccagtggcataatgatatgccctgcagttaccaatgtttctttattagcaagtgcgatgtctttcccagccttcatcgcagcgatcgttggacgaattccgatcattccgacaattgctgtgacaacaacagaacactgctcctgtgttgctgcttctaataatccatccattcctgcacatacttttatattcgtatctgccagacgaagtttcaactcttctgccttctgttcattgtatacagcaacgatcactggctgaaattctcttgcttgtttttctaacagatcaatacttgttcctgctgctaaggctgtaactttcagatctttattacttcgtacgatatctagtgtctgggttccaatggaacctgtagatccaataattgaaatatatttcattctagatcgctcctcctgagatcataactgtcagataataaatgacaggtgcaataaaaataatactatcaaatcgatcaagaattcctccatgaccagggatcaatgtaccataatccttaattcctgaatctctcttgatcgcagatgctgccaaatctccaatgactgaaactgctccacctagtccacaaacaattgggaacattgtaactggattaaaactaaatctgatatatgtgtttagatataatccatataatgcaccaagaattgccgcaccgacaattccgccaaccaaaccttctatacttttcttaggacttaaaattggtgacatcttatgttttccgatcaacattcctgtacaatatgctaaagtgtcatttccccatgctgcaaggaataataatacaacaaattctcctccattttgtaattctcggatctgatagataaaggacatcataaccgctacatatacaaatccaaagaatcctgccatcatctgatccactttatactttggaaaacgtaccacatagcatccgagtaaaaagattaaaaataaaataatgatcgctgtggtccattgttcaagatcaaataacaatgccacataataaagaatcgtgcctgtatatccgatcactgccaaagatgatttctcaatatgataaatctttaaaatctcgctgtatccgatcaatgcaacgatcaatgtcattgcaaacgtcacaattccacccatatataacccaaaagctgcgatcaatactaaaatgatcccactgatcagtctttgcttaaacataaacttatattcctccaaatctgcggtcgcgtccattatagtattcgatcgcctttattaattcttttttattaaaatcaggccagagcacatctgtaaaataaaattctgtatatgctaactgccataacataaagtttgacaatctttcttccccgcttgtgcggatcatcagatctggatctggaagttcttttgtatccagatatccattaaacacttcttctgtgatctcatctttggaaagatttccactagaaagatcatctgccatatgtctcatagctcgcaccatctcatcacgacttccataattcagtgcgatcgtaaaattgatccctgtattatctttggatgccttctcaagctcaacgatcttctcctgtaaatcttcggaaagtcctgtgatatctccgatcactctgactttcatattatttttatttgcacgcttgatacatgtctttaaataatcacgaagcagtttcatcaatgcatttacttcgtcctgtgggcgtttccagttctctgttgaaaaagcataaactgttaaatatttaattccaagatcatgtgcatcttctatgatctgttccaccactttacttccctgtctatgtcccatattcctaggtaaatggcgtttttttgcccatcttccattcccatctaagataatggccacatgttgtggaatatttaaattctccatttggacctcctgtgtatcatatataactttcgtttctttccacatgaaacaaaacagggctgagatttcaaccctgttgatgattaagattaaactgtcatgatttcttttgattttgcatcaactgcttcatcaatctgtttgatgtatttatctgtcatcttctgtactttgtcttcttcatcttttgcctgatcatcatttaaatctccggctttattctgtttcttgacaaaatcatttgcatcacgacggatatttctaactgctacctttgcttcttctccacgtttcttgacatcttttgcaagctcttttcttcgttcttctgtaagatctgggaagtttaatcggattgctttaccatcatttgttggtgtgatcccgatatcagatactaaaatcgctttctcgatctcttttaataagtttggctcccatggctgaatcatgatcgttcttgcttcaggtacagaaacattaccaacctgtgctacaggagttgcaactccataataatcaactttgactttatctaatacatgaggattggcacgtcctgcacgaattgtcataaaatcattcgccatactgtctaaagatttctgcatcttgtcttcaaattgttttaacatgtttctttcgtcctcctaatttatcaaacggttacatatgttccgttaaattcacctttcattaaattctcaatgctgttttcttcatttaatccaaaaactgctaatggcatcttattttcaaggcacatgatcgttgctgttaggtcgatcactcctaatttctgatccaatacttcttccattgtgatactgtcatatttcaccgcattttcattcacagcaggatcactgtcatatacgccgtcaattgattttgctaataagatcgcatctgcttcaatctcgatcgcacgaagtgctgttgctgtatctgttgagaaataaggatgtcctgttccacctgcaaaaaatacaacctttccttcatctaaagctttgactgctttatctttggaaaataattctgtaaatgctccgcatacaaatggagtatatacttctgtttccattcctgctgttctgaatgcatcggatacatagatacagttcataactgtcgcaagcattccgatctgatcagcttttgtacgttccatactctcgcttgtacgtcctctccagaagtttcctcctccgataacgatcgctacctgaagtccctcatctactaatgtctttacctgacgtgctgcatctgcacatgttgcttcatcaaatcctgtcttcttatctccggcaagtgcttctccacttaactttaaaagcacacgtttcatatcttttaaatctttcattggtctacctcatttgttctttctttgccaaatcactatgtgaaattatatcatatcatcaagaaaagaacaactataaaaaggacctctttcgaaatcgaaaaaggcccttttgtgtttacaaattctttcgtccatttaatattgtaaaaagcataaacaacactggtatgatcagtgcctcaaactgagttactgaatatgctttaaatacaacatttaaaataatcgtggcaatcgtaattgcgatcagtacaagactgacataaaaacatcttttacatccttcctgtgtatttccatctttaagacccgtatatccaccgaccattgctgctactgcgtagccgccgatcaaaacaagtccaagataaaactttgttgcagaagtcgtcgttcttccataacctacaagccctaacagattcaataactgcaacacaccctgaatcaaaacgagtcctgagattatcttaaaaaatatattttttgttttgttttgcataatcgctagttcctttttatttttatgttgtcgctgtctccttcatactacttcgaaagattccctcatctttgtcttcttattatccaatttaatccaatttctggatctgttcgataactttttgatattctttctcaattttaccgatcactggcaatacttcttcgcgctgtcctgcacggatcatatctactgctttcgcacttttttgctgtaaatgtgtaaactccagattgcttgcaattcctttcatcgtatgagttgttcgaagaatttcatcataatccatcttatttactgcttctttaatctgttcataagtaggatcatctaaaaacttacggacaaacttttccaccagtttctgatttcccatcatacggctgcttacattttcataactttcatcaatactgtcataaaactcctgaatattcattacttctcctccattcaaattatttttgaataacctaaaatggattatagcatatttaacaaaattcaacaatttaattctatattttatacaccagaagttttttcgacaccatatttctttctacgatatgtttttttgtcactttccatatagtgatgacttcttctacgatctcgttcttcattttcttccaagatttcttgtttcgcattcataacaagcatctgcagacgattttcgatattcgcaaaactgacatctggatcatagtctaatggaagaatctgtgcatttggatacatttcttttaattttttagaaatacctcttccaacaacatggtttggcaggcatccaaatggctgtaagatcaagaaatacttgcatccatgttttgcgtgatgaatgatctctcctggaatcagcacaccctctcctgcatcaaatgtatgatgaatgatcggatcactgtcttttaccagatcatccatacggatcgctggtttatataaaggatgtccttttgcaatggaatcggtcaaactgtgtgcaagatcaaagaacatgtctgctgtccgaaaccagatcttttgatctattggtttatttaaatgatattccctgatctgtgaatcctgataaaagtatgtcttacggataacatccgtcatacgtgcttcaataatctcaaatccattttcttccagatatttttcaatgtcatggtttgctcctggatgaaagttcagaagatattccccaacgatcagaatctgtggttttaagttcgtacgatcataagaaatatttttcatgatagaaatagccttcttaaatccttttcttgcaccaagaactcctgacttttccaatccatcgattacaagatcaagggctttgtcaaacgcttcatctgcacttcctttgactgtttcatatggacggatctttcgtaataattcctccaatacatcgatcatcggtaatgcaaatgcgatttttacagaagatgccagatttaatttaaatcctgggtgcatattatgagaatctgcatcatcatttgtcaggatcggaatatgatcatatcctgcatcatcaagagcttttcttagtagtgccccataatgtgtcagtcgacagtctccgacatatttccccataacgatcgcaacatctttgtcatcatactttccactttccagtgccgccaatgcttctccgatgacgatctgtgctgggaaacagatatcgttatgtacatatttctttcccaaacgaattgcttcttcacgcccgatatccaaagcaactgcccgaattccttgtcctcttaatgccgctgtcataattctgcaaaatgcatgcgatgtatttggaaccaatgcgattttttcttttctgtgttcttttgtaaacttgactggatatggttcttgcaactcttttacttctaatttctgatgtttctcacgtcccattttcactgtctccaagaaagaacgcacacggattcctaatggtccttgattatcactttcatctacttttaagatcaatggtgttttcccggaaatttctttcatcattctcgtgatctcatcggatagataagcatcatgtccacatccaaaacttacgagctgtacatattccagatgctcactttgcgcacataagatagcagaagataacattctagcatgatagttatttacaatatccagacggctttttgagagttctgtctgattcacttctggcagggaatctgcggttaagactgcgatgcctgcttttgtaaacatcttagacagatcgtgattaaccagtgtatcgttctgatatggacgagatgctaaaacaactgcaaattcattcttttcctttacttcatttagaatctcttctcctcgtttctttaactgttggtcaaaagatttctgagcctgatctgctgtatgcattgcattcataacctcttcttttgagacatgatatacttcttccatatattttaccaactgacgctgtctgtcctttttggtatgccaatggaataatggtgcatcaaatggcacattccatttatcctgtggattatcagaattcctgataacgatcggataaccttttaccaccgcacacatagactcacttgttttttccatattctctggcggtactgttgtgatcgatggcataaaaatatgatctacatgatattttttcaccagatttctaagatgtccatgcacaagttttgctggaaaacataccgtgtctgatgtcactgctgacaatccactttcataaatctctcttgtgctttcatccgataattgtactttgtatcccaaacttttgaaaaaagttgtccaaaatggcatcgtatcccaataggataacactcttggaattccgatcgtgatatctctttctgttttaggcactggataaggatattctttgaacaataatttctttcgctcttggaataaatctggaacactctgtgtttttcggattgtttcttttaactgctttccaacctcatcatttcttggatctccgatgatctcgcctttttcacatcgattatttgttacccaggaatttccatttgaaaattgaacaattgttctttgacaatgattcgtacaaaatggacaaggtgcattcgcctgctgctcataagaaaatgtatctaaatcacgaagatcccatgtgctcacttctttcggattcttctcatattgctcttttgcgatcaatccgacaccaattgcacccatgatccctggatatggtgctctgatcacttctcttcctacatactcttccattgcacgtaagactgcatcattttcaaaagtaccaccctgtaccacaatcttagttccaagcgaatcaagatttgatacgcggatgacctttgtaaatacattctgaatgatcgatctgcataatccggccataatatcctctggattcttaccgtttcgctgttccgtgataatactactgttcataaataccgtacaacgactacccaaaactgctgggtttttagacgcaaacgctttctttgcaatctcttttgtcggaatatgtaaagaggatgcgaagttttcaagaaatgaaccacatccagaagagcacgcctcatttaataaaatatttgtgataactccatcctctaaccagattgctttcatatcctgtccaccaatatccaaaataaaagaggcgtctttgacatatttttcagaagctcttgcatgtgctaccgtctcaaccgtatggcaagggatttcaaaagctttggaaaacagcatttctccatacccagtcgtaccagctgataaaatttctaattctgctcctgcttcttcatatcgttttcttaaacagatcaaggcctctttcgctactttcagtggatccccttcattcggtgcataaaaagaatccagaatttcttcttgttcatctaataatacaaattttgttgtggtacttcctgcatcaatcccaagaaaacatcgaacaacctctcctttttgtggtttcttccatatcacctgtttcttcttatgtgcttctttaaaagcattttcttcttcttttgattcaaaaaatggttttgcaatttctcctgaaacgtgggaatgatctttctgtgcgtcttccagtattactaacattttattcacatcttttggtttgctgtctgcaaacatcttatccaaagataatgctgccccatatgcaatcattaattctgaatgctttgggcaaagaatctcatcttctttcaaatccagacgttcagcaaaaacttttaccagagttggatgaaatgttaatgggccaccttcaaatgcaacaggttttttaatctccaatccctgtgccaaccctccgatcgtctgtttcgcgatcgcatggaatgcggataacgcaaggtcttccttggctgctccctgattcagaagtggttggatatctgtctttgcatataccccgcatcttccagaaatatcatataaatgtgttcctttttgtgccaactcattaaactgttccactggtacttttaatacggatgcaatttcatcaataaatgctcccgttccacccgcacagcttccattcatacgcatatcggaaacactttgtgactgtccattttcagaatctttaaaaaagatcatcttggcatcctgtccacctaactcaattgccgttccgacctggtcaaactgatcttgtaatgcgatcgcattggctgcaacttcctgcacaaatggtacttttaaaatagatgccactggttttgccccagaaccagtcagacacaatctgatcttcttatctcttatatgtccgcaaaacttcttaatgcttcggatcacacttgcgatctgatttgcatgatgtcttgcataatcagaaaataacagttgatgacggtcattggcatcaactgctactattttggttgtcgtagatcctacgtcgatcccgactaatatattttgttcgtttgattttgtcatttcgttattcatcattcgttatcgtcttttctccttcttttgagctttacgttttatcataactcaaattaatagaaaatgtaagataaaaaatggattttaacactttcttcacactttttcatttagtttctgcttacgttccctccaatctggaagaaaatgactcatcaaatcataaaatctctggttatggcttggttctaaaagatgacataattcatgcaccaaaacatactctacacattcctctgattttacagccagctgcagattcatccgaatctttttactgtgaatactacagcttccccatcttgttttcatatctcgaaccgtaaaaccattcgcatgaactttcatgatcgattcccatctcattgcatattctatgatcttgtcttccagccatttcctttgttccagattaatttcctgctgtgatgaattttgtctgttttttactttttcatggttttttaaaatccactcttcttttttcttaaggaaacgaaaaacctcttcgtcggaaactctcattggaactgttaccaaaacatctccgtttggaggtttcacgtagatatttatatttttaatcttccttcgctcaatctcaatatttaatgttcctatttgttttatcattattcttatttctttctctgaatcagcatatgtatcaatacatacaaaacaatcagaaaccctgatataaatcctgccacactaagatatggcattcctaacactctcggtgttacatcacttagacataaaattgcagagctaaaccaaagtgccatcacgatcaatacaagcaacagatgatcaaatcctttttttaattctctgcctgctttctcgatctgcgcagattcaatgtttacccttacctgtccattctttgtaatgttcaaaagatctgatacctgtgctggtatctccaaagatttcttagatgacccataaatatctctcaaagcatgtcttatctctttctttatatcaatctcatgaaacatattcgcagacatataagaagtcaatatctgtatcatattcacttctggagaacataatttcaatgttccttccatagtcaccatacttcttgcaagcaacgtaatatctggttcgatcgcaatcttatgtttcttcaaaagccctattgcatcttccatcaattctccaagatccatggtcccgaaatccatattcatgtattttccaaccatatcatcaagatccgtatacaaactagcatggtcgatcttctctgtcggttttccaaacgataagaatgcattcttaagttcataaatatcatttttaagaatagctgtgatcgcacgtttcatgatcgcacggtaatgttcagatagatcacctgccattccaagatcaagccatacgatctgaccaccactgatccatagattccctggatgtggatctgcatgaaaaaaaccatccgccaaaatctgtttacaatagttttgtgctgttttctgggcaatctccttcctatcatacccattgcgatcaagttcctcgatatggtcaatctggattccatcaacataactcatcaccagcaaatgctcattcgaatattccttatatactttcggacatgtcacatatgcaacatccttctggttctcataaaatcgttccaaatgttgtgcttctttttcaaaatccatttcttctttggatgtctcccacaactcatcaataacttttctaaaatcaatcaattcaccggttcctgttgcaaaatttaaaaatccagaagccttctttaacagagcaatatcttctgccatgatctgtttaatctgcggtctctggatttttaatacaactttactgccatctcctaaaacggcctcatggacctgtgcgattgatgcacacccaactggtatctggttaatcttctgaaatagttgaccggggtcattatgaagttctttattcaagatcttccatatctcattaaaactcatcggttttacatccgtgcgaagtctcgctaactcatgacaatacttctctggcaatatatccgaacgcattgacatgatctgcccaagctttacataagttggaccaagatcttctaaaatactgcataacttctctggattgatcccatgtgtgacattatgctgatttaatacatgcaagatctctttcagtcttcctgtttcctgtttcataagtacctcttattgttcagtttcatcctcttgtacttgtgatgtctctgaatctgttgttgcttcactttcttccacttcaacatcttcttcagcttcctgtttttctttctgaagtgcctcagcttttgcaattctttcttttaaaagtgcaagatcttctggggacatttcatcaacacattcaaatgctttatcatatttcttagtcacttggatagatacatgttctttgactttctgttttgcattgtgctttaattcctgatttaacacttttccatgttctacagtacgttcacccttttcaatcattttctcaagaatgtctttggtaacttctgcagttgttgctgctgcacctacacttgcaagaaatacttttttcattccatttgtgaaatccatatgtcatcatcctttctataatttagcatgatcatttgtcacttttattttaccactatagatcttcaaggacaaccgtaaatggtccatcatttattaaagcaacttccatatgtgctccaaaaatacctgtctgtacaacatctatttccttgttgcattccttaatgatatattcatataattcttctgctttctttggatctcctgcctgtgtaaaacttggacgatttccttttctgcagcttgcataaagcgtaaactgagatactaacaacaattctccatccacatcttttaatgaacaatttgtttttccattttcatcttcaaaaatacgaagattgatcatcttacgaatatatttatcggcttcttcttttgtatcttcctgccctacaccgatcaaaactaaatatcctttttttatcttccctgtgtattcatcatctacttttaccgatgcttcttttactctctgaattacaaatttcattgctttcccttcctttaaggtattattttctttaaatattcctacataaagaaaaagatcagaaattaaaaatctctgatcttttatatccttatgtaagataaataaatcctagttgttgattaatttatcttcgttgctccagctgtataagctacggatttcttttccgacaacttcagactgatgttcagcagctaattttctcatagctttgaagtgaacctgagatcctgcatcagacatatctaataagaagtctttagcgaatgttccgtcctgaatatctgtaagaacctgtttcatagctttcttagtatcttctgtgatgatcttaggtcctgtgatgtaatcaccatattcagctgtgttagagatagaatatctcattccttcgaatcctgactggtagattaagtctacgatcagtttcatttcatggatacactcgaagtaagcgtttcttggatcatatccagcttctactaatgtttcgaaaccagcctgcattaatgcacaaacaccaccgcaaagtactgcctgttctccgaaaaggtctgtttctgtttctgttctgaatgtagtttcaagaacaccagctcttgctccaccaattcctaaagaataagcaagtgctaaatctaatgctttacctgtagcatcctgttcaacagctactaagcaaggagttccttttcctgcctgatattcgcttcttacagtatgtcctggagctttaggtgcgatcatagttacatccacatcttttggaggtgtgatgcatccgaagtggatattgaaaccatgagcgaacattaacatatttcctggctctaagtttggttcgatgctttctttgtataatttagcctgtttttcatcgttgatcagaatcatgatgatatcagctttcttagcagcttctgcagatgtgtacacttcaaatccctgttcttctgctctcttccaagatctgcttccttcataaagaccgatgataacattgcatccagactcttttaagttaagggcatgtgcatgtccctggcttccataaccgataatagcgatggtttttccatctaaaagtgataagttacagtcttcttgataataaatctttgccatttttcattcctccattttttggctttatagtaagggtcctgacccgttactctcatcaaaatatattagagttatcttctcctcttgataaaccagtgattcctgttctcacaatttcgatcactccaaaatcactgatcagattgataaatgcttctatcttattcacattcccagttaactcgatcatcagattatccttagatacatccacaactttcgctctgaaaatatctgcaatcgtgataacctcctgtttctctgtcttgtttgcacggatctttgcaaggatcaattctctgcaaacagacttactgttttccagttcaaaaatcttcacaacatcttccagttttgaaagttgattcttgatctgtttcaagatcatatcatcaccgctgactgcgatcgtaattcttgaaaacttctgatcttgtgtcgtacatgctgtgatgctgtctatgttataccctcttcttgtaaataaaccagaaattcggcttaataccccgggagtattctctactaaaatagaaagaacgatctgtcgcatatcttttatttcctttctttgtcttattctatcaccgtaatggtatattacagggtattggtaactttttttattctaccaattatacaaatatgtgtcaagaaagaatatgatatgacagtgattctaccttgacacattttcattttaatttatttttgtttattcttcttcaacagaatcaccagaaggtgttgattctggtgccgcagctgtcgttgtatgatgtgctgtggttggtcttggtgcagatgtctgtggctgtgacgttgtactttctgtcacacgttcttctgtacttctcgtagttgtagaccttgtactataagttgtacggctgctgcttgttgtgctgtaactttcctgctgatagctgcttctcgtactagatgttgaatatgatgaactgctgcttgttgagtcagatgatgatgttccggaatatccaaatgtctcaacagaagatgttcctccatattcttttgcccagtctttttcactgcctttgtcaaataagaaataattcatggctgctttattagcactaaagtttataaagaatacgaacatattgctctgtgctcttcccatcttataagtaccttctaatggcaccctcatctgatcgatctctgtcgtccccatctgaacaactttcaataccagactcttcaggtattttgcactcatatctgttgatacatcagctaatgaatctaacgcaatatctgcgatctttgttgggctctgctgcaatactttattaagtgctgcttgaagtaccgctctttgacgacctgttcttccaaagtctccatctccgtatttcttagaaacaacgtaacgaaccctggcatatcctaatgcctgatttccattcaatgtctgttttccaacctttacattacggtatttcttctttgaaatgtaatttgttgtattcaggtattttgcttctttttcttccagcgaaatttctacaccgccaactttattgataactttctcaaatgttgagaaatcaacaacacaataattgtcgatcttaatcccaaagttcttagcgatcgtctgatataataattccacaccaccaaatgcataggctgcatttaacttgttatgtccatgtcctggaatctcaacatacatatctctcatcaaagaagtgagctttaattcttttgtcttaaaattgaccgttgcaatcataatactatcagatcttccgtgatcgcctttgatcgctccatgatcagatccaaccaataagatattaataacattcttattaaatgtcagattattatctacctttacatctgtcagtgtacttccattcttattattcactgctgcttctaatcttgcatcataatatccaagcactccccctgcagcaattcctatgatcaaaaacagacttaggataattttaaacttcttaatcttcattcgtgtcctcctcacaattatctgcttatcattatagattatatcatatcatatgaaaaaacagtaggtgattttattaagtttttgttaagctttccaataagtctgattcatcgtaagctttaaaaccatccattttggcagttttttataatttcttccaagtttatatccgatcaatttaaatcctgtatcgatcacatactttggaatgagatatattttccccttttttaaaagatgcttgatcgtcgcaataaccatttttacaccttccgattctgatctcactttaaggaataatcctccatgctctacttgtgacactgcaagatcgaaattcctatgtaactgttctatcgccttgtaatcatgccaatgccatacccttgcatctgcctgataggcaactgcctttccatcttcgatcatctttgaagccatgatcatgtcctcgttaaagattgttttatgctcgaaacctcccattgcatcatactctgatcttcgataagcactgcatacatttgaacagaaaaatgttttgattcccagagtatccagatcctccttcgttttaactctgctttccagaggataattaaagattcttgtataatactcaatataatttttttcaggatctgccatctgccttccataagcagccgttaccattggatcatcaaatgctttgatcagattttccaccatatatttatcttttggaatcgcatcatctgtcataaacattaaaatgtcagcttctttggcaagcgatgctccataatctcttgttttcccatgatcaaattcttcttttttaatatgatgaacttctacattatcatatggagtgatcattttctcatcaaaaaattctgcctctgtgttaactaaaataatgcggtctggttttcttgtctgcaatgcaagtcgttttaatgattcctgaaacttgtctcctggcttgtatgttggtatgatcaagtcaattaccatgatttttcctttctatcttagatctatctgcggactttagttcctttgctatctctttttgatagttttaaccgatgaaattccagttctttttctttatatacgatagaactgatattctgtgcttccatcacataaatattcgttagtgaatcatcttttgataacttcattccacgaacacctaatgcactcttcttcttttttggaatctcggaaagcaagaattttaagaaaactccttctttcgtctgaagaactactttgtcttcagattcttctgtccagtctaccggaatcacttcgatcaactcatcttccgataatttagttgcctgcacagttctctttgctgcatttaacaactctccatccatcacttttaacatactttttgctgttgcaaataaaagtgatgaatgaatcattgattctgcatccagcacctggatgatatattcttttgtactgtcataattacataaattatcaattggtacccctttatccctgaattttccggctggaatatccagtaccttgatctggtgcatcacaccgagattggtaaagatacagatcttatctgtattcatacaaggcacaataaacttgtattcttttaagatattttccttatttctctgataagttgccttatccattgtcttggaatatccaaaacgatccatcacaaaataaaccgtctcttctttgactggtgcagcaacataaactgcctcttttccatcttcgaccacagttcttctttcgcgtccaaattcttttttaatcttatctaattctttacgaatcacgttctttaaagatttttcgttatttaagatatcttcatattcttcgatctttgcaagaatctcttcatattcttcttttaacatcaaaatctctaatccgatcaatcggtataatttaagatcaaggatcgcacttgcctgtttgtctgtaaaagaaagcttggttgcttcgatcatagaatcggaagacttgaaattaatatttccaacatctcctttggtaaggcatgcctttacttccttctgactcttacttccacgaatgatttcaatgatcagatcgatcatatcacatgctttgatcaacccttctttaatttctctttgttcatataattttgatagtaatgttttatattttcttcttgttacttcataataaaactgcgtatgattttcaatgattcccttaagatccagtgtctccggacgtccatcaacgatcgccagcatattcacaccaaatgtatcctcaagttttgttttcttatataagagattttttaagcgttcaacatctgcaccctttcgaagttctaatacaattcggattccatctttagaggattcattggaaatatccaaaatatctgttgtcactttgttctctatgagtgctacggtatctgataaaaacttggaaatattatttccgatcattgtgtatggaatttctgaaattaccagtttatctttttccccacgtttctttgctggttcaaaagttacttttcctcttaattttaatttacctgttcctgaagaataaatatttaacaaatctttcttattgatcacaagaccgcctgttggaaaatccggaccttctatatattccatgagttcttcgtttgtgatgctttcttttcgcatatatgctttcactgcatcaacaacttcccctaaattatgtggtggaatactcgttgtcataccaacagcgattccatctgctccatttaccaataagtttggcaccttaactggaagcacttcaggctctttttctgtttcatcaaagttcgatacaaaatcaactacatttttgtcaagatctgcaagatatgcttcctgcgtgatcttctgaagtcgtgcttctgtatatcgcatagccgcagcgccgtctccctctatggaaccaaagtttccatgtccatcaacaagaggaactccttttttgaaatcctgagacataacaactagggattcgtagatggaactgtcaccatgtggatgatatttacccatggtatccccgacgattcttgcagattttcgatgtggcctgtcataacgaagtcctaattcatccatggaatataaaactcttctctgtactggctttaatccatctctggcatctggaagtgctcttgcacaaataacactcatcgcataatcgatatatgatttttgcataacctcagaaaattctgctttaataatatgttctgacattatctattgtttcctttctatttatatatctaacatcgcttcatttgcattttcataaatgaactgtctgcgaggtggtacgtcgcttcccatcagcatagaagtaacatcggaggccattctggcatcttcgatctcaatctgttttaatgtacgactttctggattcagcgttgtctcccataactgttgcgcatccatctctcctaaacctttataacgttgtaaagtaaagtttcccttatgttctgcacgatatcttgtcagtgctgcatcatcaaacagataagtttcttcgcccttttttggcattgctttgtaaagcggcggtgttgcaagaaatacatgtccatgcgtgatcaattctggcataaaacgataaaagaacgtcaaaagcaatgttgcgatatgtgcaccatccacatcagcatctgtcataataatgatcttgtgataacgaagcttactgatatcaaaatcatttccatatccttcagaaaaaccacatccaaatgcattgatcatcgttttaatttctgcattcgcaagaactttatccatcgtagctttctctacatttaagatttttcctcgaattggaaggattgcctgtgtctttcggtttcttgctgtttttgcagaaccaccagcagaatctccctcgacaataaaaatctcacagtcttgtgctttacgactttcacagttcgccagttttccgttgctgtcaattgacaacttctgttttaccagcatattcgtcttcgctttttcttccgctttacggatcttcgctgatttttccgcacatgccagcactttttttaaagtatctagattcttatcaaaataaagaaccaattcttctcccgcgatctctccaactgctttggctgcatctggattatccagtttcgtcttcgtctgtccttcaaatcttggttctggatgtttgacggaaacgatcgctgtcataccatttctcacatctgttccagtaaaattcgaatctttttcttttaataccccgatctctctggcatattgattcatgatcgtagtgaatttcgtcttaaaccctgtgatatgtgttccaccttcgatcgtataaatgttattacaaaatcccagaatattctccccaaaatcctctgtatactgaaatgccacttctgcctcaattccatcaatcattcttttaaaatatactggttcatgaagcatctgttttccttcatttaatttctttacataagcgcagattccttctggctcatgataatcaactgttgtttcttcaccttctcgttcattcacataatgaatcgtaagttttggattcaaatacgcagtctcatgcaaacggtttctaaccattgctgctttaaaatatgtcttatcaaaaatctctgggtctggtaaaaactggacgtttgttcccgtatctgattttctacaggtaccaatcacctcaagaggtgttatgatctttccacgctcatatctctgctgataaacctttcctccctgttttacagttaccgtaagccaggttgaaagggcattaacaacggatgcaccaactccatgcagtcctccagaaatcttatatcctccatctccaaacttacctcctgcatgtaacatggtaaataccatctctaccgctgtttttcctgttctttcattaattccgaccggaattcctcgtccattgtccgtaatagttgctgttccatctttatttaaagatactgtgatctcatcacaatatcctgccagaaattcatcgaccgaattgtctactatctcatatattaaatgattcaatcccttggtagatacacttccaatgtacattccagggcgttttctaacagcttctagtccttctaaaaccgaaatactattagcatcatatgtcttatttgccataaatacgcaactctcctttttctctttcggttatctagtgtatcacacaatgatcttcttcgtcaattgagctgtttcttatagccgtcattcgacagtaattgactttaccttccaaaatctctataatgagatatgaataaactagaaaggaacaataagtatgaaacgtaggattttcaaacagttcctatccggtatattagggatcttattactgctatcccttgctggatgtggacagagtacaagtaactcaaaacctgatgacaccatggaggcattctatgatctgatcataaaacaagatacaacatcgatgacagatcttggaattgataattctgaagcatctgatactttaaaaacatatcagacatccatgatatcaactcttcagaagagttttaagaatgcaggcgttacgatcactaagaaacaagcaaatgagatctataaagcgatcggcaacaaacttgcttccttagaccacaagatcacggtaacaggtcaagataagaaaaatgcaacagttaaggtgtctagccaatacatcaattatctggacatttttaaacaagcaaaacagactactttggatgaattaaaacctcttcacattgagaacttatccgatgcaaagaaacaattagtatccaatgtgatcgaagctttcaattctactgatgtatcctctgatatgcatacacaaacatttaaattaaaactacagaagatcaaaagcggtaaaaatacccttcatatcttcttcccggacaattatgaagaagtcggatctaaactcatgaaaaatgcaacaaatcaataaacataaaaggttagcagtatgatcacactgctaacctttttatattgatcctaattacaattcatctgcttccatcatctgcctgagcagttcccttgcttctctgcagcgatttttaacacttcgctctgtaattctaaataaatctgcaatttctttacatttcaatccataaacatatcgaaataaaatcgtatctcgatgtcttcgtggtaatgccgccagattctgttttaaagattccagatcgatcatctgcagataattatctctaggatcttcaacaaaatccccttctgacccatcttcatatgtaagactctcgtgttcattattcttttcatttttcaacaatgtaaaggattcattctttgttattgccgtaagaaaataaaatacttcttcctctggcaccttcaaaatactttccggatataccaatgctttttcaaatacactttgcaccacgtcttgtgctagattattgtctttcacatgattctttgcaatacaaaataacttccttgaatatgcctcatacaatttctctatgtatttgatcgtcttttttcctattggttttctctttcgaattctcataatatttcactttcaattttcttaaattgtttttttctgaactattataaagatatattgttctattacaaatgtttgtataatgatctatccaaataatagctcttcaaaaatgatttccatgttttcttgcgaatattcaatctcttttgagtaaattcgagcaatctcctgcggtgtcttcaaaatatgatttctcttacaatattcattcatctgttcaattatcaaacagcttaaaattgcgaacttaactttatcgatcagattattatcttcacaggatttcataaaataacgataaataaaataacttatcaaatgttccatatatgactcatcgattcc

SEQ ID NO: 645 - DNA, 462 bp, Unknown
  gut microbiota DNA sequence
cattccagaaagcaagagatgtatatgcagttgatccagaaacaattccaaatacatacttaaaatactacctgttcccagattatgttgtagagacatcaaatccagaatacacaagagcgaacgaagttatggatggaagagagaagttcatcttcggagaatgcagaaagatcatcgaaaaaggaacagcagtcggaagtgcattcgaaccagatgcacatgcaacatatatcgtagacttagcatgtgcgatcgcagaaaatacacaggaaagattcttactgatcgtaccaaacgaaggtgcagttgagaactttgaccgtacagccatggtagagatcccatgtatcgtaggaagcaacggatacgaaaagatctgtcagggagcaatcccacagttccagaaaggattaatggaacagcaggtaagcgtagaaaaactgacagtagaagcatgga

SEQ ID NO: 646 - DNA, 719 bp, Unknown
  gut microbiota DNA sequence
gcggtaaactttttaacacagtatttggaattgattatcatatagctctggcaattggtgcagcagtcattctctgctatacatttatggggggatttatggctgtatgcgtaactgactttgtacagggaacactgatgctgatcggtcttctgatcgttccgctggttgcatatctgacactgagcggaagtctgagtgatcttctgacacagagcggagcaccgggtggagcagcagctttcctgaatccttttgagaacggagagcgcccatatacatttgttgaaatcttttcccagcttgcatggggacttggatactgcggtatgcctcatatccttacccgcttcatggctgtaaagagtgagaaagaattaaaaaaatccagtgcgatcgcaatcgtgtgggatatcctttctctgacagcagcgtgctttatcggtattataggtcgtgcatatctgcttccgactgtacttggtgaaaatggtgcatcttcctcagagagtgtatttatcgagatgatcaataaactgttttccagtcatctgggacttccgtttatcggaggaatcttcctctgcggtattcttgcggcaattatgtccacagcggattcacagcttctggtaacagcgtccgcagcatctgaggatttatatcatcagttcattaagaaggatgcagactcaaaggaaatccttgcagttgcaaga

SEQ ID NO: 647 - DNA, 14035 bp, Unknown
  gut microbiota DNA sequence
tactgtgttttagcggataatcagatttttattgtgttttgaaattaaaaacatgcaaatcaatatagaaatgcatgttaaaaaatatagtattctattgtaattcctttaacgcaagcaggtgtttcatggattgtttctaatatccttttgttggggaaactcccttttcccatttgctgatggtttgtcttactacgtgaattttgattgctaattcttcttgtgtgtatccttttgcttttcttattattttcagattctcattaaacataattattgtctctccttatattttgatgtattgaatttacaccaaaatatgtcgttgcggcaagcaacgtgggttaacattatccttttatcatctctaacaattctggtatatcattttttaatgtttcaaagacaatatttaaatcaacatttccataatcgtgtacaatacgatttctcaatccatacatagcattccatggaatatatcctcttttctctttatactcatccgacaatttctttgcattttcagataactgaatcattcgaaacaacattgaatccagtagtatttcatttgcgttcaattcttctatatctacatctttcatatgttgtactataaattgcaaatcgtttcgtattttttgaatgtaataacgatcattctttacattatccatatatttttatcccatcttttaatatttcttgtgttaattctaaattatcttttaattgattaatttctaaaacatctacttttttgtgtagtgcttctctaatttcttcgactaatccataaaattttagtccttttacatttgctgaaattaacagatccacatcactggttggctttgctttcgatttagcgtaagatccaaaaagataacaaaaatttacatcatatttttgaaatacatttccgcatttttcagttatatattctatatcaataattccatgttcttcgtctattggatttatttctgaaagtttttctaatatatatttgtatttcaaacttccttgttttttctcatcattctcatatgatttataagaacgtaaagatattcctaccaaatcagcaacttgttgttgtgtcatctttttttcagttctcattttttttaactcacccatcataattgcacctcttaatttataatagtgcaatttttgcacttcgtcaattcgaaggtgcaaaaattgcaccattatttaaattctataataggtatttttttcttaataaatttttttattctatgatcatggctggcttatctgcatattcatcgagaaaaatcaatactttcttgccgtataaaagatttagatcactggataacttccttgtaacctttgcattccttataaatctacttttgaaattccttccgcaaaacctctttcggtgcctcaatctcatttgccaatgtatgttccgttaattttgacaaaatttttaatttcttattgatcatcgggcgcatgcagtttggaacgtgttcctgatgggctctgtgaattgccacacattctttgcaatttccatgatatctacaggctttttgacatgggcagtggtctttgtctgcatattcttttcgaaattctgatgcgaattcttcttgtaatcttaaaccttctgctctgtttcctttgtggaattctgccattgctgcgatttctttttcattatattcgattttcatatactatacctgctcctttatccatatggattttctttcaatttgtattataatagaataaatgaaacgatgccatgataaataaaaatataatgaaactggaaagagataatcttaaaaatgaaacgaattgattttgaaaatgggtctgtaacccaaaatatctttgcagcagcacttcctatgcttgttgctcagatcttaaacttattatataacattgttgaccgtatttatatcgcacgaatcccacatattggaacagctgcacttggtgctgttggactgtgctttccgctggttgtgatcattactgcatttgctaacttatttggaagtggcggagctcctttattttcgatcagccgagggcaaaagagaaataaacaggctgtccatatcatgaatacatcatttactatggtttgttttagtgctgtcgtattgatgctcattgggcttttatttgcacgcccgcttttgatattatttgggtcttccaaggatgctctcgtttatgcttttccatatatgatgatctatctgatcggtacactgccatctatgatcgccattggaatgaatccatttattaatgcacaaggatattcaaccatcggtatgttttctgttgcgatcggtgccgttgccaacttattgcttgacccattctttatttttgtattggggtttggcgttcggggtgctgcgatcgcaactgtgatctcacaatgtctttctgcttcttttgtattatttttccttacaaaaaaagcagaattaaaggtacgttttcttcataaaaatgagctgtcagaaagtttaggatatgcaaagaatatcatcagccttggaactgccggatttatcatgcagttaactaacggtctggtaagtattgtttgcaacaatgtactttctgtgactggcggagatatttatatctctgtcatgacgatcgtatcaagtgtacgacaacttgtggaaaccccgatttatgccatgaatgaaggcggttctccgatcttaagttataactatggtgccagacgtccagctcgtgtaagaaaggctatgatcgttatatctgctatgatcctatgctatacagccgttatgtggagtgttatcatttttgctcctggtacattgatccgtgtattcagttctgatccttcacttgtaaaagattccattcctgcattgaatcagtattttgctgcttttatctttatggatctacagtatattggacagacagtatttaaatctctaaacaaaaagaaacatgcgatctttttctcattgcttcgtaaggtatttattgttattccattaacttattttatgccttatgtattgcacatgggaacttccggggtattccttgcggaacctgtttctaatgtgatcggtggaggcttttgcttcattacgatgctttgtactgtgctacctgaacttagaagaatggataactgtgattgatctttttatgttaaaattttctctccagttcatccatctctgccattatctccgcttgctgttcatcaaacaaaagccctctattatactggtagtacttatcacatccattttccttgataaaccagacactgtaataattaacattcagttctgtcacaaatacaaccatttcctgactttgtccaaaggcttcttccatgaagtcaaatgcattgtctagtgctttggttgtattctctatctgctgttctaattttgctggttctttcttgaattcttctctcacacgttcaaattctgcttctgcttctaaatgttcagctttgctgatctgttcgtatgactccagagtcttgatcacatcaagcagcatatgttcctgtgcttttccaagtttctctgtctttttcttttcgtcgaagtcctcatggatttctttgactacctgacttaatgtcttgcctgttttaagttgttttagccagccaaataattccgtaacataagcatcctgtcgataagattcagcaaacatttcagacaattttccatttaacaatccgacaacacttaatttctcatcaaatgctgcgaattttaatctgccgatcgtttcctgattccattgtccttttaaaatacgctcgattccatagtcttctttgtatttcttatataattcataatagttggcaaagtctttggcgatcttcaggtgctgtaagtactgaaataccacttctctgtcaatatcttttccaagttcttcgtaaacttttaataactgagacagatcttcccatcctctggctgtaacaaacgcctttccatcaactgttgtttccatacgatagaaatattctttacggatttcaagatatgcaaggattgctgggtggattcctgcctgatatgcgtattctttccacacttcatagtctgcttccacatcaattttcttcatacggtccaaggtaactacgtcaaaatctctgacagatttattgtattctggtggatttcctgccgctacgatgatccagccatctggtactttctgatttccgaacatcttacactgcaaaaactgaagcattgttggtgccaatgtctcagatacacagttaatctcatcgataaataaaataccttctttatttccagtctgttcaatcttttcataaacagatgcaatgatctcactcatcgtatattccgtaacagaatatgtttgtccactatattctttttctctgataaatggcaaaccgatcgcactctgtcttgtgtggtgcgtgatcgtataagctaccaatccaatctcacattctcttgcgatctgttccatgatctgtgtttttccaattcctggagggcccatcaaaaggatcggacgctgtctgatggatggtattttatattctccataattatcctttgtaagataagcttcaatggaatctttgatttcctgttttgctcttttaatattcatgttcttcttctccttcatcaagatcttcggcatcgacaatcaatttaactgcccatggcggtacatccacatcttcgtattcttcctgcataaaaataaatgctgtctgatatgatggtttcttctttggataggttccttttccatctgtgaaatagatcaatcccttcagatgataaaattcaccctgttcgatcagatgattcacatattcaaatgctggccggaaatctgtcccaccttctccgatcagttccaaatgttccatatattcttttaattctttttcatctgtgatcttctggtcgttttgtaccatctcatcacactgaatgatatgaatatttaccttatgaaaaaagctctctgcttccgttaacacaccatatgtttcttccagaaatttctttaccagatcaccagaacatgacatcgatgtatcgatcacgatggcaaagtcttcaactttctttacttccttccactcctgcggctcgatcaatggcatatttccatacatagaaagcccataactgtaaaatatatagtcaaacgaatctggatccacactgacttcttctcttaaaaccgaaaattttcttaaaaattcacgataatcataacggtctctgttttctacctgtacctgtccgatcagatcccctgcttgttgtgactcttcactggaaaatgtctccatatctgtttccgttttttcactgatattcttccatttattttctacttcctgatgaagatcttgcttgggatcttcgggccaatactggtggtcatctacccgaaattccatctgcagttcttttattttcttctcttctaatccaaaagaaactaactgtcgataaatcccctcggctgtcaatactttgaggttcctctcaagctgcccgtaaatgtctttgcgcagccttgtttgcaccatatggatacattttaaatgccagtgatcaataattgattcgactgcgatatcacaagaaatattccatagagtcttatctcttccttttcttcttgtcacatgatgtaaaatgcagtgaagcaccatatgaagatatgcacgattcatccggactctgttttgcctgtacatgcctcctaaagcccctggatgataaaacatacacattccatccgttccaacaccatttacagaaggatcgatcacataagcaaaactgcttaatgccacatctaaaaaacgcatatggatatataattcatttcttgtcgtcgcaaggatctttgttccaagttcactgagacgctcattgatattttcttccattattcatttccctttatcttatctataattcaaatgttttctttttctttggaaatctcttatgttgttcgttcatcaaaatacttaaaagttctgttttctgctttctagatgcccagtcgatcgctgcttcgattccttctttactgaaataattcttctctgccatcaaattgataaatagcatctgatcttcttcttttaaataattcatcatctcacattggttctgctttacatagccctcgtattgcatccatgcaaaatctgataccccgtatggcattaacatacgcccagctaatatctcccatacaatatccagatcttcctgaactgctgccactggaaaaatatcatcatatttacggtagtcgatctctcctcgcaaaaaactttggcgatattgatatcctgttccatgaaaatgtgtctccacaattcttgctggtgtattttccacagcctcttcataatactctggataaaataaacgactttgtttttcttcttttttataacggatatttacctgcaatggaaaacgagtatctctaacaacgtcccttaaagcactttttttatcctcataaacatcatagtagatcttttgcagcttgcatcctgtaaaaattcctgctcctgttcttaaaagagaatctgaaaacccaagtgttgtcagatttacacatccataaaatgcatatttccctatttccacagtatccggtggcagataaacttcttttactgcctccccacaaaacatcggttcatcttcactgcccaaaaagtcttcgccgatcataatctcttttgcttcgtcttcttttcgtttatgcgcagaaaatgcataatcaccaatcttcgtaactctttttccttcaatttccgaaggaatctctacttgatcttctttgctgaaacaacgaagaacttcgattcctccatcttttgcatctctgtattgtatcttaagcatcgtcttttccttcgcctttctccatgtatacactatccttattatagctgactgacaggaaatatcaagaatcgtaaaaaggaatttcccatcttcataaaaatgtaatataatgcagaaagatacgatgattttatacacttatgatgatatataaaggagatttttatggaacgactgatcgttttaggaactggaaatgcacaggcaattcattgctataatacttgttatgccatgcaaaaaggtgaagaatacttccttgtcgatgccggcggcggaaatggaattctatctcagcttgacaaagctggaatccctcttgaaagcattcataatatttttgtgacacatgctcataacgatcatattttaggaatggtctggatgatccgtatgatcgctacttctatgaacaagggaacttatgatggtactctgacaatctactgtcatgaagaactggttcatacgatcaaaacactgacaaaacttaccgttggtaagaaattttataagcattttgataaacgtattgtatttcatgtcattgcacatggagatacgattcagattcttggagattcttttacattctttgatatcggctctacaaaagaaaaacagtttggtttcacatcggttatggaaaatggattaaaggtatcctttcctggagatgaaccttatcgtgaatctctttatgattttgtgaaagattctgactggctgcttcatgaagcattttgtgtgtatggtgagagggatatttttaaaccttatgaaaaacaccatagtacggtaaaagatgcctgtgaattagcagagtatctaaagattccaaatctggttctatggcatacagaagataaaaatatgctgcatcgtcaagaaaaatatatcaaggaaggcaagcagtattatactggaacactttatatacctgaagatctggatgtattgaaattgtaatttggaaggttaatgatcaaccttccatcaaataataaatgatcgcagctacaacatcataggcattttcctgcaaatgtattccgtccacggtatactctcttgacaactgcccatcttctccgatcaatttatcaaatacatcaacatattcaaagttatcttctttacacaatctttgtatttctgtattaatcttttgaatctctttattggattttccttctgcccaggacggcatcaatccaatccttttggtatatgccggatacatagattcaatataaatctttgtatctggcaattgctgccgaatccttcgtgcaagtctgatcaatcgttctgctaacactcttgctcctggatacaatgacatcaggaaatcatttgcaccaccttgcatgataatgatatctggtttatatggaaatacgtcataagccagtcttgcacccatctctgcgatcgtatcccctgcaactccgctgttaatgaactgcgcatctatatcttttaatttttccattggaaaatagtcggtcagggaatccccaaacataacaattgttctcttcttctcttccattgtctactccagtactttttgtttaaaatcctctttttgctgcatggaaatatttaatcccttgatcataaactgattaatagaaccatattcttctttcatggttttaagtgctgcatttaaaaattcttcttttgccacaaaatagccctctatttttttgattctttcgcgatgcaatcctgctaaatgaagtttcttttttaatttttctactcttgtgatcgcagctttattggtctttagataatcttccatcacgtcatcttcagacacatcaagcaaaaataaaatggttgctgataacaatccacaacggtcttttccttctgtacaatgccataaaaccgcaccattttttgtattcataatctctctgactgcttgtgagatctgctttctgcaaaattcttctttgatcatcatcttataaatatctgacatctctggaaattcttccatatgtaacatctgttttcttgtttcctgctcccggctgactcccaccatgctttccaaaaaaaacggaatattctcataaacagctcccgccacttccagatctggctcttgttctacttccattggtgttcttaaatccagaattttctgtaaatgatattctgtttccagtaaaatcttatctttctgcgtaatccttgataaacggttgctacggatcagctgtttatctttgatcactgcaccttctgtcgtttttaatccgccaaggtctctcgtattatctgcaccttccagataaatcttccccatgttaccgcctccatttttgtatgatcagttttccttctgtggctgttctttctccaaggatattccatccatcatataagttttctcatttttctgattctccagatattctgttctgatctgtgcttttgcttcttcatagtctctctttaattctcttgcagaaagcagacggcagccttgtccgcggataatgatctgttccaatccatcggatgttgcaactgttacatcgtattttcgtccatgggtatgggcaaatttttcaatatactgatctgctgtttctgcttcttttgtgtagactacatgaatattcatgtaatctgtgatctctgtttcatgtcctttcacacgatatgcatcaaacacaacgatcagctccatgcccttcattccctgataattactcatctcatcaagtaattttcctctggctgcatctacattcgtatctaataattccttcagatcatcccatgcgtaaatgatattatatccatcaaccagcaggtatttcttggacatatctctttttaccgatgatttttctgcagatgtatgataatcctgcacaagtcttgctgttttcttcttcttccatttacttttattatgctggtttgcataaaatgtttgttcaagaatccgatcgatttcctctgtatcaattgattcttcttcaatataagcccttcgctgtgtcagttcatcaaattcctcttcctcgatttctttcgcaagaacgctctctaaatgcatatgttctggtacctcattccatgcgacattatacccggctccatgggaacagaaaacagatccacatggattttcaagatctctatctggatcatatccactggcttctatgatttcttcttcattatggcagatatcatatccatttaaggttgtaaataatcttcccatacctttggaatatgctaatacttctttttggtatccttgcatcgtagaaactggtgctattccttgaagcactgacatctctcctgtagtatctggtgtatcaaacgtaccttgcatcttttcaatatctgtcatagctcttccgatcatctgctgtggaacttccagccggaacttataatatggctctaataaaacactctgtgccatacgaagcccctgtcttactgcacggtatgtcgcctgacggaaatctccaccttctgtatgcttctgatgtgcccgtcctgctgccagcgtgatcttgacatctgtgatcggtgctcctgttaaaacccctctatgatctctttctaataaatgtgttatgatcagtctctgccaattcttatccaatacatcttcgctgcactgtgtgtcgataacaactccacttcccctctccagcggttccatcaacaaatgtacttctgcataatgtcttaacggttcaaaatgcccaacaccttctacaacatctgctatcgtctctttgtatacaatattgccctgtccaaattccacatctacatcaaagcgttctttgatcagactctttaggatctccaattgaacctctcccatgatctgcacctgaatctcttgtaattcttcattccagatgatgtgaagttctggttcttcttcttccagctgacgaagttttggaagtatcacgcttgcacttgtctcttctggcaatatcatctggtaagtaagtactggctccaacacaggttcatatccgccctgctctgctccaagacactgcccagggatcgtatctgaaagtcctgtaaccgcacagattcttcctgcctgcagttcatttactgtctcatacttttctcccgaatagatacggatctgattgatcttttcatcactttctgtaataactgtttttacctttaaatttccacctgttactttcaaatgtgtcagacgatttccattttcatctcttgtgatcttaaatatacgtgcaccaaattcctctggatattctctttcttctgtataaaatgcaagatcactcagaaattcattgactccttgaagttttaacgctgatccaaaaaagcatgggaaaatcttacgttctgcgatcatttcccggatcttggattccgtgatctcacctgattccagataatgatccagtaacgcctcatcttccatagcgatcatctcataaaactcatcactgcccttttctccaaaatcaatacatccgctgcttaaacgttcctgtaattctttcaataattgatctttttgtgtcccgtcctgatccatcttgttaataaataaaaatgttgggatcttatatctctcaagcagactccataatgtcaaagtatggccctgcacaccatctgctccgctgatcacaagaaccgcataatcaagcacttgcagggttctttccatctccgcagaaaaatccacatgtcctggtgtgtcaagcaaagtaagatccatctcattcattgaaacctctgcctgcttggaaaaaatggtaattcctctggaccgttctagttcataagtatctaaaaatgcatctccattatccacacgtccgatttttctcaaattccctgcagtatataaaattgcctctgatagtgttgtcttcccggcatccacatgagccagaataccagttactatgtactttttattcttcataaatttctttttccttttttcgtattcactgtaaataagtataacacatatcctgttttcatgttaaccgaatacatccataagattatttgacaaatttttcttctatgttataatcaaaaattagtgctcttctttccatgtataccagaatctggtataatgaaagttaataaagagacggcatacaaaccacaaggcatacgaaaggagtttcttatgagagatgctttacgggatgaaatgatcaagaaaatatgcgtcagagatacagataatatattagatgtcggttgcggtgatggtacctttttacatgaactgacacgctggaaggatgttgaaggatatggtatcgatgaatctgaggataagattcttatcgcaaagcaaacttggccagaacttcattttgagacaggttacagtgattttctttcttttgatgataacagctttcgtgtgatcactgtatgtgacgatttccacacctttaaagatccacagaagtttgttaatgaagcatttcgtgtcttagttcctggcggaagactttatgttggagaatctgcccttcctgaggcattgcgaattgtttctaatattccttcctatctgacttctggtgatgatcgcagacattctacttatgagactttagaatattttaagaatgcagggcttaccaaattccgtgtatataaaaagaaacgtttacttcttatctctgcaaagaaaccattagaataaattccagaacttaaaatggagctgatacgatctgtatcagctccgtttttcttatactttaaacaaccatccaagatatttatcttttgttatttttctgatcgtttttttccctaaaagtttctccatcttttttcttgctgtattgttgatccttaccttgtcatcttttgttacgcatagatccgggaacatgacacaccaccagttgtgcccttttgctgctcccagatcgattcttactgcatcgtaaataccttctggaaatgtatattggccatagtttttctctggaaatttttcttgtacaaaatgtacgtttaccttttgtttcactccctctttctttaatatttcctgtgctgtattttttattctgtttttttgcatttttaagattttaaatgcttcttccttcgtttttgcttcactcaattctggactgatctgatcgatcacggcatctcttactttcaatttatatgtctgatccatcctgctgttactattagctctcacatgaaatcgaatcagattgcttttcagattttgctgtattatgttattggattttctttgtcctgccacaaaaatcatacatgctatggtcagaaacagaatccctttgatcatgttttttttactcatattcagaggatgtcctgtttttttctttttatacacaacctctttctaattgtctgaaaattcatacaatatcaataacattttcttaaaattcagggttgacgaatctgaccagttatagtaacctaatatccatgaggtcatatgactgacggagcacgtggaatcaaccacatgggagtatgatcattaatcgccggccgtctgggcaatcttgtctggacgtgcggcgttttttagtttgttactacatttttgacagaaaaaatatctgtcagacctaaaaaatcactcaatttttctctttttaaatttttcacttgacacgctccactgtccagattttcactaaaagataaaaaagaatcctgatcattcaggattcttttttcagactgtagacaaactaggtgctgggatcatcccagcaccattttttcctttaaagttaaattgtatccaaaaatttcttagaaatcttcgcttttgtccatttagcaatccgttcttaccaagaaatcttgccagtttttttagattcatacatgcaaaagtaagcccggctttcatttccatccgtgcttttcctatgtattgtgtatatcgaaatccatggtgttcttttgctgttccaaag

SEQ ID NO: 648 - DNA, 8395 bp, Unknown
  gut microbiota DNA sequence
gcaatgtcattaagttaagaaaaacagagataaaagataagttttaaatttatcttttatctctgtttttatatattgacaaactcaggataaagagtgatgtattaggtaggaggtgaatgattatgaagtatgcacagaaagtaaaaaaacgttatttaactatattaaatgatatggctaaaaatcgagattcgtatgttaaaaatccagaaaaagattttacaagaaaaagaaaactatcctttcaagataccattaatacgattgttacttatgatgctggcagcattggccgttgcataaaacgctacattccaaaagttgaaaaaactccaactacttctgcatttcttcaacagcaaaaaaaattaaaattgtctgcatttcaaactcttttttacagatttaatgacccgtttccagataaaactttgcataatcttcatattttatctgttgatggtactggtgtcacggtccctatggacagaataaatgaaaataaagaatacgcacgcgtacgtaccaataaagactgtacccgacctgcttatcagtttcatgtttcctgtatctatgatcttatcaatgaaagatactgtgatgcttatatcgaaccttttcgaacacatagtgaaactctcgtattttctgtgatgttggaacgtaaaaattttccgcagaaagctctgtttatcgcagaccgtggctatgaaagttatctgctgatggcacagatccaacatgatggaaactatttcctgatccgtgcaagagaagattttggacagggcagtatgatcaaaggatatccatttccaagagatggtacttttgataaaacagttacctatatttatacgaaaacacaaaacaaaaggacaaaagctaatccagagctttataaaagggtcgctacaagaaattcaccctattttataaacaaagaacacccttatgtaaaaatgacattgcgttttgtgatgatcgtacttccgaatggacagaaagaatgtctgatcacgaatctgccagcaaataaatttccaccagaaacactaaaaaaactttattgtatacgctggaaaatagaaacatcttttcgtttgatcaagtattctgccaatcttctggaatttcattcaaaaaaaatagagtttttgcaacaggagatatgggccaagatgatcttttataactttacgacaacgatcacccaacatttgcgatataaaagagatcgtggaaagtatcaatataagccgaatatgaccaatgcactccaaatgtgcaaggactatctccgaaatgcaaaaactccaaatgatgtagaaggacatatattaatggaaatgactccgatcagggatggacgatcgtttaaacgagataagtccagacatcagagtgtttttaccactttcagacacaactaacatcaactttaatataatctttttgtaggcagaaatcaatctgtctttttggaatgcagaaaataaaaatctcaccaacaaacataatgaatatctgttgatgagataacaatactgattcttaacttaatgacattgcgatccagctgcgattctatcaaaactcctatggaattcgatcgttgctcacatgctatcttttattttttctctaaatacctgaagactttcaatcataaaattaaaagaattcaagctggtggatgtatgttaaacgtgattgctttttgatttatgtggtggtagacaggaagttattataaacaccaatacagtaaaacatacacactccgtagaagtttgaataacgtaaattatttgaatattataaaaagagatcatgtgtcggcaactgtacgaacacgtctgcacttagcgagtggatggtcgaatgaccattcaggagcttagtacagctacgtgagagtccgaacgaaagtgcgttgcagacacatgatctctttttataatattccaccaataatttccgctattcaaaattttacatttaacaaaaactttacacaactcttctttttgattttacatttctcaagtaacataatatctgtaattgatacgaacacaaagttcaaaaggagagaaagaactatgagaaagaaattattaacattagcagtagcaacagtagcagcatcaagccttttaacaggatgtggcggaagctcaagtaacgataagaaagcagcatctgatgaaaatatcacagcagtatccagagaagatggatcaggaacaagaggagctttcattgagttattcggaattgaacagaaagataaagatggaaataaagtagataaaacaacatcaagtgtacagattacaaactcaacatctgtcatgatgacaacagttgcagaaaacaaagcagccatcggatacatatctttaggatctttaaatgacacagtaaaagcagttaagatcgacggagctgaggcgagtgttgatactgtaaaagatggatcatacaagatcgttcgtccatttaatatcgtaacaaaagataaattaagcaaacaggctcaggactttgaaaactacatcatgagtgcagatggacagaagatcattcaggataatggatatatcaaagcagacgagaaagcaccagcttacaaatcaaacggagcaaaaggtaaagttgttgttggtggatcttcttcagtaacaccagttatggaaaaattaaaagaagcatatgcaaaagcaaacaaagatgtaacagttgaagtacagcagagcgattcaacaacaggtgttacaaatgcgatcgaaggaacatgtgatatcggtatggcatctcgtgatcttgcagacagcgaagctaaaaaaggtgtaaaagcaacagttatcgcaaaagatggtatcgcagtcatcgtaaataaagacagtaaagttgatgaattaacaagtgcgcaggtaaaagacatctacacaggaaaaacaacaaaatgggcagacattaaataagaaagaatcatcgatataaaggaatggtaataatgaagaaatattcagaaaaaatcatgcatgtcgtgtttttactcgcagcatgtgcctcaattttggcagtaattttaatctgtgcatttctgttcgtaaatggtattcctacaatcgggaaaatcggacttggaaattttgttttaggtaagatctggatgccaaagagtggaatctttggcattttcccgatgatcataggaagtatttatgtaacagcaggagcgattttggttggagttccagttggaattcttgctgcgatctatatggcaaagttttgtaatgaaaaagtgtataaaatagtaaaaccagcagttgatcttctggcaggaattccatctgttgtttatggattctttggaatggtagtgttagtaccagctttccgtaatatatttggaaatggtaactgtgtatttacagcatctatcttgcttgggatcatgatcctgccaacgatcatcggagtatctgaaagtgcgatccgagcagtcccagatagttattatgaagggtccttaggacttggagcaagtcatgagcgaagcgtattcttcgcagtgttacctgcagcaaaatcaggtattcttgcagggatcgttttaggaatcggacgtgcgatcggtgagacaatggcggtagtaatggtagctggaaatcaggctatcatcccagatggaatgttctcaggagttcgtactttgacatccaatatcgtccttgaaatgggatatgcgacagaccttcacagagaagcactgatcgcaacagcagttgtattatttgtatttatcttaatgatcaacctgtgctttgcagtattaaagagcaaggaggaacgttaaaatggaagcggtgaaagaaatggaatcagtagaaaagatccaagcgatcaataaaacgtcttggatacaaagaatgaaatcatataaaagaacgccgttatcctttgtattatggcttcttgtaaatgttgcgatgatcgcaactgtcgcagtacttgcatatttgatcgtttatattcttgtaaatggagtaccatacttaaattcacaattatttgaattaaaatatacaagtgaaaatgcatcggtattcccagcaatcattaataccttgatcatgacagtattatctttggtattagcagtaccacttggaatttttgcagcaatttatttagtagagtatgcaaaacgtggaaataaattagttgaggttgttcgtttaacagcagaaacattatcaggaattccatcaatcgtgtatggattattcggtatgttatttttcgtaaaagctttgggatggggattatgtctgctatctggagcagcaacaatggcgatcatgatcttaccattgatcatgagaacaaccgaagaagcattaaagtctgtgcctgattcttttagagaaggaagctttggacttggagcaggaaaactaagaacagtattttgtattatcctgccatcagcagttccaggaatcttatctggagttattttaggaatcggacgtatcgtcggtgagacggcagcattaatgtatacagcaggtacgatcgcagaaatccctgcaaatgttatgggatcaggacgtacactggcacttcatatgtatgtattatcatgcgaaggattacatatcaatcaggcatatgcaacagcagttgtgttacttctgatcgtgcttgtgatcaacgccgtatcttcatttatcgcaaaacgaattacgaaagggtaaccaattatggatagtaaaatgaaagttgaaaaccttgacctgtattatggaaaattcaaggctttaaaaaatattaatctggatcttcctaaaaatgagatcacagcatttatcggaccatctggatgtggtaaatctacacttttaaaatcattaaaccgaatgaatgatcttgtagaaggttgtaagatcacaggtaaagtaacattagacggagatgatatttatggtgacatggatgtcaatttattaagaaaacgagttggaatggtattccagaaaccaaatccatttccaatgagtatttatgacaatattgcatatggaccaagaactcatggaatccgaagcaaagcaaaattagatgatatcgtagaaaaatctttaagaaatgcagcaatttgggatgaattaaaagatcgcttaaagaaaagcgctttagggctttctggaggtcagcagcagagactttgtatcgcgagagcgttagctgtagaacctgaagttttactaatggatgaaccaacgtcagctcttgatccaatttctacttccaaaattgaagatcttgcggtagaattaaaatcaaagtatacgatcatcatggtaacacataatatgcagcaggcagtcagaatttctgataatacagcattcttcttattaggagagatggtagagtacggaaaatcagatcagctattttctatgccacaggataagagaacagaagattatattacaggaaggtttgggtgatttagatgagaaatcgattcgacagacagctgcttaagttaaatcaagagatgatcgacatgggttctttatgtgaagagatgatcacagctgcggccaagatcgttgcgacaagagataaagaactgatggatgatattgtaacaatggaagaagaaatcaatcagaaggaaagggatatcgaacgtatctgtatgaaacttctgatgcagcaacagccagtggcaaacgatctgcgtgttatctcagcagctatgaagatggtatctgatatggaacgtatcggagaccaggcatgtgatattactggaatcgttaaaaaagatgcagaagttcttacgatcagagagaacacacatcttgataagatggcaaaagctacgatcagtatggtaagcaagagcatacaatcttttattaaacagaatctggtgatcgctcatgaagtgatcgaacaagatgacattgttgatgaattatttaacagagtcaagaaagaaacaatctcattgattcatgaagatcctgggaaaggagaagagtgtgtagccatcgtcatgatcgccaagtattttgagcgaatcggagatcatgcaagcaatatcgcagaatgggtcgaatttgcgatcactggggaatataaaggaggaagcttgtgatttttgttgtagaagacgatccgaatatcagagaactggtgacatataccttacaaagtaccggatttgatgcctgtggatttgaaaatggatcagagtttttaaaagctttaagtgatggagagaagccagaactggtattattagatattatgcttccaggagaagacggaatatcgattttaggaaaacttcgtaaaaaatcagcgaccagagatctgccgatcattatgatgacagcaaagggaacagagtatgataaagtactcggacttgatagtggggcagatgattatattacaaaaccattcggaatgatggaacttgtatccagagtcaaagcggtattgagacgttccagcagaaatgaaaaaaaagacgagatcattgttggacaattaaagatttatccaaataaacataaagtaaaatcctgtgggaatgaagtgacattaaccaataaggaatttaaactattatgtttattggtagagagtaaaggaaatgtattaaacagagatcagctgcttacaaatatctggggatatgattttgatggtgagacaagaactgtcgatgttcatattcgttcattaaggcagaagcttggagaatgtggaaagcttatcgagacggtcagaggaatcggttaccggatcggaggcaacgaatcatgaaaatgaaacaaaagatattaaacaacatggtatacatcgcagttgtagctgtgctgatcacgacaacgcttattggaatgtttacatattatcgttatatggaacagataaaaacaggaatgaaagatgaggcggcctatttggcggcttcacttaattttgaggatcagcaaaatctcgataaatataaaaatattacaatcacaaggattacaaggatcgctaaggatggaacggttatttatgatagcagcgggaaagaaaaatccatgggaaaccataagaatcgtacagaagtcaaagaagcatttaaacatggacatggggaagatactcgtatgtcaatgacattacgaaaacagacttattattatgcgctgaagttaaaagatggaacgattcttcggatgagccgggagactcagacgatcgtaagacagatggaagatatcattccgatcatcgccttgattcttgcagttgtaacgatattatctgtgatattatcaagaatgtcgacagatcgtatcgtagaaccgatcaaccagataaatttgatacatccaaaacagaacaaaacatatagtgagttgacgccattgcttgataagattgaaaaacagaatatggatatagaaagacagatcaaagagatcaaagaagcagaaaatatgcgcaaagaattttcagccaatgtatcccatgaactaaaaactccattgactacgatttcaggatacgctgaattaatgaaagatgggctggtgaaaccagaagacatgccaagattctctgcaacgatctatgatgaagcaagaagattgatctcgatgatcgaaggaatcatcaaactctcaagacttgatgaaaatagagtggaattagactggaaagatgtcgatctctatgaattagcattcagtatcaagaatgatctgaagcgaagaagtgaagaagaaaatgtagctattcatatccgcggaattcatacgaagatccgaggagttacacagatcctttacgaaatgttttttaatgtatgtgagaatgctattaaatacaatcatcctggcggagaagtcgtattcacgatttcaaaaatgggcgattacccaacagttattgtagaagataccggaattggtattccaaaagaagacattgatcgtatatttgaacgtttttatcgtgtagataagagccattcaaaccaaaaagaaggctcaggactcggattatccattgtaaaacacggagcaaaattccatcatgcagagatggaagtagaaagtgaagtgggaaaaggaacaaagattacggttgtatttccacggcaaaattctgatttgttgtagtgttgcatgtatgagtcagaaagaagaaatatttataagaaaaaggatgacactccgcatttttgaaagcgttttttacaaatcgctgatccgcgcctgttcctttggaaactgatatgtaatgacctttgtcaatagtaaattaacagaaatcacaacaaatt

SEQ ID NO: 649 - DNA, 250 bp, Unknown
  gut microbiota DNA sequence
aaaagataaactggatcagacttgcggaaaagaatcggatacctacggattgtaactatagtaatccccgcattagatatgatgggatcaactggtggatcacagtaggcattgaatatgaagactgtgttacggttccgtccaatgatgggatagggatcgatttagggatcaaagatctagcgatatgttctgatggcaataaatataagaacatcaataaaacgaaaaaagttaagaaactagagaa

SEQ ID NO: 650 - DNA, 9728 bp, Unknown
  gut microbiota DNA sequence
tcttcctttgtttcttctagttttctttgatttcctgtaaagctttccatgcaagttcaattgtaagattgaactgtccgatcacacctgttctgtatatgtcattattatctgctaaatcaaaatctgcatttttcaatacatttaagcaattcgaaaaattttcaagctttttcataaatcactacaccatccttttttatttctttcctcaattcttctgaaattcctgcatctatttccacaacatcaaacattaaaagagaatgtactttctccttaatatcccagtaaaaagaatcaaagtctccaccatagacagcaatgtctatatcacttctctccgtatttgttcctcttgcacgagagccaaataagataactttctcaactgaatgtttttttgcaaatgtcgaaatgtctcttataactctctctggaagattatatttcatattttgctgcctcccaatcatacatttgcaaatattatatcatagaaaaaaagaaatattcacgtattgctgaatatttctttttctatcattattttaccttaaccgtcacatatttcaccgctttctgatacttcgatgtttttgctgccgtgatccgaatcttgtatgttcctttcttggctttcttctttaatgtaacttttccactcttagttacggtcatacatttttttgctttctttggatatttagtcactttataggtcagtcttgctttccccaaagatctcgcttttaggttaaatgttgcctttttacgttttaatttttttgccttgtaagtttttatttttgctgtttttattatctgtttctttaattttaatggttttacgatgtttggttttattacttctggtttactttgtgcattatttccagagatatcatttccattgccgtttcctgtattgccattccctttattatcttctccctggtctgggatttcaggatctttcttatcaagttcctctactacaagatcagaacctttgacttcttctttctcatcaacgatatctgctgaaaaatcaacatattttgttaccttaacgttatttcccttatcatcaaattgaatggatgtgtttgtgttgttatctaaaatcgtactgtttccttgcactttggcattgacctctacaattccttcctcggaattcttggattgcatcgcagctgacagattataattatctccttccactttgatcttaccagaagtgatcgttactttatctgctccatcggcagttactgcatatcctttgttgttatcatcccaaaggaactggcagccttcttctgctttcgtcaattcaaatgaattgcttgccgccactctaagattccagattggatgctcactttcccaatcactttgttcgcaggaataaactttcatatctcctgtataattatttccatcgtattcgagatactttccttcttcattttgtaatcggaatcgcttatttgctgatatctgaatcgtcgtctgatcctgatcatcttcctgatatgctgatgccgccatcctgcttttcatttttaaggtctggatcccgccattatatattttatcaacgccataatagttcaggttcttccacaaatcttctacacatacatcatcaaatcttgaatttgaatctgcaaaatggaagctcttgaaatcagaagagactttcattgtcaggtatcccccgtaacttccagggtgataagaattttcatcatagatcgtaatctcatgatttccatccgtgtccttcttataaccacaagcaacaacactatgtccgccctctggtatcatgaaggagaaaacaaatggttttttcactctttttgcatactgggcttctgctacaaatttcttaagaaaagtttccagatctccatttccccaacctgaatttttactgattccatacattgatcttccactgtccagacactgtgtcatctgataatataagatcatgtctttcattttggaattctcatatgggcttcccagcgtccaataatcatgtgcaccacttgtaatatcatcaaaatcaatataaccttggtttccataacacatactcaaagcgatcccatggcatacacctgtatgttctccatgaaaatacgtgatcattctccatttactctgaaaatcgctacactgcttcaccaatttatttagatatacaggatttgaaatgaaagctctcatccctatatgcttaaactgattcgtatccttacctgttttaaagtaactggacattcctccttcgatcacttctccatggaattgatcttcatccagataaaatgcagctctcactccatgattcgaattatttgctcttgcatgtgtgattctgtttgctcctattgatcgtgctacattttcgtaagattgtcctgtgttacaaggcagtcttagccagtaggaatcgtccggagccatataatccaaaccaatattattggttcccatcagtagctgctctggtcctatcaagaagaactgatccgttgtattctcataccatttatcggttgcctctgctaaagtttcaaacagcttacgatggtatccatttgcatcaaaatcaaatttggaagatcctccatccgctttgtctgcatccagattattcaaatatgttttctgtgtgaccgtctttacacactgaagctccgaatcagtaaaagaagataaaaatccctgctcctcatcataagcatcctctccatcaagatttgctgcggaaggtacagatcgattgctccaatcaacctctccggcagaattcatccaatgtctcaaggctgattctgtccaacgattggatcctctttcagccctgatgtggtttttatatccggaatattttgcatcataactcttcttacacaggatttgatcactcagcatcaattttccatttgaatcctctccgatgcatctccattttatcttcttaccctgataagttccaaggtaaatgtaatctccaatatttactttgccatccccagcatgtactattttgttgttcactggcagtaacgtaaataccatactgaatacgaccagtaatgttaagattttgctgatgattctctttttcataccttttcctttcctcatattttctgaactactactttacatctctttttacaacacaacgtttcttgtaaaaagaaatcccataacagatcacctcatcataactatcctcaaattcctttgcatacatcctatgatcgatctgctgaatagctttttcacaatcctcttctaagttctttacttcttttgaatatttcgcttcaaaaactgcaacctttccttcatgttcattaaaaataacaagatcacttcgaccttctccatgttctttattcgattcaacactatatccagccccagcaaatattcctgcaagaaatgcatgataaaaatcttctctataatcatgataactgatcgttattcgcaataacctgctgatctcctgtgtcaaagtctgctcatcaccattccatactgcatcaaataaatgctttcgatcttgtaatttcgctgtatcactaaaccaatcctgtactgttgtctcaaaaatctctcgtatctctttgtttggaatcttcaatgtaatctttccatctgcactttccttctcttccttatctcttgtcagatatcctgttaaatacaaaatgctccaaaaattctcttctgacgaatgtaaataatcatacgtaagattttcttctattttctgatcaatcgtgtctcctgccatcaatttttccatctttttttgaattccgctgcctgcgtagtctataaaagatcgtatgatcgcattatcacttgtattcttccagtaacttgctggcttcatgtctggatcgatccgtagatctcttacatagttcataacatcccatggacaatatacatcgatctctccaaaattatacccatcataccattctttgatttctttaaaatgctcttgcagtccaatatcttttaagatatcttttacttcctgatcggtaaatccaaaatattcatttaaatgtgttgatatgatcgtatctgagataaaattattggttcctgtaaatatactttcctttgcaattttcaagcaacctgtaactactgcgaactgaagatgagaattatcttttagagatgtgctcatcatcgttttcatcacatccagcatttctttatagtagccattgctgcttgctttcgctaatggtacatcatattcatccaataataaaataaccggctttccgtaatgcgcattcatcattcttatgatggtagccacactaatttttatcaaatcttctgacaaattttcttcacttatatcttgtaactttaaaaagatctttttatcattctcatttaccttatcgctatctgataaataatcatgctcattgcagatccatgaaatctgatttcttaacatcttcatagctgattgaaaattcaatccatctacatctttgaaggaaataaataatgttggatactgattcatccatttttgacataattctatatctcttgagatcttcagatcttcaaatagtttcctgctgtcttttcgtatatcaaagaaatacgccaacatactcatgccgatcgtctttccaaaacgtcttggtctcgtgatcaatgtaacttctgcgattcttgattccagtaattctttgatcaaattcgttttatctacataataatattcattttgtcttaacttatgaaaatcagaaattcctactggtaatttcacattgttcattgccaacaccaccttcttagattttatctaatcacaaaacatcctcttccgtttgcttttgcttcatataagatctcatcggtctttgtcagaagttccttgatcgtttttggatatttaaaacgatatactccaatactgcagcttactgtgacttccttctgaattcctgagatgttttgaaagaattgtttcatttcttcttctaacgcttcctggctcatctcttcttcgatcatcacggcaaactcatctccaccaactcttccgactgctccatatggctcaaattgttcttgtaaaaatgtcgcaaatttctttaaggtttcatctcctgctatatgtcccagtttatcattgatctgcttaaaccaatccacatccaagaataaaaaccatccttgatggccatgaatcctctgatcactttgaatattttggcaatgctgcaaaaacagtcttcttcccatcaccccagtaaggaaatcaatctccccttgatattcccgatacttcatatattggtagatcataagcatcgtcaatattaagataaaatccaatgcaagcattgcgatcaaaaactgtacctgtaaatgtagcagatcaatctctattgttcttgttacatgaactctgtgctatttcaacatatatgtagaccgatttgcaaaatatccagtagaaaatatcgctatacaaatgatcaaaaaactgatccctgatgatatagcgactatcttagaagacagatatggatcatccaaagattgatttaccgcatccttgtatttttgaatgcgttccttgtgataaatcttatatgccacctctacccagaaaagacaacatagtgcaataagtgcatcattgatccccatatgaaatgttgacattccagtatagccaagctgtggaaaacaggctcccataacggtgaacactaggaaagcatgtatccactgtgagatcaaagaaagaatccagattcctattttctcatactttcgtccttttatgatggaaaacagatatccgatcacaaagccaaacagaactcttgacccaacacttagtaaaatacttcctactggattactactatatagcggcgaaaatatcttatcatctgatacgacataaagtgctgatgccttatacatacttgctagtccaaataccaatccgatcagtgtcgattccaaaggtccaagcaaacatcccgcaactacgatcgggatatatgctgttgtaagtgaaattggatcaatatggatgaatcctaaaaaagtaaatgacataataagctcgatcgccaataatagcacaaaaacatatttttcaaattttaaatgcttccatttgttttgcttcatatctctaatcttcctttgcttttggtctcttaaacttcttcccaattcttctttgcttacttacatcatatcataaaaacaaagtatcaacgacacctgaatgcccaaaatcaaaggtatccctaatctaaaataccattttcttgtcttatgatgaaatactgtcataccgatcattgctccaatggagcctccgatcagtgcaagtatgatcaattttttctctctaactctccactgtcttgtcatcgctctccatttgtctagtccatacaatgcaaatgttataacgttgatcatgatcagatataagtgaatatatgctgattgcatttgtaggtttcctccccatagccttttattttaatctgtattttcgatttttattattgcctatttgttctatatcttgtgtcaaagcttttaataactctttcgttctggaggattttaaatttaacaaattacaaaaatcctgaatcgtatattctttaccctcttccataaattcaaatatttttttataattttgtattgtcttttttgaaatctttttatcgccgttttttatcgccatttttttatcgccgttttttacattatcataggaataatcttcatttaatggcacaataagtctgaatacatcaccttctatgaattctggttcttctcctgaataatatttcgaatatttaaatatatttctcactcctgaacctaatcgatctgaccatcctatatttctaaaaaatgatgcaataataggattcttagaaattcttaaggtcccaggaacctctctgtatatttttttgaaagaaaacagacgcttacgtacagctgcatcttttatagaagacgaactgattgcaaaaacgaagcatgatcagatcgattatgccgtcagttatggcgaatttttctataaagctgacagctggctttatccaagaaggatcgtctgcaagatagaaaagccagaaggtcagatgaactttttatatactttcgtcgtgacaaacatggatggcagtccagaggatctgatctgtttttactgtaaacgaggtttaatggaaacatttatccgtgaatcaaaacacggatttcacatggacgccatgagcagtcacagtatgactgtcaatgcgaataaacttcagatcagtatgctggcatataacttatttaattggtttcgacgactggtacttccaagaagttttcaaaaactacaggttgatacaattcgtttaaaactattaaaaatagcagcgaaacttgtcctttctgcaagatatctgacatttaagctgtgcagtcattgtccatataaaaatgaattctatgaaactttagaacacatttttgaattaaagcaactggaataacaaaatctttgtaccttgacagtttcaaaatgttctttataaattgacaggataagtctgccttttttagactgtattttgtaaaatagaacatatttgaaacagatacaaaagtaattacagaccatgagcaactttagttgctcatgaataattcaggatgataataaatttatatatgaaattttctgatttgttacaaaatatactccataaattattaataaaaaaatccaatatgggcaaataatccttcttaatctttttaaataccactctttaacatttataatatttccttgatacccaaagcaaaaagctgatataaaaaaaatatttgtacccctatattaaatacttgtccaaaaggaataatccaccctattgacgatgaactacacaaatgacataatactatacatatagttgaaaatgctcttatccacgatataaaatataatttttcattcttcattttatgtttcctctatcttttgtaatttattttcttcaaacctttcatatactccatacgtatgatattccatcccatatgtatcattaattaagcaaatacatatttattatatatgttagttttacatttctcaattaaagattctccagtgtacttgatttctatttcctatatatttttttaaacctaacagaatttgatttctttctgccaaatttgataccctgcattaaacctttatatatcttatccaacccaacacctataaataaacaaatacatactgttactatatatatcaatattgcatatttcaactgcataaactgattctgaaaataataatataaaaagaatgtatgagttaaccagatataaacagagtaatgtcccaaaaattgcaatatatttccaggccatttattatttttaattgtttttagaatttgtaagcagccgaatatatagatcattactaaaaaagcatcaacatcaaacgttaatatcatccgaacaataacactaaaaattatacatcctatagatataataattgaataaaactcattcttgcataattttgcattaaatttttcatacaatctattctcataaattaacattccaaataaaaagcataaataatatgtataattttctttaaaaactgtattgattattcccaatataattgcaagtgcaaatattatccatttactattctttataaaattcagtttatttacaattaattttataaccggatacattattaacatttttacataatacgctacataccaccactcagcattataactacatgattttcctataaaattttttataaattcttctggttcaaacttcaatcccataaatttaaatccaattgatacaaatataataaaaacaatccaatatcgaataaaaaattttataatttgtttaatagctaattttatatcttctgtaaattttaaattcttctgcatggattttgccatcattccatagccactaataaaagcgtacattgcaatacatagtcttccaaaataccccaaatacaattctattgtatattcaatatttccacctatatatcgtaaatcaccaccaaatctttctggaaatccaaagaaatgatgccataccatcataagaattgctattccataaatatatagtgaatcttgtggtataatatatgttttttctattttctcaatattcttttcttccatttataaatactttcttttctttgcaatactttgtgctttttgtataactcctctgcatgatctgatgataattgaaaaattcttttctttttttcttttgttgtcatgttatcatcatgcatgattgtatatgcataatattctaactgtttttgtttttctgctgtgattaatttctgaatctcatctgatgattttcccataagtttatacataatttcaaaattctccaaactatcctgaattttcgtttctaatagtctgctcatcaatgaatgttcattatctctcatgtaatgacacaatggtttattcacaaatagaaatcctgtgatcttcgcagcttgcatatattccaataagaat

SEQ ID NO: 651 - DNA, 287 bp, Unknown
  gut microbiota DNA sequence
caaactcctacgggaggcagcagtggggaatattgcacaatgggggaaaccctgatgcagcaacgccgcgtgagtgaagaagtatttcggtatgtaaagctctatcagcagggaagataatgacggtacctgactaagaagctccggctaaatacgtgccagcagccgcggtaatacgtatggagcaagcgttatccggatttactgggtgtaaagggtgcgtaggtggcagtgcaagtcagatgtgaaaggccggggctcaaccccggagctgcatttgaaactgc

SEQ ID NO: 652 - DNA, 4314 bp, Unknown
  gut microbiota DNA sequence
agatgaaacgatctccaatgaagtaatggcactggaagaaaaaggacataattatgagatcggagatacgatcgagacagaagaagtagcatttgtaccaatgacaaaagaaattgatgatgagacagcatacaatgcatttgggacgatcacatcaaagagcggaaataactatgttattgtcgtgaaatcagaaaaagaactgacacaggataatttagagactgttgctgaagcagtcaaagaacaggtaaaataaaacatatgatcgtggaggcagagatgattttaattaagaatgcaagagtgatggatccagaaagcggattcgatcaggtaacagatattttattagacgggaagaagatcagacagatcggtaaggtaaatgatgtttctggcatcgaacaggtcattaatgcttccgggatgatcgcagcccctggattgatcgatgtacatgtacattttcgtgatccgggatttacatacaaggaagatttacagacaggttctgctgcggcagcagctggtggatttacaacggtagtatgtatggcgaatacaaagcctgtcgtggattctgtggatatttacaaagagattgaagagagatgtgaacaacttccgatcaaagtatggcaggcagcagctgtgtccaaaggatttgaaggaaaagaattaacagacatggatgcactttacgaagccggagttcgtggatttacagacgatggaattccgctgatggatgagaagctcgtagaagaagccatgaagaaagctaaagaattagatgtaccgatcagtcttcatgaagaagaccctgcatatattaaacagccgggagtcaatcaggggaaagtctccgagcagttaaattatggtggagcttcttacctggcagaagccgtgatggtaaagagagactgtgaattagcagtcaaaacaggagcgaaagtcgatattcagcatatcagctctggtgttgcggtagattacgtgaaagaagccaaagaaaaaggtgcgaatgtttacgcagaggcgtctccacaccatttcacgttgacagaagaggccgtattaaaatatggaacactggcaagaatgaacccgccactgcgaacagaagaagatcgtcagaggatcatcaaaggattacaggaaggtacgatcgagatcattgcgacagaccacgccccacactccaaagaagagaaagacaaaccattagatcaggcaccaagtggcattacaggaatcgagacatcgctggcacttggagtcacagaacttgtggagaaaggatatctttctatgatgcagcttctggagaagatgacggtcaatccagcaaaactatataatatggaacaaggaagattgcaggaagggaaacctgcggatgttgtcttgtttgatccagaggaagaatgggaagtcaaggaatataaatccaaagcaacgaactctccatttacaggatggaaattaaaaggaaaagtaaaatatacgatctgtgatggcaagatcatagaattataatgtatacaagaagaaaacaaaatcattaagaattatgtagaagaatcttaagattttgttttcttttttgatgctttttctttgtataataaagttgaaaacaataagataggagacaataagagaataaggaggaacaaagatgagaaagtgtggaaaaggtactttactattgatgagtgctgttatggcaacatcgttgtttacagggtgtgggaagggtaagagtagtcaggcacagaaaaatgaagtctatgcaacgatcaaaaaaagcgatcagtcagcatctgcagcacagatctgtgcctggctttcttacagggcaaaaaataataggttgtttcagaatgaaggaatagaattgtcgtattgctcagataaccttgccgtattttcagactctgttggaagtgtgatctatgatagaacaaagaagaaagtcattgctgcggtagatcttgacaaaatcggatgtgatcatttctacagtgaaggagatgaagaaaatccaggacttgagacggctataaaggtgtcaaaagatcagaaatggatgatcatttacaatcaattacaaggaaaagtaaacggaaatatttatgcatattcgctcaaacggtgtgataacatgaaatttgcaaaaatcacgccatccaaacagatcagtgaaaaagacaaattgtatcagacgattattaaagatcataaatatacaccaaaagaatctgacagcatacctggaaagatcggagataagatccgtgcaatggatgtttcagcaagtaagtatgtatatcagtggaaagattccaaaggaatcaggaaacaatcggtgttagtggtagacaaagacggcctaaaactatatactttatcaggaaaagaaaaccagccagacatacaaagtgaaatggtagatcttaaaacatccgacaaaataaaacttaataccgaacttccagaatacgaatatacagggaaagacttaaggatcaaggcagtctttgatgagacaaaaaagagatctgacgaagataaagaagaaggacttgttacaattccaatgctgaatatttataagattgttgaaacaaaatccggagcggaagtttatgcgaatttctggagtgaaacatattatcgttatggaagcctgttaaagaactactctggtggaagttatccaggggtcatgtatctgaagaaaacaaaagacggctatcgagtaatcaagacaagatacgcaaaagatggagcatttctggagaaatcgatctggaagttatgtaaaggatatcctgatgttgcagtaaggatgatgaaagattccgtcacacaaaatcagagaaagaaagtcttacaaaaatatgttagtcagaataaattaaagatcaaagcttacaaagaatatggatggcagtatgtaaatttataaagaaggagtaagtaaagaatatgaaacttacattgaaaaaaacgatcgcaagtatcttgtgtattagtatgattccatctatgatgacaggatgcaaaaaggaatcgacatcatacagccatacagattttgcaatgggaactgtaacgaacattacactctatggaacaagcgatgatctggaacagacagaacaaaagatcatcgacatggaaaagaaacttgaaaaacaacaattgtcatggagattaacaagttcccaggtttcaaaaatcaatcaggaattaaaacaaaacaacggaaaaacaaaagtcacagggaatcttaaaaactggttgcaacaagcgatcaagatcagcaaagattcctacgcagacggaagaaacaccgtagacccaacgatcggagcattaacaaaactctgggacttcgaatcaagtaatcccaaagtaccagatgcaagcaagatcaaaaaagcgatcagcggagatttatcagaaaacagccagcacgtcacagtcaaagacaacggagagattcttgcatgcgacaaaaatactaaaatagaccttggagcctatggaaaaggaatcggaaccgacgaagccattaagatgatcaaaaaagacaaagaaatcacaggagccatggtagccctaggaggaagcattgcagtttacggagaaaaatctgacggttccgactggaacgtagggatccaagacccaaacggcaaagacggagaagtactaggagggatcaaagtcaaaagcggcacaagcatttcaacatctggagattatgaaaaaacatttacagataaaaagacaggcaaacgctacttccatatcttagactccaaaacaggatacagtgtaaaaacagatatcagatcctgcacgatcatctgcgattcaggactcaacgcagacggattatctacagcatgtttcagtttaggagtaaagaaaagccagaaattgttaaagaaatataatgcaaaggctgtttttgtagataaaaacaataaagtatatgtaagcgatggagtggaatttacattaacagcaaaaaattataaaattgtatgagttgaaggtcgtcgagtatttagagaaaaaataaaagatagcatgtgtgcaacacgaattccattgacggagttttgacagaacgcttatccgctggatctcctgcgataactcgcgttgaaaattactgaaaccagtaatctttgacgctcaaacaatcgcccgatccagctgcaatgtcattaagttaagaaaaacagagataaaagataagttttaaatttatcttttatctctgttttt

SEQ ID NO: 653 - DNA, 646 bp, Unknown
  gut microbiota DNA sequence
ggatacggtgaatatggaatgttcctgttccgtaccgggcaaaaggaagccggtcaggcactatggacagaatataagtcgaaagaaacaatgttagacgatacagtcagcagaaatctgagattgtgggaaaaggagatgactaagagtgaagaaaaatcataacagactctggattgtgatatctgtatgtttatgtctgtgtctgacttcgactatctctgccatgcagatgggaggttttgatattgatgtaggaaatggagaaaacagcagctggcaatggcatgaggaacagcagtggaatcagagcagttgggagaatacgtgggaaaataaccggcagactggagacaacacatcagaaactcctgcacagaacgatcagacgcaggacaatggatatcagtatgattctgatacaggaaacggaacacaggataatatacagcaatggaatggtgtacagcagaataacactgactggaataacagcagtcaatggaacaataattctcagaataataatgtccagaataataatgcccagaataataacgttcagagtaataatgcccggaataataattctgcatggaacgctcaacctcagacagataacaatatgcagataacatcccggacg

SEQ ID NO: 654 - DNA, 5536 bp, Unknown
  gut microbiota DNA sequence
tttctcctcgtattatatagtagtagtttttagagaccctctccaaggtctttataaccattaaagtcatagtccattctttacctcttccgtaggttcgactatgatatataagatgctgtggattggttaatttctcctaccactagatggtttacgaaaggctccaaccacagtctctttgttcatttgttaatcagttagataccgcatgacggtttatttagaacgaggttacaatcgcaaggagcaccctgtggttctaaaacagtatcaaattcatttcaaaggagttttattatgatttacgtaggaattgatgttgctaaggataagcatgattgctttatcaccaaatctgatggagaagtgttatttaaagcatttaccatcaccaacaacttagatggttttaatgaacttcatcaaaagattacttccgttatggatgatgtgacaaaagtaaaagtaggactggaagccaccggacactacagttacaatctcctcggatatctcattgataaaggtttgcccacctatgttatcaatccgttacatacaaatctgtacagaaaaagtctaagccttagacagacgaaaacggataaagtagatgcccgcacgattgcttccatgctcatgtctgatgtgaacttaaagtcctactcagacatatcttaccacaacgaggagctaaagtcattaactcgttatcgttttgacaaagtgaaagaacgtgccaaactgaaaacctccgtttcaagacttgtctgtatcttattccccgaattagaaaaacttgtgccaactctccatataacatctgtttatgcattgctttctgaatttcccggcgctaaacatatagccaccgcacaccttaccagacttacaaatcttctttccgaagcttccaaaggtcgatatggtaaagatactgctattactttcagagatgctgcaagagcttctatcggctcaaatatgccagccaaatctcttgaattaaagcacaccatcaaactcattcaggaacttgattcagagattgatgaaatcgaaaatgagatcaaaatcatcatggatgaaatcaactctccaattcttagcattcccggaattaactatcgcatgggcgctatgattattgccgagattggtgatttcaatcgttttgattctcctgataaaatcttagcttatgccggcttttcgccatcaacatatcaatccggacaacaggatagtgtctacgcacatatggaaaaacgtggctccagatacctgcgatacgctctgtacaatgccactaagtatgtctgccactgggatccaacatttgcagcctatcttgctaaaaaacgagcggaaggtaagcattacaatgttgccatatcacacgctgtaaaaaaactggttcgagtgatttatcatcttgaaaaaacaaagcagcaatacataaaagcagcttaaatctttctaattcaatactcttttttgagcacctgtcacgatgctctttttgtcatgcagttttcaaggttcaatgaactctaactgagttccaaatatatctaaaaatacatttctgtactttattcaaaaaatatcattttaaggcttgacttttaatagttagtctttcatacttttgatcatggtacctttatataatttgtgcacagatatcattcaaacaacatctctcacaatgaggctttgttcttgccgtacagacatctcttccatgccataccagcctgtggcagaaatcacttccttcttctggtggaacgatctcccataatgccatctcaacttttttaggatcttttatcccatcaaccaatccaatccggttgaccaaacggatacaatgtgtatccgtaacgatcgcaggtttgccaaaaacatctcccatgatcaggttggcactttttcttccgaccccaggaagacttagaatcgatttaaaatcggttgggatcttaccgttatattcatctcttaaaactttcatacatttgctgatatctcttgccttgctctttccaagaccacagggtcgtacgatttcttcaatatctgcaacgtctgctgctgccagtgcttctactgttggatatttttcaaataatccttttaccacgacatttactcgtgcatccgtacactgagccgccagtcttacactaactaataatttccatgcctgatcatattccaatgtgcagtctgcatctggatattcattcttcagacgctcaatgacttctagtgccagttcttttttattcataacagtatcctccttgaaggttgttttatccttattataccttacatttttgcatatttctatgctataatgattttgtattttttgttcatcgaaaggagaattttatgaagaaaagttttttaaaaggtgcctctatttttctggcatctgtattaacagtaggtatgtgttctgcttatagtgtaaatgcgaaagcaaaattttctctacctaagaagacaacattaagttatgacaaaaaagataatggcgggaatggtttttacacaaatgtgatctatatcaagggaacaaatcgctctaattcagaatccatcctgcgtaatggtatgaaggttaaatcttcaaatagaaaggttatttctacaaaaacttttggaaaagattattatcttattgcagataacaatcaagtaggaatcggtgtaaaacttaagaaaacaggatcaacaaaaatcactgcaaaatttaaatacagaggtaaaacttattctgtaaaaacaacagtcaaagttataaaatactcaaatccttttaagaagatcgtagtggatggaagagactgtacttctgattttaagaataaaaacggatcttcgatctcctttatgggacgtaacatcaagatcactcctaataagaactggagagtaaaatctatttatacttacaagccaggagctactaaaatgaaaaaaataaaaggttcttccgttacaatcccaacaaattgccgtgcttttattacaatggaaaataaaaagaataaattaacggaaaaagttacttttgatgaaatggatacttctgaagatcctggatttatattctagacacaaattttaaaacatcccagaatcgtctttttatacctgacgattctgggatgtttttatcttctacaatttctttatttgatctgtttcatgttaaatcaatgccattctctgccatttcccttgtatgtatcgtttgacaaacaggattcctctgaatacccagtctaatgtcattgctacccagactccgaagactccaagtcccatccattttccaagaacaacgctgcagaagattctaaatatccacatcgtggctgatgctacaaccatacagtatttgacatcatttgcggctcttaatgtgttcgggatcgtgaatgctggcggccagatcgttacacagcataaagtatgatataataagatctttcttgtgatcgctgctgtttctggtgataaatgatatacctgaatgatcagtggtaagatcataactacgatgatatttaatgcgatcaatgctgcataggctacttttaacagcttctttgtatagtatcttgcagcttcataatctccagctccgatgcatcttgatacaacggtcagcactgcaaatcctactccgattcctgggattaactcaaatgatgctactacatttccgatggcattggctgtgatagatgatgtcccaaatcctgcaacgatacttaataccatgattcttcctagctggaacatactattttcaattccgtttggtactccgatatgtaaaatcttctgtattaaatatcccttaaaatgaaaatggatatgtttgcttaaatgaacatcctgattttgttttgcgagcagtcttaccataacaactgctgcaacaattcttgatactaatgttgggatcgcaactccttcaactccaaatttaaacccataaatcaaaatcgcatttcctgcgatgttgataccgttcatcaacatagacatattcatagaaatctttgaattccccatgatacggaataatgcggcgcatccattatatattgcaataaatggaatagatgccgtgacgatcatcagatatatttccgcgttatgcataactcctggttcaatatttccaaacactacatttaaaataaagtttttacatgcataaattcctgccatgatcactacagataatgaaacaataaataagatcaactggtctgctgtcttacatgccatgatattttttctctgtccgagaaactgccctgcaacgacggctcctccagttgccaatgccgagaacagattgatcatcaataccataacactgtctaccaatgaaactcctgatacagcttcttctccaacattcgctgtcatgatagagtccgcaagtcctaccgttacagttaacatctgctcaatgatcaacggtatgatcaatcgtacgagatctttatttgaaaacatcctgttccttgcactgtctgtaatttccatattatttcctttctttttctgtgttttaaagattatttctgtgttttgtcttttgttttacagtttttatcttatcacacttttgattttgttcaaggtctgattaaaaatatttacattttctcatttttatacaaaaaatatacaaggtatcttttgataccttgtatacattgcatatcatcgttttttatttcacataatccatgataatttcaactgctttctggattcctgtccttgctgaattgatcatgagatcataattaccggggtctccccatttttgttttgtataataattatgataagaagatctctcccaatcggtttgcttgatcatcttcttcgcttgtcgttctgtcacatgttctgtctctacgatccgtttgatccgttcttctagaggactgtggataaagaaactgtagcagttttcgtgatccttaagcaccacatctgcacatcttcccacgaaaatgcaggattcattctctgctgccagttcatggatcacatgtgcctggatcataaataatttctctggtgtcatgatctcttctgtgtcaacgcctggaaatctgtgtccgatcgggacattgataatgtggctgtagactgcattctcctcgtgattctttacaaactcttccgacatatcactttcttcagcaactcttgccaaaatctctttgtcgtagaaaggaattccaagcttcttggataactgctgtccgacctctcttcctccactgccgaattctctggaaatgcatatgatcgtatttttcttcatattgcaacaccccttttcttgaattactttatgtattcctttggtaattgtattaaccatcctgtgactggttttattcttatatcaaaaaattacaaatttctttttcatctttatcaggatattttcttattaaattatatattttct

SEQ ID NO: 655 - DNA, 93372 bp, Unknown
  gut microbiota DNA sequence
agcctattgaacaatatttatttggtaactagatacatgtatttatgtatctaaaagatattatacgagggagaacagaggatggatcagattacaatcaaagatttggaagtttatgcaaatcatggtttgtataaagaagagaaagcacttgggcaaaaatttctggtatctgcaattttatcgcttgatacgaaacttgcaggtgtcagtgatcagatggattattccgttgattatggtaaagtatgtcataggatcaaagagatccttacagaaaatgactttaacctgatcgaatgtgtggctgaaacagtggcgaagaaattattacttgagttttcattgatcagaaaactagagattgaagtaaaaaaaccatgggcgccgattggattgccactcgactatgtttcagtgaagatcaaaagaggatggcacagagcgtatcttggagtaggatcaaatatgggagatcgtatggaatacattaatcaggcaatcaatgcgatcgaggcacaggatgatacaagagttgttcatgtttccagtctgatcgagaccaagccatatggcggtgtggtacaggatgattttttgaatggatgtattgctattgacacattaaaagagccagaagaactgttggactttctgatggatgttgaagcacaggcgggaagagtcagaacaattcattggggaccaagaacattagatcttgatatcctgatgtatgatgatctggtgatgaatgagagaagactgacgattccacataaagagatgcacaagagattatttgtattagaaccattagaagagatcgctccatatctgatgcatccgcttcttggacagacgatcacgcaattaaaagaaaagataaaagaggaacagtaacttatgagagatttgacggagataaggcagcagatcgatcagatcgatcagaaaatgcttgcattatttaaagaaagaatgggatgttctgtagaagttgcagagtataaaagaggaacaggaaaggcaatttatgatcctgttcgtgaaagacagaaaattgatgccttgacaaaagacgaagatgaacttatcattaaaaagtctgtcgaagagatgtttcttcagatgatgagtatcagccgaagatatcagtatagtctgttatcacaagaagatgcttatattgatcagacatttgaagaagtggaagcactggatatcaatgaagataccaaagttgtatatcagggaattccaggggcatatcaggaacaggcaatggtacagtattttggagaggatgtcaagaatttttctgtaccagaatttaaagatgttgtaaagactctagatcgaggagaagctgattatggagtattgccaatagagaatacttcagcaggaacagtcagtggaatttatgatatgatccttgactatgacatttgcgtcgtgggagaagaatctgtagatgtaaggcatgtattggctgcaattcctggaacgagcttagataagattgaaaaagtatattctcatccacaaggattgatgcagtgtaaaggattcttggatgaacatccagactgggatcaggtaaaagttgcaaatacagcgatcagcgcaaagaaagtagcagatgataataagcctgtgaaagctgcaatctgcagtgaacgtgctgcaaagatgtatggacttgagattttgaaacgtgaggtgaatgatgaaggaaataatacaacaagatttgtgatcatgtcaaagaagaaacagtacagaaaagatgcgggcaaagtcagcatcagttttagcgtgccacatgaatcaggatctttatacaatattctgacgcatttcatgtttaacaatgtcagtatgagtaatattgaatccagaccacttccaggaagaaagtgggaatacggattttatgtggatgtgatcgggaatctggatgatcctgcgatccgtaattcccttgcaggaattaaagaagaaaccaaagatttcagaatcttagggaatttttaagagagaatgaaaaagagagaaaaaggaaaaataactggggaaatacaaacgaatggaaggtaaggtaaaatgacacagacaaatggtgaaacgaaattacaaaaatttcacagcgtcatgcaaaaagttctgaaatatggaattgttttagcattgatcgcatttatcgtattggttttgatgaacaaagaccagttttccgaaaaagttgcaaaaggaacaccagaacataagctgacgaagattgaagtgacagatggtgataaggttgttcagaaatttaaagcagtttcacatacgatggaacagttggatatcatgatcgaccgaaacgaacagacaggaagagctggaagtattgatctgaatgtaaaagatagtaaaggaaaatctattttccacattactccaacactgttagaggttgacggactgacagatatgaaagcaacgatgcgtcgtactttgcgtaatgaaaataaatggtacaaagtagtcgtgaatcagaagttgaataaaggggaaacttatacgatcgagataacaggaaagggtattaaggccgaacgcccattatatctgtatacatcaagcaatatggggaaaatctatcagtcagctaaattaaatggtgtaacacagaagaattttcatgttagaaccagagtgtggacgacacagattgatgtatcagcagttgttttaacagtagcgatcacacttgctttgatcattttaattcttacaccattaaagattccagaaaaatggaataagagattcacatgggcattatttatcgtcaatccatgggtcgcattttatatggtagaaaaagtattctataatccgatcagtgtgatgaataaattggcatttggaatgaacatcctatggtactatatattgttcttcattttattactgatctttaaccgtgtgaaatgggcgttgctcgttggagatgtatttttatatgcagctgcgatcggaaactattttgtattagcattccgtggaacaccgatcacgccggcagatatttatgcacttggaacagcaatggacgttgcagatcattatgtattaagttatgataaaccagcaatcgttgcgacggttgtattattgggattatgtgtgtttgcatgtaaactcgatacatataagatcttccattggaagaaacgtctagttgcattactgatcacagcaatcgtaacagtaggaagttctttcttcttgacaagagtagactttttgtcaaagaaaggtgttgctgtaaacttctggcaacagaagaaaggatacttaaaaaatggatatattttaagctttttaatgaatattcagtatacgatcgtttcccagccagatggatatagtccagaagcggtagataagatcgcagataagtatcaggtaacacagggaaccaataagaaattaaaacagaaaccaaatgttgtcgtgatcatgaatgaaacattctcagatctgaatgtagtaaataaaatcaagacaaacaaagaggttatgccatttatcaatagtttaagtgaaaatacgatcaaaggacatatgctggtatctgtttttggtggaggaacaagtaattcagagtatgagttcttaacaggaaactctgtatcatctcttccattaaacggaaatgcatatacacagtttgtaaaacataaggtgccaagtctggcatctcagttaaaacagcagggatatgatacactggcattccatccatacaaagcacacggatggaaccgagatacggtatatccgctaattggatttgataatttcttagatgagacatctatgaatccaaatggagagaaattcagaggatggtatagtgatgcagaagattacaataagatcatagatatctttaataagaaaaaagcgggacagccattattcttattcaatgtaacgatccagaaccatggtggatatctgatcgcagacaagaactttaaggaagagatcaagatcaaagatgagaaggcaacagatacagcaaaccgttatttatcactgatccatgaatcagatcgagcattcgagaagatcatcaactactttaagaatcagaaagagccaacgatcgttgtaatgtttggagatcatcagccaaaacttgaggattctttctatgagctgttatatggaaaatctctaaacagcttaagtttaaaagaactgcagaagaaatatacagttccatttatcatctgggcaaattatgatattgatgcaaagagcgatgtggaaaatgtcagtgcaaactatttatcaagcctgatgttacagcagacaaacttaaagatgtcaagatacaatgagttcttattaaatatgagaaatgaagttccagcattaaatgccaatggatatgttgataaagatggaaagaaccatgagttgtctgagaataatgaatatacaaaactgatcacacagtatcagtatctacagtataacagtctgatggataagaaacatgtaagtacagacctgtttagtgtaaaagatggaaaataaatcaaagctttggacactctgccttgacagagtgcccaaaacgatatagaatgaaacgtgttgtcatgttgttaaatataacagcattataaataatataagaaaaagtcaaagtaattgattttattaggaggatacacatatggtaaaagcagtcgttggagccaattggggagacgaaggaaaaggtaagattacagacatgttgggtgaaacatccgatattatcgttcgttttcagggaggagcaaatgcaggtcatacgatcattaatgactatggtaagtttgcattgcatacattaccatctggggtattctacaaccatacaactagtgtgatcggtaatggtgtggcattaaatatccctgtattattcaaagagatcgaaggaatcgtaagtcagggtgttccacagccaaagatcttagtatcagatcgtgcacagatggtcatgccatatcatattttatttgatcagtatgaagaagaacgtttaggaaagaattcttttggatcaacaaaatctggtatcgcaccattttattcagacaaatatgcaaagatcggtttccaggtaagcgaattatttgatgatgattctttaaaagaaaagatcaaagcagtatgtgaaaagaagaatgttttattagagcatttataccataaaccacttcttgatccagatgaattatacaatacattaatggaatacaaagagatggtagcaccatatgtatgtgatacatctctgttcttacatgaagcgatcaaagaaggaaagaatatcttattagaaggacagttaggatcattaaaagaccctgatcacggaatctatccaatggttacatcatcttctacattagcaggatatggtgcgatcggagccggaatccctccatatgagatcaagaaagtcgttacagttgtaaaggcatattcaagtgctgtaggagctggagctttcgtaagtgagatctttggagatgaagcagatgaacttcgccgccgcggtggagatggaggagaatttggagcaactacaggacgtccaagaagaatgggatggtttgacgttgtagcaaccaaatacggatgccgtatgcagggaacaacagatgttgcatttacagtattagacgtacttggatacttagatgagattcctgtatgtgttggatacgaaatcgatggagaagtaacaacagatttcccaacaacaggaaaacttgagaaagcgaaaccagtattagaagtacttccaggatggaaatctgatatccgtggaatcaaaaactacgaagatcttccagaaaactgccgtaagtacatcgagttcgtagaagagaagattggatatccgatcactttgatatctaacggaccagaaagacatgatatcatcagacgtggttttgaggattaattattaaggacagatcaatatgagcaaagaaaatgcagataaagaacagaagagaagtttcaagcgtgaggtatttagctggatcgcatgtattgttgtaacgattcttctgacagaatttatcttgaattttgtaattatcaatgcgaatattccaagtggttcgatggagaatacgatcatgacgaatgataaactgatcgctcttcgaacatcctattggtttaacgatccgaaacgtggagatatcattatcttcaaatatccggatgatgagacagaatggtttattaagcgtgtgatagcacttccaggagagactgtgttggtaaaagacggtaaagtatatattaatggaagtaagaaagcactcagtgagccatatatcaaagaagaaccagtagaagattttggaccatataaagtaccaaagaacgggtattttgtgatgggagataacagaaataattcaaatgatgccagagaatgggagacccattatgtttccagagatgaagttttaggaaaagcatggtttaggtattacccatcgattaaagtgatcaagtaaatgaccaaagagaaaggcaggaagataagatggatacaaagatcatcaatgcagagaatgctccagcagcagtaggaccatattgtcatgcagtagaagcaggagatttcgtatttacatccggacagatcggattagatccacagacacaggaattaaaagaaggtgtcgcagcacagaccaaacaggtattagcgaacttaggtgctgtattaaaagcatcagatcttacattagataatgttatcaaaacaacagtgttcttagcagatatcaacgattttgcagaaatcaatgaaatctacgaagaagcatttggagataacaaaccagcaagatcttgtgtacaggcaggagctctaccaaaaggagcactgatcgagattgaagttatcgcagtaaaataaatagatgagttatagaaatccctgagaatgagttgtaaaagattcattctcagggatttcttgtttttataaaaatatttatgatcagagtgtcaataaattcagcaaacgatcgttatcttctttcttctgaatacagaatcggataaattcaccgtctagtccatggaaacttgcacagtcacggatcatcaggccagacttaatgcaacgttcaaacatttcaaaagaagttgtgccatctaataattttacaaggataaagtttgcataagctggataaatctttaggttatcgcgtttggataaaatatcaatgcagcgtgtacgttcagattgtatataatcctttgttgtttgaatataatctgtatccataaacatagcttctcctgcaagagcagcaagtgtattgatcgtccaaggatttttgatactgttcatacgttcaaggaaagcaagatttccacagattccatatccaagtcgcagtcctggagcgcagaagaatttggaagttccacgaagtatcatgaaattatcgaattttgttgttagggatactgcagagatcgtatcaatatcaggtgcaaattctacataagtttcatcgatcataacgaagatatcatgtaatttacaatgagttaggatctttgtgatctcttcggtattcaaagcgctggacgtcgggttgtttgggttacagatcgcaagaagatcaatatcatcggtaagctttgaaatcaggtcattaagatctagtttaaaatcaagatcttctcttaaaaaatattcttctacatgtccgccaaccagatcgatctctcttgtatactcagaataagttggagaaagcagcaaggcatgttttggacgtaacagctgcatggtcagactgatcatctcagttgcaccatttccaacaatgatatgttccattgggacattgcagtaaagtgcaagggtggaacgaagctctttataatcacggtcaggatattcgctgattgattcaatatgagaagccatacttttctttaacaaaggagaaattccgagcggattgacatttccggcaaatggaatgatatcttcttttttgattccataataagcttctactttctcaagatcacttccgtgaaattcttgttttttttctgacatggtaattcctcttttccttttctattgtgtcgaaatttggtataatacatattatgcgataagtacgcatgggtgtacttgaatttgtatttttgatatttacatcataattatacccacaaaatcttttggttggcaaggagcagaataagattatgtcagaatcattggaaaattttacaaatatcgtgaaagaagatataaaagaggcaaaaacactctttttttctgaagcgtttaaagaagaatatctaaaagatcgaagagaagaaaaagagctttatcatcagcttttgctggggagaaacaggaatcagatcttggaggaatttttgttgagttcaggacagaaaaagccggttctcttgagtgcagcaaagacgatctatcaggcaacgatcatgaatcttgatgaaccattggagataaaagtcaagagagaaggatgggggtatctggtagggagaataaaaagtgacggaactttcctgtctcttcacaagaatacatttcaggcagaggattttgaagatggcactctgacgatctatgcagatatgaaaacaattccgaaggatggagatatcgaccatctgatcattcagactgtttatcagactctgcagatcgaggttgtctataaagaacagaaaagtgaaagaaaaaaagaagaagaattccgtcaaaagaaattgatcgaattatatgtggatttctgtacaggaaggattacaacaagtcagctttatgagagaggaaatatggttcttgataagatgccggatgatccggttaagaatcgtatttatgatctgatgaaactgcatctttctattcttgaaggaaaaggagacttagaagaaaagattccagaagatgcatcaaaagagccgcttttgatcgcgcagggatatgtttggtatcttcaggcattttatgataaggaagaagaaacgatcataagatcaagagatgagattaaagaactctatgatcaatgcgaagatggaaaaatcaaaggatatctgttctggctttatatgaatctaagcgaagaattgatgaaggatgctaaacttcgaatggaattgatcaaagaattatatcaggaaggatgtcaaaatccactcttgcaatttgaaggatgctgtattttaggcgaagatgaacaactgttggatgagattgattcttatgaattatgggtgcttgaatttggtgcagaggagaagatcctgaattccaaactcattggaaggatttgttttttgatttcaagaaacaaggtgttttccgaagaagtcctttggctgttcctttgtatttataaagaataccgacagagcgatgtacttcagggaatctgtgcactgatgatccagggcaattgtatggacgaggactgtcatccttattatgaggaagcacttcaaagaggagtacagctcattggcttgcaggaagcttttttaagaacgattccgaagggacaatatccattgctcccagaagagatcttaagatattttacatatagtaagagtcttggaaaagaagatcaaagccgtctgtttgcaaatgttgtacagaacagaagaaaataccataaggtgtttgcaaattatgaagaattgatcagagcttttttaagagaagaattaagaagaggtcagatcaatgaagatctgatcttattataccggtattattttgaagaattgctggaagatgagagatcaagacaggatttaggtaatattatttttgtcagacagttgatctgtgacaatgaatttatccagaaagcggagattagtcagagatggaagaagaatctggatgtttgttacttaagagaagaaaagatctatgtagagatttttgacgaacatgcatcatttgtgttttttgacagtgaggaaaacagatacattggatcagtggcttatcagttaaaaccaatctggacgaaggagcagatccaggcatattgtgaggcagcagacggaacgaatgagcattttgtcctatataaaggtgcagcttttgaaagaaaacaacaattagaagacgaagacttcccagttgtgttatctgcattaaagagtagagcactggatgaagactatgaacagcagttatttgaaaaagtgttggattattactgggaacatgagatgtctgaagaattgaaacgtgcactttcttatgtggaatggaagaacttaaaagacaaaaacagaattcatatgattcgctatttcatagcaggggaattgtataatgaggctttgaaaggaatcgaacaatacggatatcagtttttggataagcagcaattgtgtacgatctgcttatatgcactgacaacattaagtaccagacgctcagaactgttggttgagatgtgtgaatatgcattctcaaggggagaggaaaacagtgagatcgttgcatatctgcaaagatatttccacggaaccaaggaagagatgctggcaatatttgaagcaggaaacaaaggtggtatgtatgaccgcatttttgtggaaagtgtgttaaaagcctgtatcgcagatggtgtggatggaacagaatttaaggtattttctacttatattcagcaggtacagacagatacggcattgattgatgcgatgttagtagaatatgtgaattttgcatatgaacaagatcagatacttccagaggaattttatgaactgatcggaaagaagatcgacatcggaaagatggactggatgtatcagcagctctatcttgattattataaagataaaaaagagaatttaagtgacagatgtaaaggacgcatcgagaagatcaaagatcatcaggtggttcagacggatcatgttcttccagtgttgttccaatatctggatgtgataaaacttccaaagtatctttgtgccagaacatttatagaatttcgtgcaaagagtgggcagacagtgatattccattttatggatgggacaagtgcagcatggaaagaggaagtgatgaaagagctgcttcctggatattatgtattctcagcttctatatttgatcatgaattaaatgaccattatgtaaccatagaaggagaagaaagaagatatcgtgaccaggtggtcgtgacagatcatttgaagtactgcaagggaagccgcttttatgaactaaatgaactgatccggcatcagcaggatggaaaactccagatgatgatggaggaatatgcagtaaagacaatgatggtgcaatttataaaaccaatgacagaggaataagatatgcagacggcaatacattttgaaggagatctggcatatatttgtgtgtcagatcaaggagagattaaggaagaagaacctgtcacttatggcagatccagagtggaatttgtcatttcgacagcacaggcacaaaaggaaggaacgatcggagttgttcttgatgaagcagcgccgcagatcgtacaacaagcagaagaacagtgtatccgtgcaggaatcacaaaagaaagggtaagattttttaccaaagaagaagcagcgttgggagttgtgggattccgtggagacaatctgttgcgtggaaattcagtgatttttgattataccaagaaacgatttatctgctatgagatccgcaagacaaaagatcgtgttttagttgacagcagggattatacggaacagatcaaggatgcggtggcgaatgaagagaaagatatcgcattcttacagatcatcaaacaggcactggtaagaggtgtgacggctacagtttatctttgtggagagggctttgaaggaagctggtttaaacagtctacgaaagcattgtgccttggaagaagagtatttatgagcaaacatttgtttgcatgtggagcagtgtatttatgtgaaaatgataaacatgtttccagagatgaggttgtgtttgcacaaaatgttacgatcagtcagatcgggctggtcgtgcatcaccatggaagagatatgttctgtcctttgatcatggatggaaagccatggaaagaaagccgtggagagattgaaatttttgtatcaggagtgaatggattgatctttgaagtcagaaatcgttctggaatcaagaaagcttcgatctgtatgtcattagacggaatgaagaaagatccaaatcttgtatataaattaagaattcagggagaatacatcaaagcagatcagtgtaagatcaagatcacagatcttgggtttggacagattcgccaggcaagctatcagacgtggcagcaggtcatacagctggaaagaggtgattatcatgagtaagatcgttttgtgtgagacaaaaccagcgaaagttccatataagatcgcaaagattgggagaagctttcaaagttatgaggaattttgctggctgttagaacattacttgatatttttcttgacagaaggttttgaatatccattaaaaaattatttaaaagagaagctggatattgtgatcaagagtgatgatgcggtacagcaagtcaaggaagtgataaattactataattactttacttcagatgagaaaatccagtttcagcaaaaattacgcacaacttatctttattctgctgcaaagaagcaaaaacttctggcagatatgtatttaaagcatcaattgtatgtaagagcattgatcgcttaccagaaacttgaaacagtttcagggaaattaaatgctgcggaacagattcaggtactatatcatatgggattatgccaaagccggatgttttgttttgaagaggcaaaagaatcttttgcaatggcattaaggatcaaagaagataaacagatacaggaagcgtattttacagcagcatatctggcaggagatgaggaagcatttttggaagcaggaagaaagatttcttttgatgaagatcaatgtaagatgatctatcagaacataaaagaaagagaaaaagaagtttttcaaaaagaagagtttgataaacttggtaaaatagattatcatagaaagaaggcagacgaaaatataacccgccgcctgattaagacaactttagggaagtggaaagatgaatacaaagcgcagactatctgatgacctgtcgaatgatagtgagatcttaagtgaaaaacgatttgtaaaactttataaagaagagttagaaagcattgagaaacagatccatgatcttaagaaacttgatcagaaagattttgatgtaaaaccagaggtagaggacaaagcaagactttattatcggacatttgcaagagaattttatgatgtttgtgaaggaagagtcagtgatgaagagttttttgatctttgggaacgcgaagaagaattaaaggcaggactcaattcgatcaattctctggaaggagaacaaaaacagttagagaaggaacttgtgcatgcgaatgaagatgagaccatgatgaatgggaagatcaaggcagtacaggagaagagaagaaataaaaaggcactgtttatttcatttctttgcatggcagcagcggtatgcggagtgagtgctggatatttatatcattttgagatgaatgccaaagattatctgtggcagttgagtgcaggagcagtgatcatattattgcttcttgtgattttatttcagtcacagaggaaagctggtgatcagctgaaattattagagatgatggtcacacacaagagttatactggaaagcggttagaagatgataaaagagagattggcaatgatcttaagttttattatgagaaatttgaaaaagtattttcatatatttcaccggaacagtggaaattatttgatttttgtggtaaagtgtcagccagattaagatttagcgatgcgatccttgaggcatccaatgatctggaacgattattagaaaagaaccagtgggataatccaggaatctggatgtatcatccaaaggttttatatgatctgatcaaacgaaaggattacctgaatacattgaatgatagaaaagatatatgcaatcaggaattgatccggcatgagcagattttagaaggaatcggtgaacaagcagattctgaaactatagagtaaggagtttagagatgaagaaagaattagaaacaacgtatgatccaggtgcgattgaagaacgcctgtatcagaaatggctggataacaagtatttccatgcagaagtagatgagacaaaacaaccatatacgatcgtgatcccacctccaaatatcacaggaaagcttcatatgggacatgcgttagatgagacacttcaggacattctgatccgttttaagaagatgcagggatataatgcattatggataccaggaacagaccatgcaagtattgcgacagaagtaaagatcatcaatgcactgaaagaagaaggaatcgagaaggaagatcttggaagagagaagttcttagaacgtgcctgggattggaaagaagaatatggtggaacgatcatcgaacagatgaagaaacttggatcctcctgtgactgggatcgtgagagattcacgatggatgaaggatgttctgaagcagtcaaagaagttttcattaaattatatgaaaaaggttatatttaccgtggatcaagaatcatcaactggtgtccggtctgccagacatctatctctgatgcggaagtagaatacgaagatcaggcagggcatttctggcatattaaatacccagttgttggaagcgaaggtgaatatgtagaaatcgcaactacacgtccagagacattattaggagactctgcagttgcagttcatccagatgatgaaagatatacacatttagttggtaagatgttagaattgccattatgcaatcgtcagattccagttgtagcagatgaatatgtagaccgtgagtttggaacaggtgccgttaagatcacaccagcacatgatccaaatgactttgaagttgggaaacgccacgatctgccagagatcaatatcttaaatgacgatgcaacgatcaacaagaatggtggtaaatacgaaggtatggatcgctatgaagcaaggaaggccattgttgctgacttggaagaacagggatatttagttaagatcaaagaacatgaacataacgtaggaacacatgaccgctgcggaacaacggttgagcctatgatcaagccacagtggtttgtgaagatggaagaacttgcaaaaccagcgatcgaagctgtgaagaacggagatctgaaattcgtaccagaacgttatacaaagacatatcttcattggttagagaacatccgtgactggtgtatttccagacagttatggtggggacacagaattccagcatattactgtgatgaatgtggagaagttgtcgtagcaagagaaacaccagaagtatgtcctaagtgtggatgcaagcatttcacacaggatgaagatacattggatacatggttcagttctgcattgtggcctttctcaacactcggatggccagagaagacaaaagaattagattacttctatcctacaaatacactggtaacaggatatgatatcattttcttctgggtagtcagaatggtattctcaggatacgaacagacaggaaagagtccatttgacacagtactgatccatggattagttcgtgatgaacagggacgtaaaatgagtaaatcccttggaaatggtatcaatccattggatgtcattgcacagtatggtgcagatgccttaagatttacactgatcacaggaaatgcccctggaaatgatatgcgttacacagaaaaacgtgttattgcaagccgtaactttgcaaacaagatctggaatgcatctcgtttcattatgatgaacttagagcaggctgatttctctgatgttacattagaagatcttacaagtgcagacaaatggatcttatctaagttaaatacacttgccaaagatgttacagacaacatggagaaatacgaacttggtatcgcagttcagaaactaaacgacttcttatgggaagaattctgtgactggtatattgagatggtaaaacctcgtctgtacaatgatgaagaccagacaaaggcagcagcactttggacattaaatacagttttaacagaagcattaaaactgttacatccatatatgccatttatcacagaagagatttattgtaatttaacagatgaagaatctatcatgttagcaaaatggccagagttcaaagaagaatggaacttcaaggctgatgagaaggctgtagagacgattaaagaagcagtcagaggaatccgtaatgttcgtgcagagatgaacgtatcaccaaagaagaaagcacaggtttacgtggtatctgaagatgcggagatcagagatatttttgaacaagggaaagttttctttgctacacttggatatgcaagtgaagttatcattcaggataacaaagacggaatcggagacgatgcagtatcaagtgtgatcgcaggagctgtgatctacatgccatttgcagaattagttgacattgcaaaagagaaagaacgtcttgcaaaagaagaaaaacgtttaaatggcgagatcaaacgttgcgaaggaatgcttggaaatgaaagattcgtaagcaaagcgcctgaagcgaaagttcaggaagaaaaagacaaacttgccaaatatcagcagatgttagaacaggtcaaagaacagatcgcaagaatttcataaagatcagaagtggatgataaaacgaggttttgaaaaatggaatttacattagatttacacacacatacagtagccagtggacatgcgtattcaacagtacaggagatggcaaaagcagcggcagataaaggattgaaacttctaggcatcacagaacatgcacaaggaattcctggaacatgcgatgagatttatttccataatatgcgtattattccaagaaagatgtatgggatcgatctgatgtttggctctgagatcaacattatcgatcatgatggaactttaagtatggaagagaaaattattgagaagacattggatatccgaattgcgggaatccatcttccatgttatgaagttggaaccgtcacgcaaaatacgaatgcctatgtaaaagcgatcgagaatccaatgatcgatattatcagtcatccagatgacagcagaataccgattgattatgaaatgattgtagatgcggcaaaagaaaatcatacactgctagagataaataacagttccttggattctttgtcatcaagagttggagcatggcagaatctgcagatcatgcttcagatgtgtgaagagaagaaagtgccggtagtcgcagggacagatgcgcatttttcaagcgcggttggcgtgtttgatcatgtggaagtcttattacaagagatgaatttcccagaagaactagtagtgaatcgctctgtagatgtgttaaaacaagaaattttacaacatcgtgaaatccgaaagatcggaagagattaaaaatagaaacatccatcgagaattaaagttcagatggatgtttttttactttatttttcagataaaatgtaataaataatgtcagcacaataattggtaacatcagtttttgcagataagaagctatctcctggagtaaattttgaataacaattgtttttatcggcacgaatgatactcgtagtatccacaaatgacttcatacttttatggatcacaagatcttccatagggaggtaataataatttttataatctttgaggtaatgttttagatgaccattttccaaaggacatgtaagtatagcatttgaatgatcaagagtcagagatatgccagacttttcgtaattgcagctgacaggaatctgtatatcaagattcagatgagcaacaaaatgatcattttcaataaaataggatgataaagtaaattctttatcaagcaatgcgggataagacatcaatgaataaattttatgtagaccgataagatctttgtggttatgtaaaagtagcgattctttattcttgatctctccattctcaagataatcttgataagttttgatgagtttttttccagaaagtttgtcgattcgttgaattcctaaatattcttccagattcttctgccggaaattctttaatccccacagatttttataaggttttaaaatttgataaagatcaagatgttcatactgatcaaatgatgcattgatcttaaactccttgatcttcgatgtcaaaaaaggaagatcaaaggttttgccattaaatgtaatcagtgtattataaggttggataaatgcaagaaaatcagttaagatctgtttctgagataatccgtcttcattaaaccattgtgttacatttccatccatatcacagcatccgatcacagtaatcgctgagatatcagcactcaatccagttgtttctatatcaaaaaataaagattgttgtatgttatgttccataaaaatcctttctgtgaacaagaatcatatccacagatttattatatcggcttttgatcggatttgcaatgaatggaaaaccagagtatgacactccatcatatgatcatttaagataagaacatacgtacggattatttgtgaattctgatccaatagactggactgttaagacatgataaggtataatacgaaacgaatggaaaaagacagaataaggagaaaccaaattgatttcatatataaaaggaatactagaagatatgtcaccagggatggtggttgtggacaatcatgggattgggtaccagatgatggttccgatgagaggagaatcttttcctaagatcggacaagaaatcaagatctatacccatatgcatgtaagagaagatgatgtcagtttatttggctttttatcaaaagaagaaaaagaagcatttgaacttctgatcggagtcaatgggatcggaccgaaggtaggattgtctgtattatcaacgctgtccgtttatgaacttaagatggcagtgatcagtgaagacgtcaagacaatttctaagaccccgggacttggacctaagggagcgaagaaattgatcttagaattaaaagataagttaagatttgaagaattagaagaagatggtgtgggagcagagatctttgatacatctgtagacagcagtgattctgtgatgatcacgatcgaaggattagtaagtcttggatattcaaaaagtgaagcagcgatcgcagttaacaaggtagaagatgcgaaagatctcaccccagaagaacttcttaaaaaagcattgaagaatattatgatatagatagagggtaattatgcaaaacagaatgatttccacagaacttgtggaagaagatatcaaaattgaaaatcatctgcgcccacaaatgttaagtgattacattggacaggaaaaagtcaaagagaatttaaagatttttattgaggcagccaaaagtcgaggagaatctttagatcatgtactgttttacggccccccgggattaggaaagacaacacttgcagggatcgtagcaaatgaaatgggtgtacatttgaaagtaacaagtggaccagcgatcgagaaaccaggagaaatcgcggcaattcttaataatctgcaggaaggagatgtcttatttattgatgagattcaccgtttaaatcgacaggtagaagaagttctgtatccagcaatggaagactatgccattgatatattagtaggaaaaggacaggctgcgagatcgatccggctggaactgccaagatttacattagtcggggcaacgacaagagctggaatgttaacagcaccgttaagagatcgatttggagttgtaaaccgcttgaatttctataacagtgaagagttacagacgattattgaacggtctgcagaagtcttagagattgggatcgatccagagggtgcattagagattgcaagaagatccagagggacaccaagacttgccaatcgtttattgaaacgtgtgcgagattttgcacaggtaaaatacgatggacagatcacattagagattgcaagagatgcactgaatcatttagaagttgatacgatcgggctggatcagacagatagaaatttattaaagacgatgatggagacatttgagggaagaccagtcggacttgatacattagcagcagcgatcggagaagattcaggaacgatcgaagatgtgtatgagccatatctgatccagaacggattgattcagagaacaccaagaggaagagttgtaacaagaagtgcatatgagcattttcatttaccaataccagaggatagataacagatgagaacaaagaacagaccaattgaagtattagctccagctggttccatggaatgcctaaaagcagcaattctaaatggagcggatgccgtttatttaggtggagagatgtttggagccagagcttatgccgggaattttaataaggaagaactattagaagcaatcgattacgtacatttgtatggtaaaaaattatttcttacagtcaatactctgatgaaagaagaagaacttccattactgccgggatttttaaaacctttttatgagcaaggactggatgcggtgattgtacaggatttgggagctgtatccgtgatccgaaaacactttccgaaacttgagattcatgcgagcacccagatgacgatcacaggggttcatggagcaaggatcgcaaagaaaatgggtgcaaaacgagttgttccagcaagggaattatctttggaagagattcaggagattaaggatgatacaggacttgacatggaatgttttgttcacggagcattatgctactgctattcaggacagtgttttatgagtagtatgttaggtggaagaagtggaaatcgtgggcgatgtgcaggaacatgccgtctgccattttatcttgatgggacaaagaatacaaagaatgcgtatccattaagtttgaaagatttatgtaccattgaacatttaccagagattttagatcatggagtggattccttaaagatcgaaggacgcatgaaaggttcaagatatgtcggggaagtcacaagaatctaccgcaaatacgtagatctttatctttcagaaaaaccatataaagtagaatccgaggatctgaagatcttgatggaagtatttaaccgtgggggatttactggcggatattataaagaatatcatggaaaagatatgatgagtatgaaacggccagatcatcaggggttatatgttgggaagatcagcaaacttatgaaaggtaagatttcttttacggcccaagaagatatccacaaaggagatgctttgcagatccgtatcaattcagaagaaaaagtagaacttaccagtccctctgaatttaaagcaggcagcaaggttgttttaaatggacagaaaatgaagaaacttcatgaaggcatggaaatcaaaagaaccttgaatcatccgatgatcgaacggattgatgaaggattaaagcagaaaaagaaagaaaatcttaagggaaaaatcataattcagaaagatcagtgtgctaaactcattctcaaagacggagaagatcacgtagaagtaattggtccagtgatcgaagaagcgcagaaaaatggtgccatgccagcagatattgagaagcttcttaagaaaacaggacagacccactatacatttgaagaattagaagttgatcttggagagaacttgttcgtaccaggttctgtgctcaagaaactaagaaaagaagcatttgcacagatggatcagacaaagattttaaaatacagaagaacttacgaagatccagtcaaagaaaatgatgtagcaagcagtcaggaacaggaagacagcaagatacagattgcagtttctatggagaaccttgagtatctggatattgtaacagaagacagggaagtaatgaagatctatctttcatggatggaactcaaacagcaggaggatccacaatctatcctgaataaaataaagactgcaggaaaacagtgttatctgatgcttccacagattgcaagaaaacgtcagatggaagaattaaaggcaaagaaagatcttatatttacaaatgaaattgatgggctgctcgtacgcaatttagaagaattttcatggttgatcgaagaaggataccaaaaggaaatgatcgcggattacatgttttatggatataacaaagaggctgtcaaagaataccaaagattatcaggtattcaaattcgaatgacgtatccatcggaattaaacaaaaaagagatggaacagttagaacttctgaatgcggacctgttcctctatggttatcagccattgatggtgtctgcacaatgcgtgaagaataatcttcgaggatgtgataagactccatcttggctgacattaaaggatcgttacaatgcaaacttcttcgttcacacaagttgttgtgactgcatcaatgagatttataatggaaaaccattgtgggttggaaatgaagcaggaattcttaatgatcttcatccatccgtgatccgttttcatattacaagagaaaatgaggtgcaggtcaaggagattttaaatgcagcgaaatctatacagaaaggggaaagagcttctcttgccacagaatatacgacagggcatttaaagagggaagttttataaaaccatatgatagacattattactacgatagcaaaatatctgatcatcattatgtgtctgatctatacactgtcatgttatacagtatttcgtccaaagaatagagatagaaaggaagacctgttagacaatcaggtcatctatatgtttgtatttttattcttatgttacacggtactgtttttgcaggaatttgaattaaagatcttgatcttttttgcggcacaagtgatctttttcgagattttgatgattgtatttccgagaatctataaaagatgttcaagaccgctgatcaataacacctgttttttgttaggagttgggtttgtgatcttaacaagattatcatttgatcttgcaatgaaacagtttgcgatcgcggcaggaagtgtgatcgtgacaagttttattccattgatgatgcataagatcacgatctggaataaatttggatggctttatgcagtggcaggatttttactattgtctacagtatttgtgtttggtatcaacaagtatggggcgtataactgggtcagcattgcgggacttaaatttcagccttctgaatttgtaaagatcatctttgtgttctttgttgcagcactactttctaaggcaaaggaatttaaagatctggtaaagatcacagtgatcgcagcactttatgtattagtgcttgttgttgagaaggacttaggcggagcgttgctttattttgtgatctatctgatgatgctttatgttgcaaccgcaaaagcaagttacttatttggcggtttggcagcaggatctgtggctgctattatcgcagataagatctttactcatgtacagatccgtgtagcggtatggaaagatccgttttccatgatcgaaggaagaggacttcaggtctgtcaatccttatttgctattggaactggaagctggtttggaatggggcttggaaatggacggccgtttgatattccggtcagggaatcagactttgtcttttctgtgatctgtgaagaatttggtgtgatctttggaatctgcctgatcttcgttttaatgagcagttttatcctctttatggatatttccacaagaagcagaaaattgtttaacaaattgttatgccttggattcggagtttgtttcttattccaggtattcttaagtatcggtggtgtgacaaaattcattccatccactggagttacgattccactcgtaagttatggaggaacttctgtgatcagtactttgatcatttttaatatcatacaaggattacatatgttagcagatagcgaggaagaagaatatgagcatattaaggcacaagaatcagaaaaacaatatacaagacaaaacaaccgaaagaatcagtaagataaagaagaaaaagaaaaaaagagcaaatcgccagattctgcagattacttatatatttgttgtatcatttttggcattgatcgcttatattgcacattttgttgcggtagatagtaaaaatgtgatcacgaatgcgcataatcggagattacagtctatggcagagaaagtagtacgaggaaagatcatcagtagtgatggaaaagtgctggcacagacacttactgaaaatggatcagagatcagagattatccttatggcagaatgtttgcacatgttgtaggatataacgataaaggaaagtcaggactggaatctgtatgtaactttgatctgttaaaatcggatgcaaacttgatgacacagatcacaagcagcttaaaaggtgagaaaagtataggggataatgtatacacaacattaaataccaaagttcagaaagcagcatattatgccttgcagggacaaaagggagcggttgttgcgatggatccagagacaggaaagatctacgcaatggtatccaaaccagattacagaccagcttacgtcaaagaaaactggacagaattaaatacaagcaagaattctttgttgttaaaccgtgcaacacaaggattatatccgccaggatcaacatttaaagttgtgacggcattagaatatatgagagaacataaaaacacatataagaatttcaaataccattgtactggatatacaacggttggaactttaaagattcattgttatggaggagaagcgcatggaacggtgaatcttgaacaggcaatcgagaaatcctgtaactgtgcgtttgtgcatatgtcagaagagattaacaaaggaaaactcgcaagtcttgcaggagatctgatgtataattcgaaagttccgatcaatcttcttgcaaacagcagtcgttttgttcttgataagaaatcaggaactaatgagatggcacacacttcgatcggacaaggtcagactttgatcacaccacttgaaaatgcgatggtcatgtctgcgatcgccaatgatggagttgtgatgcagccatatctggtagagaatgtcaaaaatatcgacggtggagtgatcaaggaaacaaaagcatcaaaactatcagaacctttagaggcatcggaatgtgagacattaaagaaaatgttgagaaaagttgtcacaaagggaactggaacaagagcttattcttcacactataatgtatatggaaagacaggatcagcagaatataacagcgcgaaagattcccacgcatggtttatcggatgtgccgaaagaggcgggaagaagatcgtagtcagtgttcttgtagagggtggagactctggaggacgagttgcggcaccgatcgcagataaagtatttcatgcatttttagattgatgttttcaaaagagtaaaacagatagcagttgaaatcagttcataatccatgtataatatttgtcagagaaagacacacatacttaggcgaataagatcgtttaagagacaggaggttgtaactggtgacaaaagcaacgagctgtggtggtgtcgtaatatttagaggaaagattttgctgttatacaaaagttataagaaccgatatgatggctgggtacttccgaaaggtactgttgagcaaggagagactcacgagcagacagcacttcgtgaggtaaaggaagagacagacgcggacgcatcaattatcaagtatgtagggaaaagtgaatattctttctattcatttcatgaacagatcataaagagtgtacactggtacttgatggaatccgagaactatcactcaaaacctcagaaggaagagttttttgtagactcagggtattacaaatttcacgaggcttaccacttattgaaatttcctaatgagaaagagatcttaaaacaagcatatgatgaatataaaaagttgagatctgcgaatcgttggggtaagaaaacaagataaatgaaggaaaatcagagatatgatcagaagatatttctggttttcttttttaaaaaaacatatactgcaaagaaattatgtataaatctaagtatctgccactaaactataacaaacaggtttgaggtggatgcatgcagaaatggaaagcgatactgctcgttgcagcaatactcgttcaaagcttttattgtccagtcatggcaagagaggcaagatttttagaaacagcagcaccagtacttgatctttcagcaaaatcagcagtagttatggaacaggaaagcaaggaaatcttatttgcgaaagataaggataaagaacttgcaccagctagtgtaacgaaaataatgtccttgctgcttatttttgaagacttaaagcaaggtaagattaaacttacagatacggttacagtcagtgaacatgcagcatctatgggcggctctcaggtgtttttggaaacaggagagaagcagcaggtacaaacattgatcaaatgtgttgtgatctcaagtgcgaatgatgcagttgttgcattggcagagcatgtctgcggaagtgaggaagcgttcgtatcaaggatgaacaaaaaagccagagagcttggaatgaaacatacgacatttcaaaatgcctgcgggcttgatgcaaaaggacatgtgacaagtgcatatgatattgcgttgatgacgagagaacttgcacaaagatatccagaagtttttaaatatacaaagatctggatggatacgatcatacataaaacgaaaaaaggtgagaaagaatttggtttaagtaacacaaacaaactgatccgccagtaccatggatgtacaggaatgaagactggaagtacagggaaagcaggattttgtctaagtgcaactgcaacaagaaataagattcatatgattgcggtagtgatggggtgtgaaagctctaaagcaaggatcaaagatgcaagaactcttttggactatggattttcaaactgccagcggatacacagcgaaactacaagaaaagaaatcggaaggattccagtacaaaagggtcagagatcagaagtatcctgccaagaaaaggtgactgctgatctgatcgatattaaaacacagaagggaaagatcgtgaaaaagatcaagatagattctgtgaaagcaccagtgaagaaaggacagaagattggtgagattcaatatagcaaaggtaatattatgatccataaagaaaagatcctggcacaagaaacaataaataaggcagattttttgacacagattaaaaaaatttccactcaatatttcttgattttaagccattttttgtaataagtccacaaaatttcttcacgatggaaaatgaaagaattaaatttttccttgacgctctatataatgaactcatgaagcaaagaaacacagattcaaaggaggattataatgagcgaatcttggttaaatcttgaaggaaaaacagtcatcgtaactggtggagcatctggaatcggaaaagcagttgcacagggattcttaaatgcaggatctaacgtagtcatttctgatatggcacctgaagcaccagagatggacgaagcagcaggaaaattactgtatgtgaaaacagatgttacaaaagtagcagatgttgaagcaatggtagaaaaagccaaagaaacattcggaacgatcgacgtattagtaaacaatgccggaatcaacatccctcgtttgttagtagatccaaaagatccaaaaggacagtacgaattagatgaagcagtatgggataaagtttgcaatgtaaacttaaaaggtgtattcttctgtgcacaggctgttggtcgtgtgcttgttgaaaaaggtgaaggagttatcattaacatgtcttctgaaagtggtctggaaggatctgaaggacagagcgtttacgcagcaacaaagaacgctgtaaactctttgacaagatcttgggcaaaagaacttggaaaacagggagtcagagttgtcggagtagcacctggaatcatggaagctacaggacttcgtacaattgcttatgaatcagcattagcatatacaagaggaatcacagtagatgacttaagagctggatattctaaaacatctacaattccactaggaagatctggtaaattatcagaagttgcagatatgtgtgtatatcttgcaagtcagagagcttcttatgttcatggagttacagtgaacgtagcaggaggaaaaacaagaggttaaaaacaattaacctgtatcaatagaaaagaggatcaatatgaaacagctttttaacaatgaaaacagaatcgcagttattttaaggaatatcgaaatgcaatctgtttgcagtgtagaaagcctcgcggcaaagcttgatgtgtcgcaaaaaacgatccgcaatgacattaaggaattgaattgcctgcttggaggatacgcatgtatcggcaataacaaaggaatatgtaaactgatcgtgtttgcaccgaaaggttttacagaaattcgtaataagatttacaaacaggaagacctttttaattccagtcatacaagaatggcatatatgttctggcagctgatgcatgccgaggaaccgtatctaacggatgatctttctgaggagatgaaggttgccagaacaacaacgatcggtgatctgaaccgattaagaaaggtgattgagaaatacgacctgaagatcaaagggaaagccaatacaggactggctctttgtggcgatgagtataagattcgcctgttcatcttagagaatatctatgaacaactgtatttaaacttcccacttggacagataattcgtgaaaaactatatgattttcaggaaagattatcaatggatgcactgggattcggtttcttttacagattcttcgttgtgatgattcagagaatggaaagtggacatacgatcaaaaagctggagccgaaatatgaagaactgtatggaagttcagcatacatgatcgtggatgagttccttaatgaaattgaacaggtcaaaggatataagatatccaaagaagagcgattgtttttaagtatatctgtagcaggaatgagaacaccggcaaatacagcagagatcgagcaaaagatcagtatttcggaaggtgttgcagatcttatcattgaaattttagatcggatcaaagcagaacttaatgtaacagttgtagcaaatgaattatttgatgattttgtctatcacgtattttttatgatcaaccggctaaaatatggctttcatatttataatccgatggttgatgatttcaagaacaaatacagtgtagcctataaaatggcggagattgcaaaaggtgttttggaagaacgtgtaggaatcgagatgacagaagatgagatgggatttctggctgcttattttggagtgtttttattagagcaggaaccagaaaagaaacgatgcaagatcgcgatcgtttgtggatctggaaagatcatcggacgtctgatcgagaatcagttaaagaaaatctttgatgtagaaccggaatttgaaattttctatggtatcttcgatgaaaatcgcaaagatgattttgattatattgttacgacgacagaattacatatggatacgaaaaccccggtcatttttatggatgaagtattcgatagagaatatattcaacgtaaatttgaaaatatgagatacctttctgaagcaggacgaacaatccgaaagggaatagattctttgtttatgaatttattagatgaaacgagattttttgttctggatcaagaaagttcatatgatgagaacgttgatcggatggcaagggcacttaccaatcagggagaacttgatgcaggatttgcccagagagtgagagaacgtgaaaaatattcaacaatggttcttgaccagaatattgcgtttccacatacaaagaatatgctgtcaaaattaacattggcaatgggtgtgtttccagatatgttaaaagatgataaatacggaaatatccgaatcattattttactgggaattcctgaatcaatggaagatgacacagtacttgtccgattatatgatgatattttgtcgattggcaagaaaccggatgtcattccaaagatccagaaaatggaaagctacagagaatttcttctctatattgcagaagaaaataatatatttgagtaagcgaaaaggaggaagacgatgtcatttatggtcatagctgtggcgatgcttgcagcattttgtctgcaatttttatttcagatggtgcagatgaaaagttttaataaattttatacaaaacttcgaaaaaaaggccgggttgccataggaaaggcaaaaggcggttttcatgcaggtgcgatcgttatgtttgcgatcgatcaggatggagtgatcatagatggttgctttatgagaggatttacaatgcttgcacgatttaaaaactgggatttctttaatggaattgatgttggaacgattaaaaaagatgattgtgcaacgatcggtgtatccttaagaagagcagtgcttaatgcttcctcaaattacaacacgattatgagtggaggcgaagtcttagaaaagccgagtctgtttacaagaattggagacaagatttacggtgtcaataagaaaaaagcctgaaatgaaaggagaattatatgaatatcattattaaaggtgcatcaggattcatgggattatttgatacaggtgcagaaacatttataagctgggtgtcaggaatcgtaccaaaggtattattactgttaatcctaatgaatacgatcatcgccctgattggacaggaaagagttaataaatttgctaaattatgttcaggaaacgtaatccttgcatatggagtattaccatttatttcagcatttatgttaggaaacccaatggcattatcaatgggtaaattccttccagaaagaatgaaaccaagctattatgcatcagcttcttatcattgccatacaaacagtggaattttctctcatattaacccaggtgaaatctttatctaccttggaattgcacagggtgttcagaaagctggatttgatatgacagaattaggtcttcgttatatgttagttggtcttgttatgaacttcttctcaggatgggtaacagactttacaacaaagatggttatgaaacagcagggaatcgaattaagtaacgaattgaaataagatggatttacgagtgtaattaggaggaaaaactatgtcagaatatagagcgattacgatcacacagggaagcggtggatttggtggtccattaacagtagaacctaaagaaggaaaagatgtattattatatatcacaggtggtggagcagaacctgatatcttacctaaaatcgtagaattaacaggatgccgtccagttaacggatttaagacatctgttccagaagaagagatcttccttgtgatcattgactgtggtggaacacttcgttgtggaatttatccacagaagagaattccaacgatcaatatcaacccagttggaaaatctggaccaatggcaaaatatattacagaagatatttatgtatctggtgttaaaaatgataacattgcattggcagatggatctgcagcacctatttcagaagcagcacctgcaaaagaagaaaaagacttcaaatacagcgcagataagaaagtatctgaaacaatgggaagctcatcaaaatcaagctttatccagaaaattggtatgggagctggtaaagtcgttgctactttcaatagtgcagcgaaagaatctacaaacacagtacttcatacgatcattccattcatgggattcgtatcattgctgatcggtatcattcagggatctggattcggtaactggtttgctaaattattacagccattatgtggaaatatcattggacttgtaatcttaggatttatttgttctattccattcttaagctgtctgcttggacctggagctgtaattgctcagatcgtcggaacattgatcggtgtagaaattggtaaaggaaacattgaaccaagccttgcacttccagcattatttgcaatcaatacacagtgtgcttgtgacttcgttccagtaggacttggacttgcagaagcagatcctgaaacagtagaagttggtgtaccagctgtactgtactcaagatttatcactggtgtacctcgagttatcgttggttacttagcaagctttggattatatgcagcaaaataaaaataattattagtgagaaaggaaagtagtattatgtatcaggtaacgattaaaggaaaaggagctatggtagacgcatttagagaagaagggatcttcgttacatttggtgataacgcaccagatactctgaaagatttctgctattccatcgatgtaaatccagtagatggagaagtaactcctggatgtaaacttgtaattgacggtaaagaattcaagattgtaaaagttggagaagttgccaacgagaatctgaagaatttaggacatgttacatataacttcggtggagaagacgctgagtgtcttccaggaactatctgcatggaaaaggccgagcttccagcacttgatatcggaagcacgatcgcaatcgtaaaataaggctgctttccagacagtaatattataatgaaaaaaagaggatgtcagaatctggacattctctttttttgtacaatattcctaaagatgttgtgctatgggttgtttttttttgctatatctagtaaaataggaaaaagacatttacgaatcagaagatggattgggaaacagagagaaggagtgtttatgattcctttatggatatggatcatagcagtgctgttggttgtggggattgccgtggcagtgcttttaagcagttatgaaaataagagattgacagttgaatattacgaaatagagtcagaaaagattccagaagcatttgatggatatcggatcgtgtttttaacagatctgcattgtgcacagtttggagagaataatcaggaattgatcgaacgaattgatgaatgcagaccggatatgatcctggttggaggagatatggtaataagccgcgaatcttcgaatgaggaagtgccgcttgcactgatgaaagagttatctgcaaagtatccgatctattatgcggatggaaaccacgaattgaaacttgcaaggaatgaagaaatctttggtgtgcgttataaagattatgttcatagtctgaaagagtataacatacatcacatttcgaatgaaacgatcgtaattcagtcagagactggatttatttctttaactgcgtttgatcttgagaagaaatattatcagagatttcatgtaccgcgtatgccgctttctcatatggaatctgtggtaggaagttctccaggaaacatttttcatattttattagcacataacccaaactatttaaaaacatatgcagattggggcagtgatcttgtcttagctggtcatttccatggaggaatggtaagaattccgaaatttggaggtgtgatctcaccgcaatttcagatttttccaaaatacgatgcaggagagtttcatgagggagagacaacgatgatcttaagtcgtggacttggaaaccattccatcaaattaagattgtttaataaaccagagatttcatgcattgaattaaagaagagagactgatttatgggaatagatattaaggtaaatgcatttgaaggaccattagatcttctgttgcatctgatcgagaagaataaagtggatatttatgatattccaatctctgagatcacaagccagtatcttgattatatccgctctatggaagaggaagatcttgatgtgatgagtgactttctcgttatggcagccacattattaaagatcaaggcgaagatgttgcttccagtgaaggaagaagaggaagaagaaggagatccgagagaagaacttgtaagaagactgattgaatataagatttataaatatgcctctttacagttgaaagaacgagagatgacggcagagaagagtttttttagatcaccagatattccaccgcaagtacttgcatacagagaagagatcgatcctgtgcagatgttatcagaggtaactttacagaggatttctgaagtttttcagtttgtgatgagaaaacgacaggataagttagatccgatccgaagcgaatttggggagatcaagcaggaagagattaaattagaagataagatcacggaagtgtataattatattatacaatataaagaagtgaacttttatgaccttctaaacgaacaggagacaaaagaagcagtgatcgtcacatttctggcggttcttgaattgatgaagacaggaaagatttacgttcaacaggaaaatatcgaagatgatattttcatacgggcactggagtaatgaatttatgaagaataaacttgcagcgatcgaaggaattttattttcgatgggaacaagtgtgacaaggcggcagctgatggaggcacttgagatagataatgaacagtttgatgagttgatcaaactgttacagacagaatatgacaaagaagagagaggaatccggttattggaactggatgatgcttatcagctttgtaccaaaacagaatattatggatcattgataagaattgtgaatcatccaaagaaaccaaggcttacggatgtaatgcttgagactttatcgatcattgcttataagcagccagtaacgaaacaagagattgaagcgatccgaggtgtgaaatgcgatcatccgatcaacaagctgttagaataccggctgatcaaagaggctggacggctggatgcgatcgggcgtccgatcttgtttcgtacgacagaagaatttttgagatgttttggagtaaaatcaacagatgatcttccagttgttggagaagaacaggtggaagattttaaaatacaggctcaggaagaagtgaaatatacactagatgagactagtctggaagaagagatggaggagatgtagtatgggtaaaatgacaggaaatgaatttctggtaaaggcattacaggaagaaggcgtagagaagatctttggatacccgggtgcgtgtgtcattgatatttttgatgaaatctataagcaggatcaagtagaactgattcttccaagacatgagcaggggttgatccatgcggcagatggatatgcaagagctacaggaaaagttggtgtctgtctggcaacaagtggaccaggtgccacaaaccttgttacaggaatagcaacagcgaattatgacagtgtgccattggtgtgttttacaggacaggttgccacaaatctgatcggtaatgatacatttcaggagatcgatattgtcggagttacaagaaatatcgcgaaatttgttatagttgtccgtaaaagagaggatttgaatcgcctgatcaaagaggcattttatattgcaagaacaggaaaaccgggaccagtcttattagatctcccaaaagatgtaatggcagaattaggaagtgatgaatatccagaggaagtcaatatccgtggatataaaccaaacacgaaaccacatcatggacagattcttcgtgcaatgaatatgatctatgatgcgaaacgtccattattcttaattggtggaggtgcgaagatcgcaggggcacaagaagagatgtgcaaattaatggaaacattaaaggttccagttgttacaacgatcatgggacgagggatcgtaccaacaaatcatgaattatattatggaaatattggaatgcatggaaattatgcagcaaatcaggcagtaaatgattgtgatctgttgatttccattggaacaagatttaatgaccgaattacaggaaaacttggaacatttgcatcggatgccaagatcattcatattgatattgatacagcggcgatttctaagaacgttacggttgatgtgccattggtaggagatgcaaaagaagccatcgcattaatgttgtctattgcagaaaatgaagaaccatgtaaagtagatgaatggctgtcaagaatgaatgaatggcatgaacaaaagccattagtaatggaagaaaaagaaaaattagttccaaaacaggttattgatgcgatcaatgagtactttgatgaaccaattgttacaacagacgttggacagaatcagatgtggacgacacagttcttagaactatatggaagacgacagatgctgacatctggtggactcggaacgatgggttatgggcttccagcagcaattggtgcagcaattggtaatccaggaagagaagttgtttgtgtatctggagatggtggatttcagatgaattcccaggagatcgcgacagctgtgattcaggaacttcctattacaatctgtattttaaataatgggtatcttggaatggtgagacagtggcaggatctcttctatgataaagcatatgcaggtacatgtttaagaagaagaaagagttgtgaacatcattgtgatggagatttttcaaaatgtccgccatatacaccagattttgtaaaacttgctgaaagttatggagcacaggggatcagagtctttaagaaagaagaaattatcccagcatttgagaaagcaaaggcgaaaacagatgggccaacgatcattgaatttatcattgagaatgaagaacttgttatgccaatggtgaaaccaaatggatctatcacagatctgatcatggaacgtggagaagaataggaggaatgaaaatggataatcagatggaaagaagatggctttctttgttcgtagaaaaccgtgctggtgttcttgcaagaatttccggactattctctggaaaagcctacaatatacacagtcttacagttggagaaacagaagatccaacaatgtctcgtatgacgatctgtattgatgcagatgaaaagacatttgaacaggtcaagaaacagttaaatcgaagcgtggaagttattaaagttattgactatacagatacatcgatccgaacaaaggaaatcatgtttatcaaagtgaaaagtcttacagagaagcagatggcagagatcttccagatggcagaagtgttccgtttcctgatcaaggatatgggaaaagacagcttattaatagaagcaattcgtacagagacaaagaatgattctattttaaaggtgtttaaagaacgttatacaaatattgaagtagtcagaggtggtccggtagcgatcgattgtatcagtatgcaggatcgttaatgatcagaagacaataatatagaagagaaaagagagtttggtgttttaacgcacacaccaagctctcttttttgcgtgtacagaaataagtttttaaaaaatatggggatttttcataggaataaaaagttttttctttcaatgaaaaaatacagggatgtgttaagttagacatgttgaaagtgaagtaaatttaacgaaaaatcaatttataaagagtgtaaatatatttatattgtaaaaattgttatttttttcacgaaaaaatcaggattatttcatagaaaatacaagaaagttatcaattcggtgagaaagtgttataagttatgtcggattgtgttaaaaaaaatacaatccgacaaggacattgtatacatcgaaaaaacacgtatttatgcggcttttggcactttgcacaatttattgaaaatctttttaaaaaatagcaattgaaaatgagaaaagattgtgatagtattaacatatcggcgagagagaagatcgccaaagtataataatcaagaatatggaggaaaattgatatggcaaagaaagtagttatcgcaggagcatgccgtacagcgattggtaaaatgggtggagtactcagcacagtaccagcagtagacatgggatcaatcgtaatcaaagaagcattaaaaagagcaggagttccagctgatcaggtagaccatgtatacatgggatgcgttatccaggcaggattaggacagaacgttgctcgtcaggcttccttaaacgcaggacttccaatcgaaacaccagcagttacagttaacgtagtatgtggatcaggattaaactgtgtaaacatggcggcacagatgattcaggcaggagatgctgatatcgttgttgccggtggtatggaaagcatgtcaatggctccatttgcattaccaaaagcacgtttcggatatcgtatgaataacggaacactggtagatacaatggttaacgatgcattaacagatgcattcaatcactatcacatgatgatcacagctgaaaacgtagcagaacagtggggattaactcgtgaagaattagatgagtttgcagcagcttctcagcagaaagcagtcgcagctcaggaatcaggaagattcaaagatgagatcgttcctgtagaagtaaaacagagaaagaaaacagttatcgtagatacagacgaaggaccaagagctggaacaacagctgaatctttagcaggattaagatgctgctctggaaaagaaggtggagttgttacagctggtaacgcatcaggaatcaacgatggtgcagcagcagtcgtagtaatgagcgaagaaaaagccaaagaattaggtgttacaccaatggctacatatgtaacaggagctcttggtggtgtagatccatctatcatgggtgttggaccagtagcttctacaaagaaagctttagcaaaagcagacttaacaattgacgatatggacttgatcgaagcaaacgaagctttcgcagcacagtctgtagcagtagcaagagatctgaaattcgatatgagcaaagtaaacgtaaacggtggagcaatcgctcttggacatccagtaggagcttcaggatgccgtatcttcgttacactgcttcatgaaatgcagaagagagacgctaagaaaggtcttgcaacactttgcatcggtggtggaatgggttgcacaactatcgttgaaagagactaattaattatagataattaggaaaggagaattcttagaatggaattcgttacatatgaacaggacggttttgtaggtgttgtaacaatcaatcgtccaaaagcattaaacgcattaaacagtgaagtattaaaagaaatcgaagcaacttttgatgcgatcgacttagatgcaacaagagccgttgtattaacaggtgctggagataaatctttcgttgccggtgctgacatcggagagatgagtacattaacaaaagcagaaggagaagctttcggtaagacaggaaacgatgtattccgcaagatcgaaacattccctattccagttatcgcagcagtcaatggattcgctttaggtggtggatgtgagatttccatgagttgtgatatcagaatctgttctgaaaacgcaatctttggacagcctgaagttggtcttggaatcacaccaggattcggtggtacacagagacttgctcgtatcgtcggagttggaaaagccaaagaaatgatctatacagcatttaacatcaaagctgaagaagcttacagaatcggacttgtgaatgcagtatatccacaggaagaattattagcagcagctaagaaattagctaacaagatcgcatctaatgcaccaatcgcagtacgtgcatgtaagaaagcaatcaacgaaggtcttcaggtagatatggatcaggcaatcgttgttgaagaaaaagcttttggaagctgttttgaaacagaagaccagaaagcaggaatgggtaacttcttagagaaagacaaagctaagaaattaaaagttgttcctttccagaacaaataataatgaaatttaatatattttcagtctgcggtatttgctgcagactgaaaaaccacatagtaaaataattttacaggaggaattataatgaaagttggagtaatcggcgctggaacaatgggtagcggaatcgcacaggcatttgcacagacagaaggatatgaagtatgcttatgtgatattaatgaagaatttgcagcaaacggaaaagctaaaatcgcaaaaggtttagaaaaacgtgttgcaagaggaaaaatggaacaggcagctgcagatgctatcttagcaaagatcacaacaggtgtaaaagatatctgtacagactgcgacttaatcgtagaagcagctattgaaaacatggaaatcaaaaaacagacattcaaagaattacaggatatctgtaaagaagatgctatctttgctacaaatacatcttctttatcaatcacagaaatcggtgcaggacttgatcgtccaatgatcggtatgcatttctttaacccagctcctgttatgaaactggttgaagttatcgctggtatcaacacaccaaaagaagttgttgataagatcaaagcaatcgctgaagaaatcggtaaaacacctgtacaggttgaagaaggtgctggattcgtagttaacagaatcttaatccctatgatcaacgaagcaatcggaatttatgctgatggagtagcttctgtagaaggtatcgacacagctatgaaattaggagcaaaccatccaatgggacctttagctttaggtgatttaattggattagacgtttgccttgcaatcatggaagtactttacaatgaattcggtgatacaaaatatcgtccacatccattattaagaaagatggttcgtggaggattattaggatgtaagactggtaaaggattctacgattacagcaagtaagaaaaagagcttttcttttgcatccggagatggtgaactccggatgcagaagttaactttatagaaatcatgatggaggaataaagaatggatttcacattaagtaagaaacatgaaatggcaagaactcttttcaaagagtttgctgaaaaagaagtaaagcctcttgcacaggacgtggatgaaaatgaacagtttccagttgaaactgtagcaaaaatggctaaagcaggattcttaggtattccagttcctaaagaatatggtggacagggatgcgatccattaacatacgttatgtgtgttgaagaattatcaaaagtttgtggtacaacaggtgttatcgtttctgcacatacatctctttgtatcgatccaatccagacttttggtacagaagaacagaagaaaaaatatatcccagatttagcatctggtaagaaattaggagcttttggtctgacagaaccaggtgctggtacagatgcacagggacagcagacaaaagccgtattagacggagacgaatgggtattaaacggatctaagtgcttcattacaaatggtagctacgcagacgtttatatcgtaatcgcagtaacaggtgttgttgaaaaacgcggaagaaagatgaaagaaatttctgcattcatcgtagaaaaaggaactccaggtttcacattcggaacaaaagaaaagaaaatgggtatccgcggatcagctacatatgaattaatttttgaagactgccgtattccaaaagaaaatctgttaggaaaacagggtaaaggtttcggtatcgcaatgcatactcttgatggaggacgtattggtatcgcttctcaggctcttggacttgcagaaggtgctttagaaagaacaatcgaatatgtaaaagaaagaaaacagttcggacgttctatcggacagttccagaatacacagttccagttagctgatatggcaacaaaagtagaagctgcaaaacagttagtatacaaagctgctatggctaaagctactcagaaagtatacagtgttgaagctgctatggctaaattatatgcagcagaagttgctatggaagtaacaacaaaagctgttcagttacatggtggttacggatacatcagagaatacgatgtagaacgtatgatgcgcgatgctaagatcacagaaatctacgaaggaacatctgaagttcagcgtatggttatttctggaaacttattgaaatagggaggtacttaccgtgaagatagttgtttgtgtaaaacaggtaccagatacaaaaggtggagttaaattcaacccagatggtacattagacagaggtgctatgcttactatcatgaacccagatgacaaagctggattagaagcagcacttagaattaaagatgaatatggagctgaagttacagttcttacaatgggacttccaaaagctgacgaagttcttcgtgaagctatggcaatgggtgctgataaaggtatccttgtaactgacagagtattaggaggagctgacacatgggcaacttctactacattagctggagcattaagaaatcttgactatgatctgatcatcacaggacgtcaggctatcgatggtgatacagctcaggttggaccacagatttctgaacatcttgatattccagttatctcttatgcagaagacattaaaattgacggtgacagcgtagttgtacagcgtcagtatgaagatagataccacatcttaaaagctaaaatgccttgcttagttacagcattagctgaattaaacgagccaagatatatgactccaggtggaatttttgatgcatatgatgcagaagtaactgtttggggaagaaaagaccttaaagatgtagaggattctaaccttggtcttgctggatctccaactaagatcgcaaaagcatctgacaaagtaagaaaaggtgctggagaaaaagttacacttgatccagaagaagcagtagattatatcatggataaattagctgaaaaacatgtaatttagtgaaaaggaaaagtggtgaataaaatgggtttagaagaatatagaggcgtatacgtctttgcacagcaggtagataacgaattaagcggaatcgcattcgaattacttggaaaagcaaaagacttagcaaaagacttagatacagacgtaactgctgttcttgtaggttctgacgttaaaggattagtagatgatcttgcaaaatacggtgctgataaagttatcgtagttgacgatccagaattaaaagaatacagaacagaaccatatacacatgcattagcatctgtgatcaatgaatacaaaccagagatcatgttagttggtgcgacagcaatcggtcgtgaccttggacctcgtgtatctgcacgtgttcagacaggtttaacagctgactgtacagttcttgaaatcggtgatttcccattaagagcaatcccaggaaaagaacagaaacacaatcagttattaatgactcgtccagcattcggtggaaatacgatcgcaacaatcgcttgcccagacaacagacctcagatggcaacagttcgtcctggtgttatgcagaagattgatcctattgaaggagcaaaagctgaagttatcgaatacaatcctggatttactccagacaacaaatacgttgaaatcatggatatcgttaaatctgttacagatacagtagatatcatggatgctaagatcttagtatctggtggacgtggagttggagaagaaggatttggaatgttaaaagaattagctgaagttctcggaggagaagtaagctgttctcgtgccgttgttgataacggatggcagccaagagatatccaggttggacagacaggaaaaactgtacgtcctaacgtatacttcgcaattggtatttctggagcaatccagcacgttgcaggtatggaagaatctgatatcatcgttgcaatcaacaaagatgaaacagctcctatctttgatgtagctgattacggaattgttggagacttaaacaagatcgttccagctttaacagaaaaattaagagcagttgttaaataatcattttttgagaatttaatttttaaagagtccgcggatcaatacttccgcggactttatgtattgttaaaaataattgacagattatggaaagtgtgatattctatatgcatagttaaaagttcatatttattcatagggcaaacctgttgaaagacagggacgcaaagccagaagggtctaaggtcttattggactatgacagccggttgccacatttagcattaagggaatgtgatatgggtatttaatccagatagaggcagccgttatagaagagataattctatgaacggttttttgttgtcaggaagtagggagccagataatagaatctgctataccgaggagaatatcagaagttggtcctattagaatatgaaattttatgttttccacagattttatttgtgaaggggttcacagtaagatcaccggcaaggggttgccgatccttcattggtgggaatacatggggatttttcatattagaagaagtcatggtgtagggaaccatgactttttattttcgtagaagaattctgtatagcaggattctttctttttgcgtaaaaatgatcgatatgataaaatgatacacaatggataaaacaaaaaggagacaatcaatcatggaacatatacagaaagatgatattattatcagaaaaggaattttacatattttggacagccacacaggatatcttggcttatccagtcagcttttggagatgggaccagatttaatggaatttgtcagaggacatatttttaaaattatggaaagtgatgatgcaaaaagatgtcagttcaatggaagtgtttcgccagtattaagtttgttagagagcatggaagaatcagatgatgagagctttatagaggcgacaagagttttaggagaaaatctgtttgatatcatgtgtgatagtgtaacgattcctgcagcggatcttctttgtgtgacttttcaggtacaaagtgtaattcatatcgcactgcttaagatgaattacaaagtgacttatgtacatcgagaagaggaagatgcagaagcaaatgatatcgtgaaacaaagagttatgccaacggattcggcaaagcttacagaagcagtgatcatcgatctgacagaatacaaagtacgtcttgtagagaaaaagtatgagatgttgaacggggataagatcaactatctttctgagagattcttacaatgctatgcagatctggcaccaaagaagaaatttcagattctaaataaagttattaacgatataaacaaccattatccagaagatgggattgcgaaacgtttggacatgaaaagccgattaagagaagaatttacggaaaatcaggcgtttaaggtgaatgagatcggggataaactatttggaaatcatcaaggtaagaagcaggaatttgatgagaagattgaacgatatgatatgcaatatgatacatttacagtagcaaaagaaaatacagtcaagaaactggaatatcagatgttagagacggatacaggaattgaaatcaagattccgatggaagaatataataccaaagataatgttgagatcattgaagagccaggcggaggcagtacgatcatcattaagaatatagaaaatgtaaaaattaaataatcaaataaaaatcccggatccgtaaaaggtccgggatttttatttggtttggaaaatttaaaaaacaattattaaaataatcgattgttagcttatttgttggatcttctccagatatgagcagtttctgcatctttgatcagctgatctctgaaatctggatgagcgatattgatcagggcttctgcacgttcccatgtagacttaccttttaagtttgccataccatattctgtaacgatgtaatgagcatttgaacgagtatctgtaacgacagatccattatgtaatgtaggaaggattcttgagaatgtttcccctttcttatttgtgaaagtagaagataagcatacaaaactctttccacccttagataagtaagcacccataacgaaatcaagctgtccaccggcaccactgatctgacggattcctgaagactcagcactgatctgtccatataagtcaacatctaccgcattgttgatagagataaagttatcgatagatgaaatcgtagcgatgctgtttgtataatcaacaggagcactcatgcactctgggttatcatttaaataatcatataatttttttgtacctgctgcgaaagcataagtctgacggtaacggtcgatgttcttgtgagcacctgtgatcttaccggcttttgcaatatcaacgaaagcatcaacatacatttctgtatgaacaccaaggtcttttaaatcggattctgcaatcaaagatcctacagcattaggcataccaccgattccaagctgtaagcaggctccgtcaggaatctgatcaacgatcagtcttgcaactgcctgatccacttctgtagcagctccgccaccacctaattcgtcaatagcaggattgtttccttcaacgatcatgtcaactttggaaatatggataccttcttcgaaaccaccaaggcaacgaggcatattttcattaacttcgacgataacgcattttgctttttcaagcatagctgctgtatgagaagcacttggaccaaagttaaaatatccatgagcatccataggtgcaacctgcatcataacaacgtctgttcctggaagacaatcacggtaatagcttggtaattcagaataacggatcggagcgtagaaagagaatccttcgttgatccattttctttctaaaccacccatatgccatgaattccatgtaaaatgatctgctgggttttcaatctgagtgattgctaatggacgcataacgataccaccatgaatctgaatattttcaagatcaggcatacgttttgctaaagcttcgtctaaagcaactggagtagtaacacaccatccatattccagacgatctccggattttacgactttgacagcttcatcagcagttgttaattttttttgatattcttgcgtgaatgacataataagtcctcctaaaaataaattccatgaaacgatagtttcattgttaacacactagttatattctaacattttgtatcagtaagtacaagagaaaacgttaaaaaattatcaaagcagtttaaatatttgatgaaaaattgattttataaaagtacaaaaaaagtgtagttattttacaaagattgtactataatatgaaattgtatttaggagggataaaacaaatggaaaataaaaaactgacgtggaaacattaccttggaatcgcagttgttgcggtactggtaatttatttagtgattggttttagtttcagtaataaattcttctggggaactaagatcaatggaatgaatgttgctggcaagacagcggatcaagtgattgagatgtttgataagaaagcaaatgactattcattaacgatcaaggaaagaaaagacaagacagagacattaacaagtgatcagctcagaacaaagtttgaaggtgctgatgagattaaacagattaaggaagatcagggatcttttggatggatcaagggcttatttggttcagaacattatgataatgtgacaatgtattcatatgatacaaagtctttcacaaaagcctataagaaactggatgcatttaacaacaagaagatgatcaagatcgcaaatgcaaaaccagtatacaaagatggcaaattcgagattcagaaagaagaagaaggaacagaacttaaaaaagatgtagcagctaagaagattggagaagcagtgaaagatggtctttctactatctcactggataaagaaaactgctatgataatccagagtatacttctgacaatgataaattgatcaatctgacaaaagatatgaacaaaaaattaaaaggaagtattacatataaatttggaaaacaagtggtagttcttgataagaatacatatagcagctggttgaagattaagaaagactattcaggatatacagtagataaaaatgccatggaaaactgggtattgaaattcatgtacaaatataatacacagtatggatggcacaagtttaagacacatgatggacgtacaaagaagatttacggtggaccttatggatggcgtatcagcaaggataaagaaatggcttctgtgaagaagatgttagcaaatggaacaacagagacacgagagccatactggagagaaaaaggaaaagtttacgatggtgtcaatggggatatcggagatacttatgtagaagtagatatgggagcacagacggtttactatttcaaaaaaggaaaacttaaattcgcaacatcctgtgttacaggtaagatgacagcagaccgtaagacaccggagtgtgttgcatatatcctttataaacagccaagtgcaacattaagtggacagggatacagttctgatgttaaatactggatgccattcattggaaatgtaggttttcattctgcaccatggagaggttcttttggaggaagcgaatatatatccaatggatctcatggatgtgtcaatcttccaacatatgctgcggctacattatacaaacttgtaagtcagggagacccggttgtaacatattattaaaaaggaaccaaagaaatgagaattactatgacagactggattcatcgagtgctagatgaatatatcaaagaaggagactgctgtattgatgcaacgatgggaaaaggtggagacacctattatttgtgcagtaaaacaggagaaagcggaaaagtctacgcctttgatgtgcaggcagatgcattaagacagaccagagaaaaactggataaacataaaatgaatgcagaactgattttagatggccatgagcatatgaaagaatacgtcaaagaaatgacagtatcttgtattatgttcaatctcgggtatcttccaggtggggaccatcatcttgcgacaaagaccaacacgacgattcaggcagttgaagcaggacttgggatgctaaagacaggtgggattatgagcatctgtatttacagtggcggtgacagtggttttgaagaacgtgatggggtgctagaatacctaagccagctagatgaccgtaagtattttattgcaagacaggacttccccaataagaaaaataatccgccaatgccggtatttatcataaaattataataaagagacaatggattccatatacttgtattaaattgaaccttaaagtaagtaaaaaagaagggtacaggatatgaaaaccattgtttctgtttttttatatgtgataatatgcagtatacagatatatgcagtgtcagcagaagaaataaacttaaatgcaaaggcagctgtgatcatggatgctgaaagtgggaaaatcctctatgagaaatccaaagatcaaaaaatgccgaatgccagtacaacaaagattttaacatgtttatatattttaaagcactgtgatcttgatcagatggcagaagtttcaaaaaatgcagcgatgcagccgaaagtaagattaggggtgagagaaggggaaaagtataaagtcaaagatctgctctacggattaatgttagagtcctataatgattgtgcagttgtattagcagaacatgcagaaggaagtgtgaaaaaatttgaaaaaagaatgaatcagatggcagaaaatctaggtactttgaatacccattttgtaacaccaaatggtctggatggtatagataagaaaggacggcatgaaacgacagcacaggatctggcaaagatcatggcacgatgtattaagaatcagcaatttcttgaaatcacgcaggcaaaacaatatacatttacagatggcagcagaaagagaagatttatctgcaataatcacaatgccttgttatccagcatgcaaggagtgatttctgggaagacaggatacacttcaaaagcaggatattgctatgtgggggctgtaaagcagaagaacatgacgatgacattttctgttcttgccagtgggtggccgccgcacaagacctataaatggaaggatgtaaggaaactggttcaatacgccacagatcattacgagagacgagagatcattgcagatacaagcaagatcaaagaaataagtataaagaatggtcttaaagaaaaagtcttgctgaaaacaggaaatctcaaggcagcatttctggtaaagaaaacagataagataaagattgagagtatcttaccctctttcattgatgcacccgtgaaagaaggacagaaagtcggggagatcaaatatcttatcaatggaaaaagtcaaaagagcgttccaatctacgcaaagcaaagcgtaaaacaaaaagactactggtattattttgagaaaataattcaaagatttacgctgacaacctaatgtgctatgataaaacagataagaaaacaagggaggcgaaacaatgctgtttttagaatatccaaaatgcagtacctgcaagaaggcaaagaaatggttggatgaacaaggtatatcttacgaagaccgtcatatcattgaagacaacccaacggtcgaagagttaaaagactggcacgaaagaagcggattgccactgaagcgattttttaacacaagcggtatgaaatatcgtgagttagggttaaaagacaaattgccagagatgtcagaagaagaacaatacgaactgcttgcaaccgacggaatgttagtaaaacgcccactggttgtaggagatgattttgtgttgatcgggtttaaagaagcactatggaaggagacattagcatgaatcgagaaaatgcatggacaacatatgaagaagcagatatcaaggcattagaaggactttgcaaggaatacaaagatttcttatccaatggaaagacagaacgtgaatgtgtagcacagtcgatcgaattggcaaagaaagctggatatcaggatttagaagaactgatcaaaaaccagacaccattaaaagcgggtaacaaagtataccgcacatggatggaaaaaacgatcgcattattccagatcggagaagatgcgattgaagatggattaaatatcttaggagcacacatcgactcaccaagactggatcttaaacagaatccattatacgaagacacagagatggcattattagacacccactattacggtggagttaagaaatatcaatgggtcacacttccaatggcattacacggtgttgttgtgaagaaagacggaacaaaagtcaatatctgtatcggtgaaaaagatgaagatccagtagtgggaatcacagaccttttaattcatttatcaggaaaacagatgcagaagaagggaaatgtgatcgtagaaggagaagatcttaacgtcctgatcggaagcaaaccattaaaaggcgaagaaaaagaagcagtcaagaaacagttgttacagttatttgatgaagaatatggaatcgaggaagaagatttcttatccgcagagatcgaagtcgtaccagctggaaaagcaagagactttggattagaccgcagtatgatcatgtcttatggacaagatgacagagtctgtgcatatacatccttagcagctatgttaaatgtagaagcaccaaagagaacatcttgctgtatcttagtagacaaagaagagatcggaagtgttggagcaacaggaatgcactctagattctttgaaaatacagttgcagaaatcttagctttaacaggagattataatgatctgaggcttagaagaacgctgcagaattcttacatgttatcatctgatgtaagcgcagctttcgatccaaactatccaagtgtaatggagaagaaaaactgtgcatatttcggaaaaggattagtattaaacaaatacactggagccagaggaaaatcagggtcaaatgatgcaaacccagaatatattgctcagttaagaaagatctttgatgaagcaaaagtagccttccagacagctgaacttggaaaagttgacgaaggaggcggaggaacgatcgcctacattcctgctgcctacagcatgaacgtcatcgactgcggagttgcagtgttaagcatgcatgcaccatgggagatcacaagcaaatccgatatctatgaagtggaaaaaggatatgaagcatttttgaaaaactgcagataagatttgaaaaattgcaggaaaatatagcatcataataaaagaagcagattcaagtagtgatcggggaattgaatcccggccaaacgcttggatttgcttctttttataaaaatacctaaaacatagaatatcctttaatatactatttcgcaggaataatctcaatccaatatccatctggatcattaataaaataaatccccatatcatgattctcaaaacaaatacaccccattttctcatggagtgcgtgtgctttgtcaaaatcatctgcagtcaaagccagatggaactcttcatccccaagattataaggttctttctggtcacgcatccaagtaagttctaataagaaatcagaagatccatccccaagataaacgattttaaaacttccgtcggaagcatccttttcacgaactacatcaagtccgagagcttctttataaaactccaaacttttctcaagatttaaaacgttaaaattaaagtgattaaattgaaacatatgtacatcctttcttacaattcttaagttttttttaaaattataataacaacaaatttacgtgtttacaagaacaaaatgcaaagatataatgataagaagaataaacgaaaaggaaggagcaacatgaaaacatttcgattaagatgtaaaaaactttgtgcagtggtattaatgatcgtgacagcatttggattctcatttgcaacaccaaagactgcacaagcggccaatacaaagtattggatcaaagtcaacaaacaggccaatgtagcaaccgtataccagttaaagaatggaacatacaaaccgatcaaagcatttctggtatcttgtggaggggctaatacaccagcaggtacattttatacaccagccaagtaccgctggcagacactaatgggaccaagttatgggcagtattgtacaagagtccatggaggagtcttattccattccgtgtggtattatgaaaagaatccttcaacacagtctacggttcagtttaataaacttggacagactgcatctcatggatgtatccgtttatcagtaggagatgcaaagtggatctatgataattgtgcattaggaacgaaagttactgtatatagcagcagtaatcctggacctttaggaaaaccaaaagggatcaaggtatctacagcaagaagacagtattgggatccaacagatccaagcaagaagaacccataccgtaaacagaaagctacattgacagtagctaagaagaaagctaaaacagcagaatatggaacttcttataacgtaaaatcaggagttacagccaaagacaagatcacaaagaagagcttaacaaagaacattacatatacaacaacaaaatatgtaaaaggtaaatacagaaaagcaaaattttcaacaaaatctttaggaacatatcgtattaagtatacagtgaaatcttctttaggagttaaaacaacaaagacgatggttgtaagagttgttgatacattagcaccagtgatcacagcaaagaaccgtacagtgaaagttaatacagcaaacgcggtaacaggtgtaacagcgaagatgagaagtggagctaacagaacaagtgcaatgacagtgaagatcaaagcacctggagcatctgcttacacaacttatacatatgcaaaagccaaagcatataagtttagtaaacctggacaatatgcggtacagtacagtgtgaagaatacaaataaaccatatagagcagcaacaaagaagattacgatcacggtaacaggaaatgtaaatgcccagatcaatacatctgctgaaattgtaacagtaccagcagcaagtacagatcagacagtgatcaatgcagttcgtgcagttgtaacaatcaatgataatggaacggttgtggcaggaacgaatacaacagttacagttgttctagtcaaagatcaggcaggaacagtcacagcagcgaatgtttcttacaaaggtaagaatggagtgacagtgacaaaacagatcaaagttcagtttgaacaggcaacaacaggaacgacagaacagcaaacaacatcaacagagtcaacagcacagccacagcagtaaggaatcttaaaaagaaggatgtattttaacgatacattcttctttttttcgaagttttttgacgggagagttgacacggcatttcagtatgataaaataaataagattaaagaatttatcagctgttttcacaaagcatagaaagaagacggccagagatagatacggctaggaggaataaaatatggcaacaccttataaccataaggcaatcgaacaaaagtggagaaaacactggcaggaacatcctgtcaatgtaaatgacggtaagaaacctaaatattactgtttagatatgtttccatatccatcaggaagtggccttcatgtaggacattggagaggatatgtgatcagtgatgtatggagccgttacaaattattaaatggatactatgtcattcatccaatgggatgggatgcatttggacttccagcagaaaactatgcgatcaagatgggaacacatcctcgtatttctacagaagccaatattaagaatatcaaacgccagatcaatgagatttccgcaatctatgactgggatatggaagttaacacaacagacccagaattctacaaatggacacagtggattttcgtaaagatgttcaagaaaggccttgcatacgagaaacagatgccaatcaactggtgtccatcatgtaagacaggacttgcgaacgaagaagtagtaaatggtaagtgtgaacgctgcggtgcagacgtaaccaagaagaacttaagacagtggatgttaaagatcacagcatatgcagatcgtctgttagctgatcttgacaaacttgactggccagagaaagttaagaagatgcaggcagagtggatcggtaagagccacggtgcagaagttaacttcaaagttgatggaagagatgatgagatcacagtttatacaactcgtccagatacattacacggagcaacatttatggtattagctccagaacatgaattagcgaaagatcttgcaacagatgagacaagagaagcagtagaagaatatatctatcaggcatccctaaaatcatctgtagaccgtatgcaggataaagaaaagacaggtgtatttacaggaagctatgcgatcaatccgatcaatggagcaaaagtaccaatctggttatcagattatgtacttgcagattacggtacaggagcgatcatgtgtgtaccagcgcatgatgaccgtgactttgaatttgctaagaagtttgacattccgatcattcaggttatcgctaaagatggtaaagagattgagaacatggaagaagcttacacagaagcatctggtatcatgatcaattccggagactggaatggaaaagaatcttctgaattaaaagaagaagcaccaaagatcatcgaagagatgggaatcggtaagaagacaacaaactataagttacgtgactgggtattcagtcgtcagcgttactggggtgaaccaattcctatcgttcattgcccagactgtggagcagttccagtaccagaagaagaattaccattgacattaccagaagttgagaaatacgaaccaacaggaacaggagaatctccattagcagacatcgaagactgggtaaactgtaagtgtcctgtatgtggtaaggatgcgaaacgtgagacaaacacaatgcctcagtgggcaggatcatcatggtatttcttaagatacatcgataacaagaataatgaagaattagtatctagagagaaagcagacaaatacttaccagtagatatgtatatcggtggagtagaacatgctgtattgcatctgttatattcaagattctacacaaaattcttatgtgacatcggagtgatcgactttgatgaaccattccacaaactgttcaaccagggaatgatcacaggtaagaacggtatcaagatgagtaagtccaaaggaaatgtcgtatccccagatgatcttgtaagagattatggatgtgactccttaagaatgtacgaactgttcgttggaccaccagaattagatgctgaatgggatgaaagcggtatcgatggagtgcatagattcttaacaagattctacaaacttatcatggatcagaaagacaaaggtgtagaagctgataaagaattattaaaagtacgtcataaactgatctacgatatcacaacacgtttaaataacttcagcttgaatacagttgtgagtggatttatggaatataccaatacattaacagcaatggctaagaaatctggagttgacaaagaaactttagagacagcaattgtattacttgcaccatttgcaccacatattgcagaagaattatgggaagcaatgggacatgaggacagtgtatttgctcagacatggccaacatatgatgaagaagctatgaaagaggatgaagtagagatcgttgttcagatcaatggcaaagtaaaaggaaaacttgtcatcggtgcagaagaagacaaagattctgttcttgcgaaagctaaggaagttcttggagataaattaaacggtaatatcgtgaaagaaatttatgtaccaggaagaattgtaaatatcgttcagaaatagaataataaaatggcgcagataacgatggcagtgtctgcgtcattttttcactcaagatcaataaggatatatgaagatcagaaaggctaaaacatgtatacatttgacagcagaatccgatacagtgaaatagacagaagtggcagactatcaattccggcagtggttgattatttccaggactgcagtgcatttcagtctgaagaacttggtgttggagtagaatatcttgccaataaaaaacgtgcatggatcctgaattcatggcagattgttttggaaagaagaccagaggaatgtgaaaagatcacagttggaacatggggatctggatttgacaagtttcatgcaacgagaaattttatcatgaagacaatacagggggaacgattagcttatgccaattctatctgggtatatataaacacagaaacaggaatgccagtcagaccaaccaaagaagaaattgatgtctacaaattagaagccccattagagatggaatatgaaccaagaaagatcaaactttccagagaatgggaagaaaaagaaccagtgaaagtacaaagaagctggatcgacagcaatgatcatgtcaataacagctggtatgtcaaaacagcatttgaacagctgccacaagatttggagatcagacagctgagggtcgaatataaaaaacaggcgtatgaaggagatattctatatccaagatatgcaagggaagaacaaaggacactggtagcattgtgtgatgaaaaacaaaaaccatatgcagtgattgaatgtagatagatattagatggaaggaaaagcagatgaaacagacgaagatcgtaattttaggagcgggacatgtcggaacacactgtgcattgtcattgatgtttcgtggtcttgcaaatgaaattgttttaatcgacacagatgaagaaaaagcaaaaagccaggcattagatcttgatgatatgggagcgtgtcttcctgcgaaagttgtgattcgttcaggcagttatgaagatcttgacgatgcggatattcttgtcaatgcgatcggacgaagccgcaaggagggagaaacaagacttgacatgttcggagattccatggaacgattgaaagatatcattccaaagattcaagatacaaagtttcgaggaattctgatcagtattacaaatcctgcggatgtagtaggagaatgtttgaggaaagcgttaggtatcgagagattccgttgctttagcacaggaacgagtcttgacagcttaaggatcaagagaattttagaagagaaaacaggatatcacagaaattccatagaggcattctgcatgggtgaacatggggattctcagattgttccattatcccgtgtgtctgtcggagggaaaccatttgcaaaacttcaaaaggagtatcctgatacgttaggcaagattacgatcgaagatctacaggacgaggttcgacaggcgggcatgacagtgatcatcggtaagaaaagtacagaatttggaatagggatcgcgttaagtgggatcgtcaaatcaatcgtatacgatgagaaaaggatctggccgctttctgtccatctggatggggagtatggacagaaagacgtggcagcaggagttccggccgtgatcggagcagacggaatagaagaaattgtagaaattgatcttacagaagaggagaaaagccaatttgcgcattcctgtgatgtgatccgcggttatttaaagaaagcaaaagaaatgctttcttaaacctaaattacatgatcagtggacggatcatatcgatccgctgctgttcttctggagacatggattctttcagaccatcgatgatcatggaaatttcttcgtttgtaaaagaaagaccttgttctgaaagacggcttgaagccgccataaggtctgggagaattaattcaagaggttttccgtggcagctggagatcacaaattttatgatttccagcttttttgggtcaagagaagataaatgatcgaatgaaataggatcgtcagacataaaaaactcctttatttttttagaatctggtttaactggttcataaagtcagaatttggttttgctgtattagtacaaggactgtcttttgctatcatcataggcattagttttgaaaatagatcattgttttggctgtcagaagatgagggagatgaatggttagtcgtatcgacaaaacgctgataattttgatagacttcaaacatttgcatcatctgaagaatttgttcgatctgcatagcggtttccttcggggcgcgaagtttcagagcatttagtaataattccatagaagcaggatcttgatcaaaaccacaggcagaaagagtctgttcgttgtcaaattcagaagagattttggaaagttcggttaatttgatataaatggcagcaaccttttttaagtttggtgggagatatggaagggcatcttctaacatattagaagagtcattacggaaaaaattttcccaggaagtttgattttgttccatgattgtcacaaccttcagattttttctcatatcctatagtattaggaggtgaaaaaaattatgaatgaaattttggtagaagaagaaaatacagtttatgaactggatcctgagtgcttaaggcacaaagaagaacaaagacaactggaagaaaagaggaaacaggaaaaacaagagaatgataactatcggatgcagaagagaccagaaaaaaggaatcagaacaatatgtggatcatctgtttgctgttactggtgatctgccaataaaaaagaggatgccggatcaaaaggcatcctcttttatcagaaatcattaaattcagcatccacatccgcagccattgttgttgccacatccaaagctgccgttaccacagcagcagaggattaagatgatccagatcaggctgtcacatccgtttccgcatccgcagccatcattatttccgcctccacagcagcaaagtaagattaaaagaagcagacagctgttatttcctccaaagcaagatgaaccacaagatcctccacagccagttgcagctaaatcactcatgttaaaacctccaaaagatttatttacagtttatagtattctgggaattataaagtgtgagaaaattcgccagtataccttttttaatatttgtggtataatctgcaatgaatgcaggagacaggagaaaagaaggaatcagatgaagagaatagattttgagagaatttttgataatatcagaagagatcagacaatggtccattgtattacaaactatgtaacgatcaatgatgttgcgaatatgatccttgcgatcggggcttcaccgatcatggcagatgactggatggaagttagagagatcacagcaatgtgtgacagtctcgtgatcaatatgggaactttaaaacaaaatacagtgagatccatgcttcttgcgggaaaagaagcgaatcaacggggtcatctggtcgtgtttgatcctgtgggagtcggtgcttccagattcagaaaagaaacagcggcgaaattgcttaagcagatccactttaatgtgatccgtggaaatatatcagagatcaaaaccttatatgaaggtagtgatgatggttatggtgttgatgcgaagaaagatgatgctgtgacagaagacaatttggaatatgtgattcaaatggcaaagaatatggcgaagaagaccaaagcagtgatcgtgatcacaggaaagacagatctggtgacggatggacagcagatctatttgatcgataacggtgttttggatatgtcaaggatcacgggaaccggatgtatgttggatggcgtgatcgcaggatttatcggagctaatccagatcagatcttagaagcagtgacgacagcagttagtgcgatgggaatctgtggagaatatgcaaaggagaaagcagaaggaacaggtacattgaaagtgcatctgatggatgcgatgagtaatatgaatgcagaatggatggaaaggagcagtcaaattgagagtaaatgctgatgcaatgactttatatgcagtaacagacaggacatgggtagaagacactaccttgatggatcaggtgaaggaagctttggagggtggaattacctttttacagcttcgtgaaaaacatctttccaaagaagaatttataaaagaagcaagagaaatgaaagaactgtccaaggaatacaaggtgccatttgtgatcaatgataatatagaagtggctttggcagttgatgctgatggagttcatatcgggcaagatgacatgtcagtagaagaggcaagaaaattattaggagaagataagatcattggggtttctgcgcacaatgtagaggaagcaataaaagcacaaaaaggcggtgcagactatttgggagttggtgcagtttgtgcaacatcaaccaagaaagatgccaatgttgtctctaaggaagaaattaaaaaaatctgtcatacagtagagattccagtggtagcgatcggcgggatcaaaaaagaaaatatcaagacactagaaggaacggatgttgatggagtggcagttgtttcagcaatctttgctgcaaaggacattaaaaaagatacaaaacagctgagaagcctcgtagaggagatgaagcagaaatagaacaaaacacgcggagtttatgaaaataagaattgcaatattttaaatccgtgatatactagataattgtgtgataaaaaagagtgtactaaaaagataattaggaggaataccaatgttaaatatgattgccggaagtgttttaccaatcacggcatttatcggagtattttttgcatttgctgcaacctgtatcctgacatcctttttaaatgattggctgccaagagatatgggaagagaatttgcacataatggaaagttatccgcaggaaaaccaagaggtgcagggatcatttttatttctgtattttgtatcgcagcattgttgtttggcgagatgtctgtggagatgtttatttatcttgttcttgtttttgttgaaatgttaacaggatttatggatgatgcagcagatgagccatggggagaatacaaaaaaggaattcttgactttctggtagcagcagttgcagcacttaactatattcattttaattctacttatgtagagcttgcaacgatcggcgtgaaattctatattccaccagtgttgttctttattcttacgatcattcttgtatgggcagcgatcaatgtaacaaactgctctgatggagtcgatggactatctggaacattaacgatcattacactggtaacgatctatgtgatcgatcagatccgtggaaatgaaacacagtttccatatattattttattgtttgttgtatgtattcttggatatttatggtacaatgcaacaccaagccgtttgatgatgggagatgcaggaagccgtgccatgggaatttttatcagtttggcagtgcttaagacaggaagtcctttcttgttcttattagttgcattgattctgatcctggatggtggattaggacttgtgaaagtagcattacttagattcttaaagatacatatttttgcgaatacaacgatgccgttacatgatcacgttcgtaagaaaatcggttggtctaatacacagactgttttcagatttgcgatcattcagatcgttatttcaattgcaacagtatatatgatccttatttagaataaataaaatatatagggtgcagagccttggtgtctgcacctttttaacgttttacttccataaagtgtagaagtatgttataataactagaaaaatgcattgcaggaggacagatacatgattcaattattttcagaaggtgcatatctggtagacggaacaactttggtaaaagaatctgaagccgaagcattaaagcagcttacaggtgaagtggtatccaaggaagaagcttctaagaacaccatagcatatggtattttaagagaccacaatacatctggtaacatggagaaacttcagattaaattcgataaattaacatctcatgatattacgtttgttggaattatccagacagcaagagcatcaggaatcgagaaattcccggtaccatatgtattgacaaactgtcataatagtctgtgtgctgttgggggaaccatcaacgaagatgatcatatgtttggtttaacagctgcaaagaaatatggtggagtttatgtaccacctcatcaggcagtgatccatcagttcgcaagagaaatgttagctggcggtggaaagatgatccttggatcagacagccatacacgttatggagcacttggaaccatggcaatgggagaaggtggaccagagcttgtaaaacagcttcttaacagaacttatgatatcaatatgccaggcgtgatcggaatttatttaaaaggaaaaccagtcaaaggtgtcggaccacaggatgttgcactggcgatcatcggagcagtctttgaaaaaggctatgtaaacaataaagttatggaatttgttggacctggtgtatctaatttaagtgcagatttcagaatcggtgtcgatgttatgacaacagagacaacttgtctgtcttctatctggagaacagatgataagatcaaggaattttacgagattcatggaaggtctgaagactttaaggaattgaatcctggaaaagtagcatattatgatggaatcgtggaagtagatttagataagatcaaaccaatgatcgctatgccattccatccaagtaatacatacacgatcgaagaggtgaatgcaaaccttgacgatattcttgcagatgtagaaaaacgtgcattagtaagtttagatggtgcagttgactattctttaagagataaagtccacgatggaaaactttatgtagatcagggaatcattgcaggatgtgcaggtggtggatatgaaaatatctgtgcagcggctaatatcttaaaaggagcaagtattggttctgatgaatttacattaagcgtatatcctgcaagtacaccaatttatatggaacttgtgaagaatggagcagttgcagatctgatgcagacaggtgcgatcgttaagacagcattctgtggaccatgttttggtgctggagatacacctgcaaataatgcgtttagtattcgtcattcaacaagaaacttcccgaaccgtgaaggttctaaacttcagaatggccagatttcttccgttgcattaatggatgcacgttctatcgcagcaacagcagcgaataaaggatatttaacaccggcaacggatgtagaaacaagtgattttattccaaaatatcactttgacaagacaatttatgataatcgtgtatttgacagcaagggtgttgcagatccatcagtagagattcagtttggaccaaacatcaaagattggccagagatgtctgcacttccacagaacatgttattaaaagttgtatcagagattcatgatcctgttacaacaacagatgaattgattccatctggagaaacttcatcttatcgttctaatccattaggacttgcagaatttgcgttatcaagaaaagaccctgcatatgtaggacttgcaaaagaagtacagaaagcacagaaagcgatcgaagctggagaagatgcagcggaagcattcccagaagttaaagatatcctggagacagtcaaagaatcttacgcggatgtaactcaggataatttaggaatcggaagcacgatctttgcagtgaaaccaggagatggttctgcacgtgaacaggcggcttcttgccagaaagtattaggtggatgggcaaatatcgcaaacgaatatgcgacaaagagataccgttcaaacctgatcaactggggaatgcttccatttacgattgataaaggagaacttccatttaagaacaaagattacatttttgttccagatgtccgcaaagcagtggaagacaagcttacaaagattccagcatatgtggtaaatgaaggaatgaaagagatcaccttaacactaggtgaattaacagatgatgagagagaaatcattttaaaaggatgcctcatcaattattacagagattaaagattaaggagtaaatatacatgataggtacattttgggcgattcttccgccagtgattgcaattgttttagcattaataaccaaggaggtatatttatcgctgatgatcggaattgcatcgggggctctgatgtatcataattttcatctgatcaaagcaatggataccatttttgcgatcatgggagagaaaattggagctaattgcgatattttgatatttttagtattattaggaattctggtagcactgatcaccaaatcaggtgcttccagagcctatggaaaatgggcagcaaaagcgatccgcacaaagagacaggcactttttgcaacgatctgtcttggagttgtgatctttgttgatgattattttaactgtctgacagttggaacggttatgcgccctgtgacagataaacataatattacaagagcaaaattggcttatgtgatcgatgcaactgcagctcccgtatgtattattgcgccaatctcaagctgggcagcagctgtaggatcatctcttccagcaggatgcaatattgatggatttaccttattcttgagagcgattccatttaactattatgcattgctcacacttgtatttttggcatttttgatcattgcgaatattgattattcaaagatgaaacaatatgaattaaatgcacatttagaagagattgttgaagatgaagaagaagtaccgatcgttggacatggaaaggtaaaagatttgatcttgccgattttatttttgatcgcttcttgtattggatttatgttgtacacaggcggctttttcaaaggggttccgcttgcagaggcctttgctaattgctccagtgcgagaagtttagtattaggatcatttttaacactgatctttacatttattttgtatattccaagaaaagttcttgaatttgtagatttctgtggaagctttgtacagggatttaaagcaatgacatcagcgatcatgatcctttgtcttgcatggacattatcaggtgtttgtggagcagagtatttaaatattcagggatttgttaaagcagctgttggtggaagtacaatggcgatcgctgtgatgccggttatcttcttcctgatttcattaggacttgcatttgcaacaggaacatcatggggaacatttggaattttgatcccaatttctgttacgatcttaagtgctaattatatgatgatgtcagtttgtgtaggagcgattcttgcaggagctgtttgtggagatcatatttcaccgatttctgatacaacgattctttcgtctgcgggagcgcagtgtaggcacatagaccacgtggcaacacagatgccatatgcattaacagtggcactttgtgcaagtgttggatatattttgtcaggaattacaggaaatggatatattggacttgcaggagcagcaataagccttgcacttgctatgatgatcattgttataactgcaaaacgaggaagataagatggataatttctttatgtacaaaaaagcagtcagagcaatggatgagatcaaccgtgttatggaaggaaaaggtcatacggtgcatcagattatgacagcgatccttgcaggaggacatatcttgatcgaggatattccaggtgtaggaaagacaacacttgcattagccttttcaaaggtattgggactggattatcaaaggattcagtttactccggatatcatgccaacggatattgcaggattttctatctatcatcagggtagtgaagaatttgaattcaaagaaggagcagcgatgacgaatcttttgctggcggatgagattaaccgaacatcaccgaagacacagtcggcacttctagaagcaatggaagaaggacagatcacggtagatggtattacgagagatcttccagatccgtatatcgttattgcaacgcagaatccttttggttctattggaacacactcgcttccagaatcacagttagaccgatttatgatccggacatctcttggatatccggatatggagagtgagatcaagatgttagcacaaggaagtgtggatatgacgacttctgggatcgaagaacagatctcggtggaagaattgcgaaaagcaagagaagaagctgcacgattatttgtgcatgaagatattttaagatatattgtcgagattgcgaatgagacaagaagatccagagacttagaacttggaatcagtccaagaggaacgatcgcacttttatcgatggcaaaagcaaatgcatatcttgagggacgtgattatgtaataccacaggatgtgaaagatgttttctttgaaactatcgagcatagggtgatcagaagcaaggaagcgaaggttcagaggaaaacgaaagaagagattttaaaagcgattctttataagataccacttccaaaaggaaatcagaaaggataaagatgtatttttttgtcataatatttgcgcttatatattggatcatttatggaaatttcattggagggtgccttatggcatccttatttgttgtgctggcttattctgtctgcaggtgtcagtcagaacaaaaacagatgatattaaccatagaaatggattcattagtacttacagaaggcgatgaagcagagatacgattgaggattcatggaattacatcaaagataaacagctatacattccgattggaatatgaaatgacatccaagtttcgaaaacaaagaatgcgaaagaagaaaaatatcgtatggaatccacaagaaggagattcgatcacactgtctgaaatgatcacggaatgtgacagttatcatattcagatttgttcagtttcgtgggaagatcttacaggaatgtataaagtaaaaaaagaatttaacaaacaaatatcttttcttgttatgccaaaacgatatgaaatgggatttatgcaggaaaagatcgcaagaagagatcttatggaacaaggttttgaatacgatggagtcaggaaatatcaggaaggagaccggatttcaagagttcattggaacctctatgctgcgacaggtggactttgggtgagaaaaaatgaagaagaggaagaagaacgcgtgaagatcggattatcgttggatgatatagaaaaagaccgtatttctgattatatggcagctttttattctatttctttctttttgaaatcgcagggagttatacaggaaatctattatggggagcataaatatctgctttgccatatagaacaatatgaagaattgtttacggatattttttgtggaaaatatgaattgtcatcggatccgatggagcatctttataagattccactttgtgaaaaaggacaagatctgcagaaatttttatatgatatggagttataatgtgtggatataaaaaaataaaaattgaatatatcatgatggcagtggcttttgcatctgttgtatggagtatatttgctggatttcggatttcaaggtttcagtggctttttgtgatgggaagtgtcatttggtttctcggaatgtgtagattgcttgatcagaataagagaaatattgtagtcatggttgtgatatgtatcatatactgcatgcttgcacacagacagctgatcaatggatttcagatcatcaataataagatggcagaagcattgaatcagagtatggatcttggattttattattacatttcggtgacgttagaacatagtcgaagggacagcgtactggcagttttgttttttgtgctggtggcaggaattgtgcttggaatattaagatgtcgtccattgactttgtttcttacaaccggtcttatggaaatggccgttttaatgatcgcgccatatggaatttcagcagcgtttttcttgtttttaggttcatggattgtttattttagtatacgaaaaggaaaaaaaggatttgcggcaggattgtatattatgtttctggctgccgcagtacctttgtttttttatgatcagacgaatgtacccacagatacgatgataaaacgaaatattctgatacagatcagggaatggacacagggaaaaggctatcttgcagtcggaggaattgggaatggaaagcttcgaagtgtaggagaagtttctccaaaaggagaaaaattatttctggtgtatgccccggaaaatgcagatctgtatctgaagggatttgttagtggcagatataaagatggagaatggacaaaggaaaagaaaaataacctggtctacggtggagaaatggcacaggaactgccatatttatttccagatctctctatgcaggattttgctgtttatcagaaaggatatattcagacaccaaaagatattgcattttctgaaaagagagaaataaagattcattatcagaagatgcaggagagtttcttattaataccatatttttcagatgcgagcagaattaatggaaatgcagctggagacagtgtgatagaacgtaatacagcagatacggagtatacaacttcttattatcagatcaagaataacaagaacctgttagatatcagtcagagatttgacgtgatgtctgtgttgaaaaatgcgggagagcttgaaaagaattatgttcgttctatgcaggagtatggaacttatgtacagcagaattatctggagattccagaagagataaagaagacaataaagcagctgagttgccatgtaaataaagaaaatagtatcttatataatatagaagaaattcaaaaatttttaaaaaataattatcaatatacttatcgaccaggtttaacagggcaggataaggatccggtaaatgaatttttaacggagagaaaaagagggttttgtacccagtttgcatcagcggcagtttttctgttcagggaagcaggaattccggccagatatgtagaaggatataagatccgtgcagatcagtggagacttggaaaagcacaggtaacagattatgaggcacatgcatggacagaaatttatattgaacatatcggatggattccggtagaagtaacgggaagagatactggagaaagtgtatataaacatgtggaacaggaagaaaaacaacgaaatgcgattgtaccaaataaaaaacaattcgtaacaaatgtaaagaaaatgtttcaaatgattccaatcgtcataatattagcagtgatttttgcgttcataaaattgttacaaaagaaaagaaaatggaatcaaatgacaaacaaagaaaaagtacttttttatgaaaaacagttagaaaaatatgctgaaaatggcgtaaaatcaaggaataacagcaattccatgacatcagagatcatagagaaagcaaggtacagtaacaaagatattaccagacatgaactaaatcttgtaaaacgacatcttgatttattaaagagaaaaaacagaaatgttacaaaaatattaactaaaccgaaataatcttaaaaaactattgacaattgttgctctttatcgtacaatatcaactgttgaaagaaatatttgaaataaatttaaaattgtaatatatcaggagttaatatgaaacgagttattttaagagtgatgatgttagtagcaatggcatcggccgcagttacaatgagtgtacatacaagttcaaaagaagtaaaagcatcagaaaaaggagatgcagttgttgaatatgcaaaaaactttgtagggaatagatacagatacggtggatcaagtcttacaaacggaacagattgttcaggattcacgagaggagtttacaagaagtttggaaagcgtcttccacattcctcaagtgcacagagaagatatggtaagaaagtaaaaggtgggatcaagaatgctcaggcaggagatttaatctgctatagcggacatgttgcaatctatatgggaaacaacaagatcgtacatgcaagtaattcagcaccatatccaagaggtggaattaagatttcaaacaatgcaagatacagaagaatcgtaacagtacgaagaatcgttaaataaagaggataagaagaaggtattttttagaaaaagaaataccttcttcttttgatgctgagaataaagttttgaaaacttcccaagataaccaacaaaatttgaaaaagtgtattataaaaatttgacagataaaaccgatacatattataatttgaaggaataagttgataataaacaatacacctgtataggatgcagatgttttaaaggagaaaaatttatgatcattaaaccgagagtcaaagattatttatgcttaacagcacatccagaaggatgtaaaaagaatgtggaagatcagatcgcctatgtaaaagctcaaggagagattcctggagatgcgaagaaagtgttagtgatcggatgttctacaggatatggactggcatcaagaatcgtggcagcttttggatgtcatgcagatacccttggaatcatgtttgaacgtccatctaatggaagaaagacagcaagtcctggatggtataatacagcttcatttgaacagtttgcaaacggagaaggagtttatgccaagacgatcaatggagacgcgttctcaaaagaaatcaaaaatcttacgatcgaaacgatcaagaaagatcttgggaaagtggatctggttgtatacagccttgcagcaccacgaagaacaacaccagatggagtgacatatcgttctgtattaaagacaacaggggaggagtttacaaataagaatctgaaccttaaggataacagtattggtatgaagagcattcctgcagctacagaagaggaagtagaggctacagtcaaagttatgggtggagaagactggaagttatggatgcaggcattaaaagatgcagatgtgttatcagaagatgcaagtactgtcgcatattcttatatcggatctgaacttacgtatccaatctattttgaaggaacgatcggtgcggcaaagaaacatctgcatcagacagcagatgagattacgaaagaagttggagtaaaagcgctgatctctgttaacaaaggattggtaacacaggcaagtgctgcgattcctattgttccattgtatatgtctgtattatataaagtcatgaaggaaaataatgtccatgaaggatgtattgaacagattgaacgtctgtttaaagaaaagagattattagccgatacgatcacggatgaacacggatgggttcgtatggatgatctggaacttcgtgatgatattcaggatgaagtgaagaaacgttgggaagagatcaatacagataatgtttcagaacttgcagatgttgatggttattgggaagatttttaccgtatgtttggatttaaagaggaaggaatcgactacgaagcagaaacagatcctgttgtagaaattccaagcatcaaagaataatggcatatacagagattgtgatcacaaggtttggcgatcatctggtcagtatgttattaaaagatggtcatccggtagaatttcaatgtgtaagtgagaagaataaagttgatattgggaatatttacataggaatcgtaaaaaatgttgtcaagaatatcaatggggcttttgttgagttcgatcaagacgaaataggcttcctttccatgagacataggcaatataaagcgggtgatgaagtgttggtacagataaagaaagaagcgacagaagaaaaacgtccgatgctatcagatcagatagaattaacagggaaatatcttgtgctgacttcagataagctgtctgtaggaatttccaataagattcatcagaaagaaaaaaaacaggaattaaaagaaatggcagagcctcttgtgacacaggaatatggctttattctccgtacagaagctgcaaaagccgacaaagaagatgttcttatggaagcagatcagttgtctgcgaaatatcatgagatcgtatctaaaaggcaataccgcaaagctcctcatcttgttgatacaaattacgatgcattggaagtgttggttcatgatatcaaaccaggatcgatcgatcgtattgtgacagatcaggaagaagtaggggaacagctgaaagaaaaaggttatgaagtattcttatgttcttatatggcaggagacattgaacgaagatatcggtttcgtcattatctttcagaggtatttaaacgtaaaatatttatgaagtctggaggatttctgtatatcgaacagacagaggcaatggcagtcattgatgtgaatacggggaaatccattggaaagaagaaccaggaagcacatattaagaaaataaacttagaagcagccaaagaagcagcaaggcagatccgcttaagaaatttatcagggatcatcatgattgattttattgatatgaagtccaaagatgatgagaaagaattattacaggtaatgcagcattatctaaatggggattctaagaaagcagttgctgtagatattacaaagctcggaattatggagatcacaagaaaaaaagaaaaaaatccaatttttcgacaaataagtattgacatattgaaatagtgctgttattatatatgagtatgccgcacagcgaggttaaagaatgcgagaatcaccaaagctggcgagatttgataataggaggtgccgtgatgtacgcaattatcgcaacaggtggaaaacagtataaagtaagcgaaggcgacgtgatcaaagttgagaaacttgacgctgaagtaggagctaaagtaacatttgataatgtacttttagttggtggagatactgttaaagttggaacacctaccgttgatggtgcgaaagttgaagcttctgtagtaagcgaaggaaaaggtaagaaagtcatcgtttacaaatacaagagaaaaactggataccataagaaaaacggtcatagacagttatttacacaggttaagatcgatagtatcgttggataatatcctgaggatagagttatgacaaagataacattctatcagagagtcgatggaacctttcaaggtttccactcacaggaccatgcaggttacagtgcggaaggacaagatattgtctgtgccgcagtgtctgctctggtaattaattttgtgaattctctggatgaactgacagatgatcactatcagattgatgtgaaccaggaagacgcagaaattgacgtagtatttacggaagagctttccgaagaggggagcttgttattaagatcactgatccttggtctgacttcagtagaagaagaacatggacagtatttagatgtaatctttaaggaggtgtaacaaaaatgatgaaaatgaaccttcaatttttcgctcataaaaaaggaatgggttctacaaagaacggtagagattccgaatctaagagattaggtgcgaaaagagctgacggacagtttgtaaaagctggaaatattctttacagacagagaggaacaaagattcatccaggcgttaacgtaggacgcggtggtgacgatacattattcgcattagttgatggtattgttcgcttcgaaagaaaaggtaaagataagaaacagtgttctgtacatccagtagcataatttaattgcatacaggaacagatcatttgagattcagtaattacggcttcaaatacatatttgaggccgtttttcattataagataatgaaatatttttgtgactggaagttgtttttttgacacagaaaggaaaagacaatgtttgcagatagagctaatattataatcagatccggaaaaggtggagatggccacgtaagtttccggagggaactttatgtaccaaacggtggaccagatggtggagacggcggccgtggcggtgatgtgatctttgttgtagatgaaggaatcaatactttatctgattaccgtcacagaagaaaattcaaggcaggagatggtcaggaaggtggcagaagaaaatgccacggtgctgatggagaagacatcatcctgaaagttccggcaggaaccgttgtaaaagacaaggaatcagggaaagttatccttgatatgtctaataagaaggaaccagttgtacttttaaaaggcggtcgtggtggtaaaggaaaccagcattatgcaactccaaccatgcaggcaccaaaatatgcccagccaggtgggaaagcgcaggaactcgaagttatgcttgagttaaaagttattgctgatgtaggtttggttggattcccaaatgtaggaaaatctacatttttatcaagagtaacaaacgcaaatccaaagatcgcaaactatcatttcacaacattaaatccaaatcttggagttgtggatatggatggaagcaaaggatttgtcattgcagatatcccaggaatcattgagggggcgtctgaaggtgttggccttggatttgaatttttacgtcatatcgaacgtacaaaagttatgatccatatggtagatggagcttcagtagaaggaagagatccgatcgttgatatccatgctatcacagatgaacttaagaaatacaacaaagagattctagagaaaccacaggtgatcgcagcgaacaagatggatgctatgtctgagacagacagagagactgtgatcgatttattaaaagaagagtttgaaccagaaggaatcaaagtattccctatttctgcggtaagcggggaaggtgttaaagaattattatggcatgtacagggattattagatgaattaccagaaggtgcaacagaatttgaacaggaatacgaattaaacttcggagaagaagaaggtggaatctttatcggtcatccagaagaaggattatataccgtcgaaggaccgaaagtagagagaatgcttggatatactaatctggaatctgagcgtggatttgacttcttccagaaattcatgaaagaaaacggtgtcattgaacgtttaacagaaatgggaatcgaagagggagacaccgtacgtttgtataatctggagtttgactactatagatagatataattgaatggaggataacatgacaagcaaacaaagagcttatttaaagagccttgcaatgaagatcgatccgatctataacattggaaaaggaagtatttcaccagaacttgtacagggtgtcagagatgctttagaagcaagggaattgatcaagatcggtgttcttcaaaactgtatggacgatccaaaagaactggcaaatgttcttgcagagagaacaagatcccaggttgtacaggttattggtaagaagatcgtattatataaggaatcaaagaatcataagagaattgaactgccaaaagcagggaaataatatcggaggacagccatgaagaagataggaattcttggcgggacattcaatccgatccatcatggacatctgattcttggacaggcagcgaaagaagagtttggattggatgagattttggttatgccaacaaagaatccggcatataaaacgatcagtggcggtgtcagtgagaaaaacagagtcgatatgatcaagctggcgatcagggattttccgtatttcaagtttagtgatatcgaattaaaacgtgaaggaacaacgtacacagttgatacgttaagagaacttacaaaacaggatacagattgcagatattacttcatcatgggagcagattcgctttatcagatcgagacatggaaagatccaggacagatttttaccatggcagatatattagtagctacaagaaatgactcaagaagtgctctggatgctcagattgattatctggaagagaaatacgatggcaagatttatcatttaagcagtccaagcattgagatttcatccaatgatatcagaaaaagatgtagcaatggatcaagtattcatttcttccttccagaggatgtgattgattatatagaaagaaatgatttatatggaagtacagcagatagaagaaaagcttaaaacagcgttaaaaccatccagataccggcatacactaggagtagcttatacagcttcctgtatggcaatggtgtttggagtagatgttcataaagcatatcgcgcaggtcttttacatgattgtgccaaaggcttttcaatggaggagcaaagagcgttatgcaaacgatataatatcagtctggagggaactttaatcaaaagtccgcagctgatgcatcaagagatcgctccatttcttgcaagcgatgaatataatgaacaggattcggaagttttgtcagcaatcgcatgtcatacgacagggaagatcggtatgacaccgcttgaacagatagtttttattgctgactatatggaaccaaatcgaaagatgattccaggactttcaaaagtccgcaagctggcatttgaggatcttgataaatgtacaaaaacaattcttaagaatacgatagagtacctgacagaatgtggacaggaaattgatgagcggacagtagagacttataagtattatagagacaaaaaggagaattaagatggatcagtcattaaatatggtaaagatcgcatatgatgcgttagatgacaagttagcagaagatatcaagatcattgatattcgaagcatttctgttcttgcagattactttatcattgcagatggtaataacaaaaaccaggtacaggcaatggtggataatgtacaggaagaactttttaaagctggatatgagatgaaacagatggaagggtatagagaaggaaactggatcttacttgactttggtgatatcatcatccatatctttgataaagaaaaccgtttattctatgatcttgaaagaatctggaaagacggaaaagaagtatcgatcgaagaattaaattaaaaagaatcatatgaaaaaaaagtcagctatgggaatgctctgaaagcgtctcgcagctgacttctttttatttcattgaacgataaagtccaacgactttaccaataatagatacttctgatacgatgattgggtccatagtatcattctctggctggagtctgtaatatccatcttctttataaaatctcttaacagttgcagaatcttcgatcattgcaacgacaatatcaccattatcagcagttggctgttgttcgacaataaccatatcaccgtcaaaaattccggcattgatcatactttctccacggacatggagcatgaaagtattcttattgctgatatgatttggaagcattggaaaatattcttcaatattctctaccgctaagatcggttcaccggcagtgacggtacctacgacagggatattgatgatctcgcggcgagccagattaaaatcatcatcggtgatctcgatcgcacgaggcttggtaggatctctatgaatgtatccttttctctccaaagtctccagatgggaatggacagaggaagtagaacgaagattcactgcctcgcagatctcgcgtacggcaggtggataacctttatccaggatgcgtcgtttgatgaattcaaggatctgttgttgtttgtcacttaattgttctttggccatgtatcatatcctccgtgtctgtttataaactattcttatcataacatagatccgaaatggaaacaagtgttctcgaacaaagtttcggaaaaagcttgacaaacaaatgttcgagaactataatacagacataaacaaaacaaatgttcgattatagtttgcggaggatgatattatgagaagtaagagaagagtgatcggaattatcatagcagtagtttttgtttttctaatgagtactttccttttaagtaacaacctgatcgaggcccaggaaacaaaagacaagcagtttaccagcattcaggtgcagaaaggtgatacattatggaagatcgcaaagaaatatatggggaatgaatattcgtctgttgacgattatattgaagaggtatgtcagacaaatcatatatacgatggaaagattacggaagacatgtatctggtgattccatattataaataagcaactggcagtcatacggttgatgtatgactgccagttatgaatataaatactttaatacaatattatcgcccagttgggtttttgctaaaagatgcttttgtgctgttatagacagcttttccatagtttgtaagattagagttcattttctttgcttcagatttgttagagatgaatccaatctcagttaaggtagaagatgtcttcgtatgacgaagaacagctaatcctgtacggtttacaagacctcggtttgtaaatcctgtagcggaacggatataaggatgaatggttgctgaccaactatagcttgtcaatcctgtagaagatttatatcctttggaattgtataaggtttcagttcctgtagcagaagatccggcagaattgatatgaacactgtagaatctgtctgcgccaacttcattggcaagatcagaacgctcagtaaggcttgggtatgtatcagataatcttgtatagtaaactttgatatctggatcgtcatcaaagtatgactttgcagcctgaacgatctttaatgtcatgtttttttctttatatccattggcaactgctccagagtctgaaccaccatgtcctgcatcaagtacaacgatctgtttgtacattgcctttggtgaatcatagcgaaccttgatataagaatctgtctgtgttacttcgaatcctttgatcgtagcttttcgaggcctgatatatatctttgtatagccattgctgtaagctacagaataagaatagaagcttgaatcaccaacaacactgcgatgtgacgcatcggaataataagaagaataatttcctttaatgtttacgatcagacgatagttattgtaatcgtcagttgttgagatgtcgctctcggataagccctctggtttatcaagttgtacataatgttctccatttgttgctggaagcgttgtaacggaagaagatgccttattactgttacttgttgagaaagtaccagcataagaactactgctccatgaataagaatatccaagatgttttgcacagaactcaccaggaacatagatgtaattttttttctgtttataggaatatacacggcgtgcaggtgttggaagtttctttttctttccattgacataagcatatttgctgccacgtttcatggtgatcgtcttagaacctttttttaaagtgatcttccatgttttagaagagtaagaataagaaacgcctaatcccttctggaatacatagcttgcggaatacatggttgtatcaccacgtaagaagccaggtgcttttgttttgatcgtcttaccattatagattgcaccgcgagctttctttttctgctttttaccagcaacttttaaagtgtatgtgcgttttgtcgttgcataggatgcggcagatacatttgcaggtattgtcgtaccaatgactgaaactgataatagtgttgtaataaataacttttgtaatctcattgtttatctccctttctcatagattaaatcgtaacatatttgtaatattaatgcaataaaaagactgtatctctttggatttcctgagatacagtctgatattattagataaaattaattaaaagaattacagagtgactggtaaagagcagatccgatcgcctcagatctagcgtcaattcttgcagattccgtgctgttagagatgaatcccatctcggcaagggcactcatcatttttgttcctcgaagtactgcaagtccaggacggtatacaaggcttcggtcataagaagacccttttgtataccccattccacttagcgaagaggaatgaatgacattggcatatgttttgtaatccttatataatgtttcagttccttttgcactggcagagtctgcagaattgatatgtacacttaaaaaacggtcagcattgacggtgttagccagatcataacgttcggtaagagtaggataccaatcagagagtctggtgtaataaaccttatacagcggatcagagtcaaaatttgtcttgatattctgaacgatctttaaggtcatgttcttttcaatataaccgtttccagttgcgccgctgtcttttccaccatgtccggcatcaataacaatgattctgtagaacatatcctttggtgccgcatacttgacatagatataagaatctgtctgagtaacagagaatcctttgattgtagatgttatcagattgatataagtttttccatttagataagaaactttataagttaaagaatctttgatcgtgcggttagaagctgtgttaaaaaagttgcggtaatctccgtcaatgatgatctgtaactgcttattccagtaatcatcgttggaacttatagaagacgatgaaagaccatcaggttttttgatccggatagaataatcagattcagatgctgtgatttttgttgtacttccagaaggattggaagtctgaggctttgtatttgatggagtggaaggagcaggtttagcagtactgccctttgagatcactcctgataacagacgattgttccatgaataatttaagcctagtttttttgcaacgatatctccgggaaccatgatataatttttcttttttgcgatataacggatttttcgaggtgcagatggaagggtgaatttcttcccattcaaggtagctgttctgctgtttaaagtcatcacaagtttctgagaatttcgttgtaatgtaactctttttttggaacttgaatatgaatattttgttccaagagaagaacagtgaccgaagatccagtatgcagaatacatagaagtagaaccttcaatatatcctggaatttttgtacttataaccttattattgtatctggcattgatggctttctttttgacttttttcttagaatgtatgtactgaatcttaaaatatttccctgcagctatagaagctggtgtggttattacacttgatagaagaagtgcaagagataatccagtacataaaatttgttttttgttcatatataatacccctcatattcattgtcgattgttagtgccattataatatgttttgtgtagtttttcaacgagaacatattttctgtgagattaggttagaatgttgtgaaatttctgaaaagttgaaaagaattcttttataaaatgaaaaatagtttccaatctgtctaagaatgtggtattctaatatataagctcgatttttgggggaaattttctatatttttacaggaatcgaattattttgaactataggagcagataatgaaatcagacaatgaatttcgaagaggattaattgatggaattccaatcggactagcatatgtggctgtttcgtttgcatttggaatttcaggagcgtctaagggaattcctgtatgggcacttactttgatctcagcaacctgtgtaacttctgcaggacagtttgcagcggtcataacaatgacggcaggaggatctttggtggaattagttttatcacagatcattattaatttaagatattcgatcatgtcaattgcgatcggacagaaattaagtgagaagtcgacattgtggaatcggatctcaatggcatttatggtaacggatgagatttttgcagtatcctgtgcggggagacatgagattacgcctaggtatttttatgctttgatgtcaattccatggatcagctggaccattggaactcttttaggagcgacggccaatacattattaccattgatcttaaggaatgcacttggacttgcaatttatggaatgttgatcgggattatcatcccaccagccagacaagataagcatataactatcgtgatcattctttccatgatcgttagtttattatttaaatatatcaaagcattatcttttatatccagtgggttcgtgatcatcatttgtaccttgattgcagcaacatttggagcaattttattcccagtagaagaggaggagactcatgaatcttagcagattattagtttatattgcagtcacagcagtttctacatatctaatacgagtcatcccattggttgcaatacagaagaagatagagaatagattttttcgatcatttttatactatgttccatatgcagtactggcagcaatgatcatgccagcagtgttttatgcgacaggaaatttgatcgcatcgacaattggatttgcaattgcgatgatttttgcatataataaaaaaaatattgttacagttgcatgtgcaagctgtatcggagcatttatcgcattagtagttttagggtaaattaatctgccaattcattgacagacataagtaatatcaagaagaaatgaggaagaagatatgaattgtaatttagcagtcattaaaggtgacgggatcgggccagagatcgtcacagaagcaatgagagttttagatgctgtaggagaaaagtatggacatacattttcttatacacagatactgatgggtggagcctccattgatgttcatggagaaccattaacagaggaagctttagagattgctaagaagagtgatgcagtattaatgggttcgatcggtggaaatacaagtacatctccatggtataaacttccagcacagttaagacccgaggcaggcttattaaaacttcgtaaatcccttggattatttgctaacatcagaccagcatacttatatgatgaattaaagaaagcatgcccacttcgtgatgaagtgatcggtgatggatttgatatggtcatcatgagagaattaacaggtggtctttactttggagaaagacatacagaagaaattgatggtgtaagaacagccgttgatacattatcttacaatgaaaatgaaatcagaagaattgcgatcaaagcatttgacattgcaagaaaacgtaaaaaacatgtgatcagtgttgataaggcaaatgtacttgattcttccagattatggagagcagttgtagaagaagtagccaaggactacgaagatgttacatatgaacatatgttagttgataactgtgcaatgcagttagtcaataatccacgtcagtttgatgtgatcttaacagagaatatgtttggagatattttatcagatgaagcaagtatgatcacaggttctattggaatgttatcatccgcaagtcttgcagaaggtaagtttggattatatgagccaagccacggatcagctccagatattgcaggacaggatattgcaaacccaatcgcaacaattctttccgcagctatgatgcttcgttattcatttgatttagataaagaagcagatgagatcgaaaaagcagtcaaagcagttttagcagatggatacagaacagttgacattatgtcagatggaatgaagaaagtcggatgtaaagaaatgggacagctgatcattgatcagatcaaataagaattcgatgctcaccatagatagaatgagatatattatactaggaggttagttttatgagtaatacatttacagagggagaagcatttgcacctcaaagatcgttatttaacgcattaggtttcacaaaagaagagatgagaaagccattggtcggaatcgtaagttcgtataatgagatcgtgccagggcatatgaatattgacaagatcgtagatgcagtaaaacttggagttgctatggcaggtggaacaccagttgtattcccagcgatcgcagtatgtgatggaattgccatgggacatgttggaatgaaatattcactggtgacaagagatctgatcgctgattctacagaatgtatggcattagcacatcagtttgatgctttagttatggttccaaactgcgataagaatgtaccaggactattaatggccgctgcacgtgttaatgtacccacagtgttcgtcagtggcggaccaatgcttgccggacgtgtaaaaggatgtaaaacaagcttatcaagcatgtttgaggctgttggatcttatgcagcaggtaagatcacaaaagaagaattagatgaatttgaaaacaaaacatgtcctacatgtggatcatgttctggtatgtacacagcaaactctatgaactgtttaacagaagttcttggtatgggattacagggaaatggaacaattccggctgtatattctgaaagaatccgtcttgcaaaacatgcaggtatgaaggttatggaattattagagaagaatatccgcccaagagatatcttaacagagaaagcgtttgagaatgccttaacagttgatatggcacttggatgcagtacaaacagtatgcttcatttaccagcaatcgcacatgaagcaggtgttgatctgaatcttgagaaggcaaatgagattagtaagagaactccaaacttatgtcatcttgcaccagcaggacatacatatattgaagagttaaatgaagctggtggagtttatgctgttatgaatgaattaaataagaagaatcttcttcatacagatcttattactgcaacaggtaagacagtagcagagaacattgaaggatgcgtaaacaagaatccagaagttattcgtccgattgacgatccatacagccagactggtggaattgctgtattaaaaggaaatttagcaccagattcaggtgttgtaaaacgttctgcagttgctcctgagatgcttaagatggaaggaccagccagagtctttgattgtgaagaagatgcgatcaaggcgatcaaaggtggagatattaaaccaggggatgtcgtagtgatccgctatgaaggaccaaaaggtggaccaggtatgagagagatgttaaatcctacatcagcgatcatgggtatgggacttggatcaagcgtagccctgatcacagatggaagattctccggagcttccagaggagcttgtatcggacatgtttctccagaagcagcagttggaggaccgattgcattagtagaagaaggagatatcattgcaattgatatcgatgccaatacattaaatgtaaaagtttctgacgaagaattagcaaagagaaaagaaaactggaagcctagaacacctaaggttacaacaggttatcttgcaagatatgcatcgttagttacatctggaaaccgcggagcagttttagaaatcaaacagtaattaagtaagaaaagaggatcaaatgatgaaacaattgacaggtgctcagattgttttagaatgtttgaaagagcaaggcgtggataccgtttttgggtatccaggcggagcgatcttaaacatttatgatgaattatataaacagaaaaaagattttacacatatcctgacatctcatgagcagggagcttctcatgcagcagatggatatgcaagatctacaggaaaagtcggagtgtgctttgcaaccagtggaccgggagcgacaaatatcgttacaggacttgcaacagcgaatatggattcagtgccagttgttgcgatcacatgtaacgtaggagtcagccttcttggaaaggacagcttccaggaagttgatatttccggagtcacaattccgatcacaaagcataactttattgtaaagaatatagaagaacttgcagacacgatccgaagagcgtttagaattgcaaagacaggaagaccagggcctgttttgatcgatattccaaaagatgtgacagcagcaacgaccctatatgaaaaatacaaaccagcgaagatcatacgttccagtgaatatatcaaagaagtagatatccagaatgcgatcagcatgatcagagaagcaaaacgaccatatatcttagttggtggtggagctgtgatctctgatgcagcagatgaattaaaagaatttgcagagaaagtagatgcaccagtatgcgataccctcatgggaaaaggagcatttaatggtacggatgaacgctatagtggaatgcttggaatgcacggaacaaaagcatcaaatcttggagtatctcactgtgaccttctgatcgcagtcggaacaagatttagtgaccgagttttaggaaatccaaaaacatttgcaaagaatgcaaagattttacagattgatgttgatccagtcgagatcaacaagaatatttgtgtatcagcttctatcatcggagatgtaaaagcagtattaacagtgatcaatcgccgtttagaagcccaggaacacaaagagtggcttgatacggtcaaagaatataaagaaaaatatccattaacttatgataaaggacgattaacatgtcctgagatcatggaagcgatttatgatattacaaaaggtgaggcagtcattacaacggaagttggacagcatcagatgtgggccgctcagttttataaatatgataaaccacgtaaattcttgacatctggtggtcttggaacaatgggatacggccttggagccagccttggagccaaagttggtaattcagataagatcgtagtaaacattgcaggagatggatgtttccgtatgaatttaaatgagcttgcgacagcctcgcgatacaacattccagtgatcgaagttattatcaataacagcgtgttaggaatggtaagacagtggcaagatctgttttatgaagaaagatattcgtatacaacacttcaggacaaagtagactttgtgaaagttgcagaaggacttggggtgcaagctaagaagatcacggatatcgaacaattcaaagatgcattcaaagaagccttaaatgcaggagaaccagtagttctcgattgtcatattgacttagatgacaaagtatggccgatggttaatccaggaggttctattgaagatgcatttgataaagcggatcttgaggcgcaggcaaggtaatttttaatttattttcatataaaggagagaaaagaaatggcaagagtatacaacttttcagctggaccggcagtacttccggaagaagtgttaaaagaagcagcagaggaaatgcttgattacagaggatgtggaatgtccgttatggagatgagccacagatccaagatgtttgatgatatcatcaaaactgcagaagcagacttaagagaattaatgaacatccctgataattacaaagtattattccttcagggtggagcatcccagcagttttcagcgatccctatgaatctgatgaagaacaaagttgcagacttcatcatcacaggacagtgggcaaagaaagcatatcaggaagcttccagatatggaaaagcaaacattttagcttcatcagaagataaaacatatacatatattccagattgttctgatcttcctgtatcagaagatgcagattatgtatatgtatgctataacaacacgatctatggaacaaaatatcagcagattccaaatacaaaaggtaaaatccttgttgcagatatgtcttcctgcattttatctgagccagttaatgtagaagactttggagtgatctattttggagtacagaaaaacgttggaccagcaggagttgtagtttgtatcgtacgtgaagatctgatcacagatgatgtgttagaaggaacaccaaccatgttaaaatggaaaacacaggcagatgcagattcactgtataacacacctccatgctacggaatctatatctgtggaaaagtcttcaaatggttaaaggaccagggtggacttactgcaatgaagaaacgtaacgaagaaaaagcaaagatcttatatgatttcttagaccagagtgaaatgtttaaaggaacagttgtgaaagaagaccgctctttaatgaacgttccatttgtaacaggagacaaagatctggatgccaaattcgtagctgaagcaaaagaagcaggatttgagaacctaaaaggacatcgtacagttggtggaatgcgtgcaagtatttataacgcaatgccaaaagaaggtgttgagaaattagtagcatttatgaagaagtttgaagaagagaacaaataaggaggagccatgtatacagtaaaatgcttaaacccgatcgcaagtaaaggactagatttatttacagaagattttaaagtgatcgatgacttagataaagcagatgcagttttagtaagaagtgcagctatgcacgatcttacagttccagaaagccttcttgcagttgcaagagctggagcaggagttaacaatattccattagatgaatatgcgaagaagggaatcgtagcattcaacacaccaggagcgaatgctaatggtgtaaaagaacttgttgttgcaggacttttacttgcatctcgtgatatcatcggtggatataactgggttaaggaaaatgcatccgaagagaaccttgcaaaacttgttgagaaacagaaaaaacagtatgcaggtaacgaattaaaaggaaaaagtatcggagttatcggacttggagcaatcggtgttttagtagcaaatatctgcaatcgtcttggaatgaaagtttatggatatgatccatacgtatccgtacgttctgcatggagcttatcaagaatggtaaaacatatcgcttccattgacgaattatttgagacatgtgattatattacaattcacgttccatacatggattctacaaaaggaatgatcaacaaagaagctatcgataagatgaaagacggagttacattattaaacttcgccagaggagaacttgttgataatcaggcagtgatcgaaggattagcatcaggaaaagtaaaacattatgtaacagatttcccaagtgcagaaatcgctggagtagataaagtgatcacaattccacacttaggagcatctacagaagaatcagaagaaaattgtgcagagatggcagtggatcagttgatgaattatttagagaatggtaatattgtcaattcagtaaactatccaaactgtgatcttggagaagcaagtggagcagctcgtattacagtacatcataagaatcttccaaatatgatcggtcagttaacagcgatcttggcagcagatggacataacatttccaatatgttgaataaatccaaaggtgaatgggcttattctatgtttgacatggaaaagaaagcaccaacagaagagacaatcaagaaaatggaacagatcgacggagtcgttcgtgttcgtgtactataggagagaaaaaatgagtgaaaaattaagagttggtattttaggtgcaactggaatggttggacagcgttttatttcattacttgagaatcatccatggtttgaagttacaacattagcagcaagcccacgttctgctggaaagacatatgaagaagcagttggtggacgttggaaaatggatactccaatgccagaagcagtaaaatctatgatcgtaaaaaacgtcaatgaagtagaagaagtttcttctcacgtagactttgtatttagtgcagtagatatgtctaaagacgagatcaaaaagatcgaagaagattatgcaaaaacagaaacaccagttgtatctaacaacagtgctcaccgctggacaccagatgtaccaatggtagtacctgagattaacccagaacacttcgaagtgatcgaaagccagaagaaacgtttaggaacaacaaaaggtttcgtagcagtaaaacctaactgctctatccagagttatgcaccagttttaacagcatggaaagaattcgaaccatatgaagttgttgctacaacataccaggcaatttccggagcaggaaaaactttcaaagattggccagagatggaaggaaacatcattccatatatcggtggagaagaagaaaagagcgaacaggaacctcttcgtttatggggacatattgaagacggtgtgatcgtgaaagctgaaacaccagtgatcacaacacagtgtatccgtgtaccagtattaaacggacatacagcagcagtcttcgttaaattcaagaagaaaccaacaaaagaacagttgatcgagaaattagtaaacttcagcggacttccacaggaattagaacttccaagtgctccaaaacagatgatccagtacttagaagaagataaccgcccacaggtaagagaagatgttgattacgaaaatggaatgggaatctctgttggacgtttaagagaagacactgtatatgattacaaatttgtaggactttctcataacacagttcgtggagcagcaggtggagctgttttatgtgctgagacattaaaagcaaaaggatatattacaaaaaaataagtattgtaatgaatagataaacttgctatgataagaaacacgtagaaatacgtgtttctttcatgttaagcatatttgtgaaatgaatatcaaaagaaacacaagaaaaaaagaggagagtttatgttagcacaaatacaagcgatgttcgcagtagtggacttgggcaagattaactggaatcagtttttagaaaaatatctggaaattgcaatgagtatcataggaaaagtcatagtatcatttttgatcattgcaattggatttaaattgatcaagatcttaattaaattgttaaaaacaacccttgagaaggcagagatcgattatggagttatctcattttcctgctccttcataaggattggattgcgttgtattgtaatctttatggcagttgcacatatgggggtagaggtaagctcctttatcgcattattaggatctgcaggtgtagcagtaggtttagcattacaaggaacactttctaatgtagcaggtggagttttactattaatcctgaaaccatttcaggtaggagattacatcgtattaacaggaaccgactgcgaaggagaagttgcagcgatggatattttctatacaaagcttaagacaattgataaccgagtgatcgtcattcctaacggaacgttaagcaattcaaatctgatcaacaacacaaaacaggaacgaagattgatcgatattgaagttgggatctcttatgatgcagatattaaagaagtcaaaagaattcttacagacatagcaaaaaatgaaaaaagaattcttgatcaggatggagttaatatctttgtgagcagtttagcagacagctctgtcatgatggggatcaggtgttgggttccaacatctgattatgtagcgaccaaatgggcgttaaatgaagagattaagattcgatttgatgaggaaggaatcgagataccatatcagaaattggatgtttgtattaaaaatgaagtgtaataatgttccgtgcgcagccgagaacagaacttagtaaatttatcaatgcttataaaagtgccagtagcaggcactccagcagaagtaatccgtcaatacattgaaaaccagggagagaaaaagtattgaacatagcatatcgtttccggatctatccgacagaagaacagaagatacttcttggcaaaacatttggctgttgtcgttttctgtacaatcagatgcttgatgataagattcgagagtatgaaaagacaaagaaaatgttaaaacacacaccggccatgtataaaagggaatatccatttctgaaagaagtagattcgctggcactggcaaatgtccagcgaatctggaaaaggcatatctatcactgtgagtgtggaaataagatggacagagatcataatgcaacgatcaacatccgtgaagaggtaagaaggatgttgacagcataaactgtccgtatccggacaattggataataagaaaacatgcccgtgcccgggcaaaagaatcgcggggcacgcgaggatagcttgtagatacttggctcagtagagccattgagcaagaagcccccacttcaaaatcagggatttaa

SEQ ID NO: 656 - DNA, 4096 bp, Unknown
  gut microbiota DNA sequence
attgattttttcttcatatttaaaaactacagacagaaatgtctgcataacggttagggtgtcttacatatctcacccgccaatctgtgacattcctctgatttcatcctgctctgtcttcgcttcataaaaattatggctcaccggtttattccagatcacctgataaattgcttttttcagttccgaatctgtgcagccgccgcgcataagcccccgcaggtctgtacctttctgatactggaggcatcctttcatgaatccttcggatgtaagacgtactcggttgcactgactgcagaatttgtgagtcatggcactgataaatccgatttttcccttaaatcctgcgatttcatagtaatggcatgggccgtttccgtagcgttcattgactgcatgcatcggaccgtaggcttcttccagtactgctttgatagattcttcatcctggaatgggaactgttttccgaatccgattggcatcatctcgataaaacgcacatggattggatatttctgcgccagtcctgcaatcccgatgaagttttctttttccttgatcaccggaacgctgttgatcttcagggaaagtcccggatgtgcaagtgctgctttgattccctcaaataccttttccagtccgtcacgtctcgctacttttttgaacagttccggatccaaagtatccagactgatattaatggcgtcaattcctgcatccagtaatgcatccagctgctcggcgagcaggattccatttgttgttaatgtcactttatcaattcccgggatcgccttgatctgttttgcaagacttgcacagcccttacgaacaagaggctcaccgcctgtcagtttaatcttacggattcccagatctgctgcgcacctgcagatgcggagaatctcatcgtatgtgaggatttctgcatgagaaagggattttacgccttcttccggcatacagtaaatgcatctcagattacatctgtctgtcagggaaatccttaaataatctatttctcttccatatttgtctatcatcggctctacctgccttttactttctaataattgatttttctgttaccggatacgggtgaaccgcaacctttgtaaccttttcttctgttattcgctgtcaaaatcacatgcaatattttctctcataatcgtttgacactccatactccgcagtctatacttaatgtatcaagattattaaaatccttaccggacgaaaggaactgtcctatgaaaatcaacgaacaataccacaacctgaatctgctcgagaatgttacctatgagtttctgggtcgtgacggggaaactcatgaagaaacggaacccattcttgtggaacacatgatggatgtatatgtaaatgaacgcctgaccatgaaactggtctgtatcccacaacatctgacagaactggttctcggccgcctctttacggaaggtatcatctcatctgccgaggatgtggagcagatctacatctgtgaattcggcaaacgtgcccgcgtgatcctgagtaaaaataaatccgggcagtctcatgaggaaaatgaagattatgttgctcttactccgacctgctgcaccggaaatcgtgttcttaatgattattttatcacagatcagccaatgacgccagttacacctgtcccatggaaaaaacagtggatctttgatcttgcagactgtttcgccaatggtaccccgcttcacagccagacctgggcaactcacagctgttttcttgcctgtgacggagaactgctctttcagtgcgaagatatcggacgtcataatgctctggataaggccatcggttatgccctgcgccataatattgacctgaagaaatgcgtggtttattccagtggacgtatccctacagatatggcgatcaaggcaatccgcgccggaataccggttctggcaagcaaggcatccccttccgccgaggcagttgccatggccaaagaataccaccttacccttatctgtgccgcgcgacgtgaccgtatgaaactctttaccggaaataatccgacagaataaattctgcaatacactctgcattgtccagttcaaagaatggaacattttccagtacagacagtgcatctctttcctctgcatccaggtttgtggcgatcgccatcagtttttccggatcgcagacactttctgccgaatttcccttacggataatttcaattttcggataagtactgtatttaaatccttccagtaagatcagatctgcctccggaaaaaattctgccagctctttttcggaaatctgcggctgctgttttaccagcatatatttgcctgctgaaaaaactgctgtgccgtaggctccggactgaagctgacagtatgtatccgttcccggtacgtccggcacgaaatcatgtccgtcatgcttcagcaccgccactttaaggcccttgtctttaaaaatctccaaaagcctgcagatcagagttgttttccctgaattctttacaccgctgattgcaaatattctttttctttccacctgtttgctgctcctctcaaagcaaaatcgcgcccactttatcccctgcgttcaggcttctgctttcctgattttccatggtttttgtatcaatcaggcaattgcagccggccatggaactgaggactccgttagagtgaagaccattgggaagatgaaattttccattttccagatatgcccggataaagcggcggcccttgattcctttttcaaagttatcagccataatgccatttacttctttcagaccgattgatggatcctgcatcattttttccaatgcaggacgaatcaaaagttctatgctgactgcaacaccaaaaggatttccggagagactgatgatcggaatctctctttctgaagcgcaatgatctgttgcagttatatcggaagtttttttatatgcagaaaacagtgtaggcattcctggtttcatctttaccctccagaaaatccgctctgcccccatcagtctcagggactcatgcataatgtccttcttgcctacagatacacctcccgtagtgatgatcatatctgccgcttttgctgcttcttttaatttctcagacataaccgtcggatcatctttgactgcttccatatggaaagattcgattcccagttcacgcagtctggcagacagcattgtcatattgctgttgtaaatttttccttccggcaatggaattcccagttctaccacctcatctcctgtagtcagaagcacgattctcggctgacggtaaaccggcactttcgccactcccattccggccagaattgctgcctccacatatccgatatgtgttccttttttcagaagtgtagttccctttttaaaatcctctcctgcgaagcaataattactccatcgcttctgttcgctgtaaacttctaccgtatcttcgccataatcggtatcctcctgataaatacagcaattgcagccattgggtattgcagcacctgtcataatgcgcactgcctgtccctgctggatttctctttccgaatactgtcctgcatcaatctcttccatgactttcagcctcaccggatgctctttagcggcacctgcaaggtcctctgccttacacgcatagccatctaccggagagcggtcaaaaggaggattgtcaaaccctgccaccatatcctgcgccaggattcttccccctgctttattcagttctgtttcttctgtctcgtttattacaggcgtatgctgcagaatctgttccactgcctgttctacactgattccctccacgcactaattcctcctcttgtatattacatttttatagtcttttcaatgcctttataaccaccgggtcaattgacggatatattagttttaccttttgaactctatagcaatttcagagaataatatcactaagatactccattagagccttatttttcataaaccagattgtcttcagtatttcggaaattgctataacatcataatattcagcccactgctgaagaattacatatttttcatctctgttggag

SEQ ID NO: 657 - DNA, 1010 bp, Unknown
  gut microbiota DNA sequence
ataccatagaccgtactatcgaacaagtgttctttttgtttttatgcaattcatctccaacctgtagaggagaactcttgctatattatgttaaaattacgttaatcagtagttttgtgaatatgtctgttcgtgtgatctttgctgctattcttgtgttccatttttcattgcaaattgaagcattaccgtttttcttatcttgccggatggattggaatgcttgtggcggaaataccgttgcttttgaagaaattttaatttgtaagttggccaactataaattataaatttgatatgggtgtcaaaacataataattatcgcccatagaaatctatgttccttgaaaatttcttataaaacaacaaatatccattgttagctctgttttggggtaataacccacaccactgtttctgctctgttaactgatctggggaattaaggcgcactgacccacactgttcagatatccaaacagcttcttgaagttcagggctgccagttttatcccaaaacggagtttagtggggagaagccctcttaccggcatatggtctatctggtattttctccacaggatggatgggattgtttccactccgtttctgatccgggacaattccttatatttttctgtcttcattttcttttgtgtctttgctctgtcagaggattttttagacagaaaaaccacactggtcctttaaacatcttggggttgcactggtcacggtgtggacagttttcacatttgttttttggaaatgatatcctgcattgtccagtctggttgatataattgcagcgtttgtattgtccctgccgctatagaccccatctgttataagcactgttggctcctctgttttttccatggattcaacagtttccacaatgtttgctgtataaccacggttttgtttcccctctttttcacggtaagttgcatccgggtcagaggaattctgcaggatttgggaacccatagctccatcttctttggttt

SEQ ID NO: 658 - DNA, 608 bp, Unknown
  gut microbiota DNA sequence
atataataaaatctgtttcttctgattttttcgaaactatcaacacctactggtaatttcaaagtgtctgccatatacacctccactatgctcgcccatagaaatctttcttttatgctataatttacaaaacattataacatgatgtgtagtgagatacaatcaaacaaaaatcttccgtttatacacgattggatcatcatatccaaatgttcttcttccatttacttctatgatctctgatacctccagactatcctctgaaaatctttcccataatttaaatatcataactggtgaaaactggcttgtactgccgccttcccagacaccatccttctcgcgataaagtgctggtgtgaatttttttgattcgttcagttcactgtaatctactgctttcatagaatcataagaaaatgtattcttatcttctccattcggaatatcgtaggaagaaagtacaattccttcattattttctgaaataagaaaaagatgcggtgatgtgtgactttttccatctgttttatagtaactttcttctacaacaaatgtaccattgaagttttctgggagatttttgattttatcgttacatgctgtat

SEQ ID NO: 659 - DNA, 33500 bp, Unknown
  gut microbiota DNA sequence
atcaagtcaaactttttatctaatctcctgatatttcctattatgaatccaatcaatcaaatatgcaatcctaatatacaaatccatatataaacataaaattctctctgaacaatattcctatattacccaagaacatcatccagagagaacccaaaccctctattccatatacacttctactcctccgtcttaatcgaactaatcaccacatcccccaactgacaccccactttccgaacaacaatatcttcaatctgactcctctcaaccttagacagatccttcttattaacaagcacatccaccttcccattcgtaatcgtaacaatactattcaaaaatcccttagcccccagcagattctcagctgcagtctccatctccatctgctctgacaacattgccaacttatccactgcatcctgtttcacactatctttcactgtctgatccttaataatctcctccagtgtatccttcgccttgctatgtgtctgctccctctctaatttcgctttcgccacataattactaacctgagcatttgtaagcaccgcttctccaacatcagtcacgtcatcggttactgctgccgcactttcttttgccacgttctttgaaactgtcttcgtcttactattcttcgtcccagccggatcgtatttctgactataatttacataccctgcaacagcgatcacaaccgctaaggtcatgatgatcatctgatttttctgaaatacttttttcattgttaggaatcctccatttttaagactttcactttataagatgaaatatgaaataacacagaaactgcttcaacgatctgattctttataatatcattcccgccgccttgggcgacaacgaccactccttcaacgactggttctacttctttgatcacatatgggactttctttccatcttcttcgactaagacagtctgttcatcttctttgaccgttttttctttttcactgctgctttgttcgtagggactatctttatttacgacagcttctttggatgaattaacggtgatcatcacttttacttttccgactccttctacatgttttaatgcattgaccaatcgtttttcctgctttttcacatagagatcggtagaatcttcttttgctgtggtttcagtgctttgtgcgttcttctttgtcttcccggatgggatacttacgatgatcaggctgacgccaagaagtaagatcaggcaaagttttggaatgccgatattttcaatcagatgttgtagtttttccctctctatcatatttcttctactcacttatatttatattagattccttcatattatagaagtttgaaattgcggtttttagtttctttgtatgacgaagcttgtctgttttgatgtcgatcttctcgatggttcctttttcatttacctttgagtcaacgtctaatactttgagatcgtactgtgaaaataatgttgtgatctgttctttgatttgattttgtttttcttcttttgcaccatctaaaaatgtagggttattttctcctttgactgctgttgagattgcctgtgtcacgatatcttcgttggataaataataggatattggctgcatcatcagggagatgagcataaatcctgtcattaaccgaaggtatggacggtagatgcttttgtcgcagagctgatcgatcagtgttgttaagatcagaaaaaatatgatcattttcagataatccataatccttaccccgcataataattaacgttggttgagaatgcgatcaatgccacggacaggataaataacagtgccatcgtaaagatcatcgaaagcattaattttccgctttgaatgactgcatccatcgctccggtgatccttttgtcggatattggctggatcatgattcctgccagcagataggtaagaacaactgctgtgatctctatgactggtgggacgatgatcacgatcagtacgaggatgccaacggctccgatactgtttttgatcacaactgccgaaccgatgaccatggtcatggctgaatttaaaccacttccgattcctggaatggcactcattcctttttggagaactgtatttttcatggaatcaacggctggaaggatcatcgactggatcagctggactcctaacaggacacttaagaatcctttgagcaaaaacttgatcacaccttcgagcgttttgcatagtcttgaaaaatgttcttcttttgatatatgattgatgatctttaagacaaataagatcttgatcatcggaagtaatacaacatttgtaagggttgtcattgcatagatcagtagaagataaaattcataaactgtcgttgatgtcgtgatcccggaagttgagacaacagccagtgaatatgccatgatcattcctttcatataatctgccattaaggtaacgagctgcgtcactgttttgtttaaataaaaaaaggaatgtaccatgacaccgcataggatcacataagtaatataaaatgcactattggctgtgctttgctgaaaaaaggaatcggacagatttttaaagatggctgcggtaaatgcgatcagaaggatttctctgatcaggtctttttggatcaacatacggtttaaaaagacctctttcattttggctttgatcgtatgcagaacaccttttacatttccgtggatcagctgttttactaattgtgtataagatagatcgatctctttgtcttttaaggtgttttccacattggtaaacatatcttcgtttagttttgtttctttggctgaaatatcatttgttcttgtaaggatcagtaaaaatagcaaggttagcaggaatattctttgtttcatgtaccatttcctaatagtttctggattgttccaagcagcgattcaaagactggaagtccaacgatcaggatcgctaattttcctgcaaactcaatctgctttgcaatcgatgcctgtcctgcatctttgcagatgttggatgcaaactcgcagatgaaggagataccgatcagttttaaaaggatctggaagtagctttgtgggatttttgaataggaccggatcatctcaaacacagttagtatttcctccatttgttttagtccatacattgctagaagaatgcttgagatcactgcgatcacgactgcgatctctggacggatcgttttgatcttcatggcgatcagacttgcaacgatcccaaagactgcgacttttatcatcttagtatccgcctccaatctctaggatatcgtaaaaagtgtctggacgctttcaaacagatcatagatatacgggatcacccaaccaaggacaaggatcagtccggcaagtgtgatcaaaaatgcctgttcgtctcttccggaatgttttaagacctgcacaaggattgttacaagaattccaacggctgcgatccgaaaaatgatattgacactcataacccctccttgtcataaaaatgtctggtagttgctttatagtaagatgatcacgatcagaacgcttagtgatataccgaggcttcggtacatcttgcagttctttactacttgatctttcataaggaagatctggtcatcaagttgttcgatcgtcagcaggatcgttttctcctgcatctgttggtcaagatatccgatcgtttcacccatgttttttaagatttcataaaactttggttcatagatcacttgttttaatttctgatcagcggtctgctgccatattttagcgaaagattcttcactgtgtgtctctaactgctttgctaccttttttagaaatggctgatattccttctctgtctttgtcgatatttttaaaacagcttctggaagtggggtaaatccatagcggatctctccttgcagaaggtataacattcgtttgatcgcaattccctgttctagacgtttttgttcttttgcggctttgtgaaatccaaatccaatccctgcaaagatcacgatcaatgatcctaatatcttgatcaatttaggaccaccccgttttcatctatgatctgtgcgatatagcctggctggtttcgctgttctaagatcacgtagcgctgaaacatctttttgttgatgatctcccgcatatagggattcttagataacgattctttgttctttccatgggccgttgcaagaatgctgcagccacgataggcacagaaaaataaggcttccacatcttctttgcttccaatctcgtccacagcgatcacatcgggggccatggatcggatcagcatattcatgccctgtcctttttcacatgcatccatgacatccgtctggatcccgagatcattttgggcaacgccttggtagcatgctccgatttcacttcgttcatcgactactccgacggtctgtccttcatcagagatttttcggatcatatcccgaagcagagttgtttttccacagccgggtggtgagataatcagcgttggaatgagttttcccattctggtgcagcgtgaatataagatgtccgcacatcctttcacttcatgtgcgactcggatatttaacccggaaatatgtcggattgttttgactttgtcatgatccatgacaacggttccgcagataccaactcggtgtccgcctcgaatcgttaaaaatccttgttttaactgttcgatataagcatacatcgaatagctgctgatatattccatggcttgtctgatctcttgtgaggttacaatatgtaattgttcttttcttgttgtgatctttccctgttcggatagataacaggtttttgcgttgtattttaaaatgactggcttttgaatacgcaggcggatttcctgaagttcgtcccagttgatgtctgcctgctttatgatcgttctgatatgtaatggaaggattcctaagatttcttcctctttcatagatttaaaaacacctccccatttttgtataatccaaatatatgtgatggaaggtgtttttatgaatgttattttattttttcttctgataatatggtgcgatctggtcaaaggattgtctgagctgatactggaagttattttgcttgacgatatttgtcttctgagtgacaaacttgtctaacttctgcatatactcttcttctgtgacacttccttccgccacataagtaagacctttttcccagcttgcggtcaaggttgggtttaagagtgatccaatggatgcactgacaacattgacgatcatctctccggttaaagtcggtgttacgatctgtgtctttttatttaatgcaatgtatttattggacactaatttctttacgatctctgctcttgtcgcactcgttccgatcccgcttcctttgatctgttcccttaaatcttcatcttcgatcagctgtcctgcattttccatcgcaaggatcagggaacctgagttgtatcgttttggtgcggatgttgttccatctttgatcgtatagtctttcactggaagaggcattcctttcttcaaagatgagatcgcatggatctgttcttctgttaactgggcttctttcttctgtccgcccattcctgtgacttttaagtatcctgggtcttttaacatcttaaagtttgcaaagaatgcttcgcctttggtctgtgtctctaatttgatctttaagtacacagctggcggcataaagatgcttaggaatcttctggcgatcacatcgtagactttctgtcccatctctgagatccttgataaactgcctactgcctgcccggttggaatgatcgcatagtggtcggtgatcttcttgtcatccacgtatttcgacttgatgatcccctgatacttcttgccctgcatgatctcatttgcaaatcctgataatggagtgtagttgtttaatcccccgatatttttataaatctctttggcgaccgcactggataagactctggcatcggttcttggatatgtaaccagtttcttttcatataggtcctggaccacttttaatgtctcatctggacttagcttgaatcgtttggaacattcattctgaagttctgccagattatataataacggcggattcttcttttcctgtcgtttggatgaggatactacgatcgtcttattgttacttccatcttctaaatatttgatgaattcctgtgcatcgttcttgtccaggaatccgttatccttatatagtttcttggactcaaagtactttgatcctttcactgctttccattcggcttccacttcaaatccctggcagtcaaagtgtcctaagattctgtaaaacggtgttggcacaaaggtacggatctctcgttctctcttgacgatcattccgagaacacaagtcatcactcgtccgactgctaccactaagcttcgtttctgatttaaatagttaccgagtgtccagccatatttgagtgtcaggactctggagaagttgattcccatcagatagtcttctttggctcgcaggtatgcggcggcggctaggttgtcatattcacttaagtctttcgcttcttttaccccgcggatcacttcttcttttgtctgggaatcaatccagacacgttttttcttcttgtctttgctgacattggcctgctggtctaccagacggtagatgtattctccctctcgtccggagtcagtgcagacgtagatcgtatcaatgtcttctcgattaaggagtgaagatacaatattaaactgtttttgtactcctgggatcgtttcatatttaaatgtatctggaataaatggaatggtttctaagtcccatttctttagtgcagggtcatactggtctggataagacatggtaactaaatgtccgacgcaccatgtgataactgccttgtctccttccatgtatccgtctctgttttttgcatttatattcagtgccgctgcgaattctcttgcgacacttggtttctctgtgataaatagtgctttcaaaaaattacctctttctaaaagttttacgatatattataacataaccattgaaaacatgatataattaaatctagttcttgtggaattcatatttgtagaatcatgattccacataaaatttatactgaaaggatgatgagtatgtttttaaatgaagcaaccaaacttcgtgcacaaacaattatcaagggacttgaaaaaagaaatatgcatggtgttttctgtgcaaccaaggaagacgccctaaaacaggctcttagttatatcaaagagggttcttctgtttcttggggtggttctatgagtgtttctgagattggactgatggatgccttaaaggaaggaaactatcatctgatcgatcgttctgttgcaaagaattttgatgagcagcgtgagattttttctaaggctgtcttatctgattatttcctgatgagctctaatgcgatcaccttagatggagaactgatcaatatcgatggaactggtaaccgtgttgcgtgcttaagttatggtcctaaacatgtgatcatgatcgttggtatgaacaaagttgtcaatgatgtggaagatggtattaagagagttcgtaattttgccagccctccaaacactcttcgtctcggactgaaaactccttgttctatgactggacgttgtggtgactgttatggtgatacctgcatctgcagtcagatcgttgtgacaagacgtcagagtgcaatgatgaaagatcgtgtcaaagtaatccttgttggtgaatctctaggttattaaggcactcgctctttctatcaaatatcacagaacacagacattttatcaggcattttcactggatattttatcgccattccagtgaaaatgccttttctattcttgaatttttataacaatcatagtaaaatcaaactatattatgacacaattcgacattttttataacaatattgatattatgaggtttttctatgaattatgatatttgccattcatctatcacttattttccactgcttccgctttctaaaacggcttcctttgagcgcaaggtactggatatccgacagatgcctgctcaggttttgtttcctcattgggatgatgaatttgagtttatatatgttctctctggcatgatggaatttcgtgtccggcagaaggcttttctggtttcttctggagaaggtttctttttaaacactggggagattcattccgcttgtgcatatcagtcttatgactgccgctttgttatctaccggatctgcccttctgttctttttcagacagaagataatcctttatatcaaaaatatatcaaacctctggtcgatcatccttcctttggatttttaacgttcgttccaaaagtcccttggcagaaatatatccttgaaatgatccgcaaaatgaatgatatctgtgaccgtcctgttgatggttatgaattgaagatcaaccattttgtaaacgagatcttttattatatctttcataatgtgaatctctccaaagaactgtccttaaaagaatccagagatttggaacgtatgaaagatgtgatgatatatcttactaaaacgatcgaccaaaagcatacactcgctgatattgcttcttactgccatctaagcaatagtgaatgctgccgactctttcaaagaaatgttcatctaagtcctgtggattatctgaatcagcttcgtattcatatgagcttgtctgagattataaaacatgagaaaaagataacagatatcgctaagatgtatggtttctctggcagcagttatttctctgaaatgtttaaaaagaccctcggcataacgccaagagccttttataaatctgttcttcagcaacaaactctttcttctaacgctgatcccattcacggaaggcgatgaatttcgtcttccaaagaaggctcaatgctggtgttaatgcccagatcatctttgtcccttcttgcatgatcagatcgatctttaatatccccgcatactgaattaccagtagtaacgtaaagatcactagtaatccatatgcaacagaataagaattatgcactttctgcccgatcttctcactaaagtaaaagcgatccagtgtcagagaaatgattgaaatcactgataaaatgatattgatcgtataaaatgtatgcatatccatatgattaaaccaagttgccaaaactcctagaaagatcataatctgtgcataccataatactttttcctgtttttcatattgatttctcattgattgaaacctctttttctttcttttaataatgaataaatacaggatctccgatcttcgtcaggttatatacagatcttgcatctgataatgttaagttaacacatccatgagatccattcgtcttataatatgttggtgaccagcttccccagtctcctctgctgctgtaatgatatcctgttcctgtccacatgatccttgtccagtatcttgttggaacactgtaatccgcacctgttaatgtctttgtaagtttcttctctttgatgtcataaacaccggttcttgtgatacgatctggtgttgcttttccagtgatacaggttgtgctgaatacaagttttccttttttgtagacgaaaacttcctgtgctgacaggtcaacttcactgtagttttgtgtatcccagtcattttgcttgttcgtataatccatacgatatcctttgtggctgtagactggttttaagcttgtaagtaaagcctgttcattctccttggaagggtctttctcataggctttgatcgcagattcttctggtgctttctttaacgctttcattgtctgtgcgataactttatcataatcgatacgccatccatagtctccaccactgactttgatcttcttgccagaatgtgtcttaaatgttcttgcgattccctgtgtcttgtattttaagcaaaagctttctaaccatttctcgacggcaggctgatctaattttacagtatgtctctttgtgtttactttgatgcagtcttttaacgcatctggacctaatgtttctttgacattattgcccatatcccactgaatgaaatgtaataaatactcattgtaggttgtctgcatctgttttaattcttcatcatcatgatacagaccaggctttttatagacgtccggattcttcttttcatctgtcagattcagtgtgttacttaaagactctatggatttctctactgcgtcataaaatgctttacggtttaagtaatttccttcatcttccttctggattacaccgtatttcttatctgcagaatatacgatcgttgcatccactggttttgtgatcttatatgtatcactgcctttgatcaaaacggattgttttaatttggcctttaatttctgctctgataatgcaactgctgtcactttggtttttttgccaccaaagatcgttgaaaatacactttggctgtgctgctttttgtaagcatcctttacatgtgattctgtcttaaatgcaagatcgatctccttaccggaaatcacttcctgtccgttatttcttcccttgatctttaacttgtaagaatcaatggatttctttactttcttcactgattcttcgtatgtcattcctgacacatcaaccttgttaaatgtactccccggataccaacggttctgataatgggcatggacaccgatagcggctgctattaaaacaaccgctacggcacctcctatgattcccccttgtttctttgtaatcctcatattgatttctgcctccaaatacgactctgtgatggattattcatagagtggatatttttctgttaatcctaatactaattcgtttgcttcatcaagtttcttgtctaataatgtcagacgaatagcttttgcgatcactttcatatcgtcttctttcagtccacgagttgtaacagctggtgttccaagacgaagtcctgatgttacgaatggagattttggatcgtttggtacagtattcttattacatgtgatatgtacagaatccagtactttttcagcttcttttcctgtcagatcatatttcttaagatctactaacattaagtggttgtctgttcctccagatacgatatcgaatccttcttcgatcagtgcatttgcaagagtatctgcattcttcacaacctgtgtcatatattctttgaatgatgggtctaatgcttctttgaatgctacagctttaccagcgatcacatgcattaatggtccaccctggattcctgggaagattgctttgttgaagttgtatttttcgttcacttcattgctgcacatgatcattccaccacgaggtcctcttaatgtcttatgtgttgtagttgttgttacatgagcataagggattgggctctggtgtaatcctgcagctactaatcctgcgatatgagccatatctaccattaaaactgccccaactttgtcagcgatctcacggaaacgtttgaagtcgatcgctcttgcgtatgcacttgcaccagcaatgatcatctttggtttgcattctaatgcgattctttctacttcatcataatcgatgaatccttcatcattaactccgtatggtacgcagtgatagttcttaccagacatgttgactgggcttccgtgtgttaaatgtccaccgtggtctaagctcattcccatgtatgtatctccgacattcaatactgcgaagaatactgccatgtttgcctgtgctccagagtgtggctgtacatttacatattcgcatccaaataattctttggcacgttctcttgcaagatcttctaccacatctacatactggcatccaccatagtaacgttttcctggatatccctctgcatatttatttgttaaatgacttcccattgcagccataacagctttggaaacaaggttctctgatgcgatcaactcaagatttgttctctgtcttgttaattcgttttccattgcttctgctaattctggatcgtagttctttacttcgctaaaatcaaacattgttttctcctttatatatttatgtaaaataatattgtgtctcgtatgttgtgtcttattcttatgatcattcgattgcctgatctatctgattattcctggaactgttcttttaatgcttctactgcacgttctacacgactctctttgatcagaacagtgatcttgatctctgatgtgtagattaagtgaatgttgattccacgattatacagtgcttcaaacatcttagaagctgctccgctgttagacatcattccagctccgacgatagatacaattccgacttctttatcactgataatatcttcgtaatctgcttcatcaaatgctttctttaatgtttcaacggcatgatctgcttcatcctgtgctacaacgaaagaaatatctttattctctccacgtccgatggactgaaggatcagttccacgttgattttttcttctgcaatggcaccaaaaacttttgctgcgattcctggctggtttttgattcctttgattgcgatcagtgcaacttcagagttagactgaacaccgctaaataacattttctccatctgattattcctcctctggtgttgaaagttcaattccaagttcttctagctgtaatgtatcaaccggtcctggagcctgtgtcatcaggcaggaagcatcttttactttcgggaaggcgatgacatcacgaatgctgtcttctcctgttaaccacataacaagacggtcaagaccataagctaaaccagcatgtggtggtactccaaatttgaatgcatctaataagaatccaaaacggttgtaagcatcttcttttgtaaatccaagagcttcaaacatcttctcctgaatatcatcctgatggatacggattgatccaccaccaagttctgtaccatttaatacgatatcgtatgctttcgcacggacatctcctggtctttcatcaatgaattcaagatcctcttcaaatggcattgtaaatgggtgatgcattgctgtgtaacgattctgttcatcgctccactcaagtaatgggaattctgtaacccataagaacttatactgggatttgtcgatcatatcgtactgtttcgcaatgtgaagtcttaagttaccaagtacatcaaagacaactttgtctttgtctgcggcaaatagtaataagtctcctgcctgtccatccattgctttgatcagtgcatccatctcttcttctttcataaatttagcgaaagatgatttcactgttccatcgctctttaactgaatatatgcaagacctttcgctccgaagtctttggcgtagtcaacgaatccatcgatcttcttacgtccaagatctcctaaacctttagcgtttaatcctcttacagatccaccattctctaatgctcctttaaataccataaagtcgcatccggcaactgtatcggatacattcgtaagttccattccaaaacgcatatctggtttatcagatccgaaacggtccattgcttctttataagtcatgcgaagcataggaagctgtacatcaatatctaatacttctttgaagatcttctttaacagacgttcatttacatcgatcacatcatcgacatcaacaaatgaaagttccatatcgatctgtgtaaactctggctggcggtctgcacgtagatcttcgtcacggaaacattttgcgatctgatagtaacggtcgaatccagagcacattaaaagctgtttaaacagctgtggtgactgtggaagtccgtaaaattctcctggatgtacacggcttggtacaagataatctcttgctccttctggtgtactctttcctaaaactggtgtctcgatctctaagaatccttcatcccctaagaagttacgtaccattcttgttacattattacgaatgcgtaagtttctctgaagatttggtcttcgaagatcaagataacggtattttaaacgaagttcatctttgactgtctgattctcgtcaattggaaatggaggagtttctgattctgataagatacgtaatgtatgtaccttgatctcgatatctcctgtctttaagttctcgttgattgctgcacttctcttctctacagtacctactgctgcaacgacatactcacttcttaaagagtttgccttattatagtcttcctcagataatacttcctgatcaaaaactaactgtaagattcctgagcggtctcttaagtctacaaatataagacttcctaaatttcttcgtttctgtacccatcccatgacagtgacttctgttccgataagtttgttgcttacctctgtacatcggtgggatctggctaaacctgacattgattctgccatgatatttcctccttcatccttttcactttgtacgaaaggcagagcccgtatcttcggttctgccttatatattcttttatgaatcttttcttacaaggatctgttcgatctctgcagcgtaaagtacgtgataatccttctctggataccactgttcatctaaagatttatcaacaaatccttctggatccattggctgagaatataacttcttacagatcagtacgatctttgcttcctcaaaaaatggaattccattcgcatctgttggtgtcagacgtgtcttcgcgatcttgtcttcatctcttccagatacacttccaagatagcttaaatccttcttaaaagtatcatcataaaaagataatgtaaatgattctgactggtcaatgaattcttttgtatatctttgtggtcttaagactgtcacagcaacattcttaccccacataacacctaaaccaccccatgaggcagtcattgtgttaacttttccttcctgattctttgcagtaacaagcatccattccttaccaatcaggcgaaatacgctttggtcgaaatcttctggtgccacgatcgcatattcactcatgcatgttacctcctttcttgtaattattactcattatatatgattttgtcaaaaatgtcacgaactagtataagaaagcatgattttattttaaacaatctgcgatcttatcaagcgaaatggtcgtaacttctcttgtttccatatttttgacatttccttcattcttcgctaattcgtcatcaccaatgatgatcgtattcttggcattcagcttatttgcatatttcatctgtgcttttacgcttcttccaagataatctgtttctacgacaaatccctgatcacgaagatctacaacgatctggtaagcttttgcttttgcttcctgtccaagaattcctacataaaggtcaatatctcttgtgcatggaagatctactttctcttcttctaagaaataaaggattctctctacacccataccaaatccaacagatggcatagaaacttttccatcgatctcatgaacaagattgtcgtaacgtccaccaccacataaagtaaatccatcttcatttacaaattcgaatacggtctttgtatagtagtctaatccacgaacgatttctgtatcaacttcatatggaatatttaatgcatctaacaaactctttaattcttcaaaatgtgctttacattcatcatctaaatagtcgatcgttcttggtgcatctttgacgatctctttgcattctggaactttacaatcaatgacacgtaatggattcttttccatacgttctctgcatgtaggacataaatgttcttcatgttcttttaaatatgctaataatgctttgttgtattcttttctacaattttcacatccaatgctgttgatgtgtaattttgcatcttttaacccaattttcttaataaaagtggatactaatgtgatcagctctacttctgctaatggactttccgctccgacaaattcaactccgaactggtggtgctgtcttaatcttccactctgtggtttttcatagcggaatgctggtgtgatatagaacatcttgatcggctgtggctcatttgccagaccatgctgtaaatatgcacggatcgctcctgctgttccttctggttttaatgaaatgcttctgtgtcctttatcttcaaatgtatacatctctttctggacaacgtctgttgtttctccaacacctctctgaaaaagctctgtatgctcaaatactggtgtgatgatctcgtgaatattataggatgcgcataaatctttgaaaatattctctaaatatgtgcgctggtccatatcttttccaaaccagtcttttgttcctcttggtgcctgtgtaatcattcttgttcctcctcaaataattcatccagattgcctttttccatcacagtttccataactccgtctgaaaatgcgactctctggaatgctaaaaatactttcatatcaaaattctttacttcatcgatcatgatatcaagtgcagtctcaacatcaaatccctctctataatccctgtttgagatcaatgctccgaaaatatcacatacatgcatgatccttccaaccaatggaatctgttttcctaccagattatgtggataaccggtaccatcataatgttcatgatgatatagaactgcgtctaaaaccgtctggttataatcgtaatctgcaaggatcgcatatccaatggatggatgcattctcatatatcttgtttcgtcaacagccaaaatctcatcttccactttctcattcatatagaaattaagtcttactttcccaagatcatgtaacattcctgcaaccgcaagatcataacacacttcttcttgtaatcctaattccttgccaacaagataagccaaattactgacaatgataccatgactgatcgtttcttttatatccgcatggatcggtgtctcaatatctgttcgtccataactgattgccataatcaaactcctgtttatatcatctttaattcttttctatgaatgatctcatcaattcgtgtaatgtattgctttatatctttaagattttcgatgcggtccacctgatggtcttcctgatggacaatctttgaagatgtaccagcaccaactgctataatatcatgtaattcctccataatcaaaatattatagagacattcttttcctttttttgaaaaaccgacattctcaaggttccctggaatgtttttctgccggtataaataatatggttccatattcatatctcttgcacatgaagcggcataagataccatctcttcactcgctccaaagtgatatgtatctttcattcgattcaatctcgatgaacgcttgactgcaagtgcatgaaccgttaaactctctggattaagttttttgatctcatctaaagtataggaaagttcttccatgccttcttctggaagcccacagatcatatccatattaatgttatcgatcccagcctgtctcgcaagattaaatttctctttgatatcttgtgcgaaatgatttcttccaataagttttaatgtcttatcgttcattgactgtggattgatactgatccttgtcacaccatatttctttagaatctttaatttctcgaaattcaagctgtctggccgtcctgcttccacagtgatctcctggatctttgaaaatgggaatctcttattaacctcatataacagatattccagatcttcttcttttaaagatgttggtgttccaccgccaatatacatcgtctgaagttctttgtgcgcataagtcttcgccacaaaatccagttctttcaataaagcttcaagatagtcttgtacaatattctcaaattgatcgatcgaatacgatgtaaaagaacagtacaaacatgtgcttgggcaaaatgggattcctatatatagactgtatccttctttgtatggaaatgcctttagcagttctttctctttctgaacagtttctgtacataatcttgctttttcttcggatgccagataatccttttgaaatctgtgaatgatctcttcactgctctcacccttttcatatccatcaaaagcaatctttgtcggacggatcccagtcaacgttccccatggaagctgtttgtctaatgctttggaaaacaactgatagattccttgtttcatccggtttttaaaaatcttcttattttcataatcaccaaataactggatctcatcttctaactcgccctttttatatagattcatgacgatttcctgatctttataatctacgtccagtataaaatcatagatagaatcaacgtgatccgtcaattctatcttctctccaagcataaatgccaatattaaacttcgaatgtcatattcataaatggtcttgttctgaattaatccaatcataatctattgcagaaacggattgcatctgctttcctcctcgatcgtcgttggtggtgtatgaccggatagtacctttgtccatggtgggagtacgaataatttctctctgatcgctgtcagaagatcattcaaattgcctgtcggaaagtctgttcttccaatgctcatctggaacagtgtatctccagagatcagccatccataatctgcaaaataataacatactccaccttttgtatgtcctggaacatggatacattttacctttgttcctaatacatctatgatttctccatctttcaccagatgattcgcttttaatgagagattcattcccatcatcgctccgagattgagctgtggatctgccagaacatctgcttcatcttcataaagatagatatcaagatctggtttttgttccatcagatatggaagggccattacatgatcaaaatgcccatgtgtcagacatacgcctgccagtttcattccatcttcttctaatgtattcataatacgttctccctgatctcccggatcaaagacgaatgcctgatttgtttttgtattctcaacaatatagcagtttgtctgcatctgcccaagacagatcgttaccatcttaagaggtctgtcaagtcttaatgttgtttcgctcatattttcacctatcctgctgttctttctatgtcgatcacgccttctacattcctgatcttcgcaataatacggttcaactgctctacgcctgtaatatcaaaggacatactaagcgttgctcttcctttcttattgtttgatacgttgatcgttatgatgtcaatatctaattctaagaagatctttgatacttctgctaacaatccctttcgattattggcataaatattgatctctgtcgtgtaagtctgtgttgtatctgcttcacttacctgccattcagcttcaataagtcttgccctgtcagattctggcatattcagaagattcacacaatctgttctgtgaatcgagattcctcgtcctcttgtaataaatccaacgatctcatctcctggtactggattacaacactttgaaaaacgaacagcaacatcattcgctccacgtacaacaattcctcctttggatttctcttcctttttcttctctggattcgctgctgccgcctgtgctgcttctgttgttttctgcaagatttgttcatccgtgatcttttgtttctggatcttacggtcttcttcctgcatcttattgataacctggccttcttttaaaccaccatgtccaacagctgcacatacagaatcccagtctttaaatccgtattttagttcaaccttcttaatgtattcaggtttcatgagttctgggagcctgatgctcttgctcttacagtatttttctaacagttccttacctctgacgatattctcttccttgaattgtcgtttaaaccactgattgatcttacttcttgcctgtgctgattttacgattcctaaccagtctctgctaggtccttttgaattctgtgatgtaatgatctctacacgatcaccattctgcaaatgataatcaaatggtacctgtcttccattgaccctggctccaaccatcttattaccgactgcactatggattgaatatgcgaaatcgatcggtgtcgaaccattcgcaaggtttttgacatctccattcggtgtaaaacaatatacctgttctgcaaagagatccaagttcgtcttcagcaaacttaaaaactctttgttatcatccatatcacgctgccattccagcacttctcttaaccagcttaacttctcttcctctttgttaagtcccttggtattattattttctttatatttccaatgggctgcgataccatattcagcaacacgatgcatctcaaatgtacggatctgaatctcaaatggatgtccttctggtccgatcaatgttgtgtgaagtgactgatacatattcggttttggcatcgcgatataatccttgaatcttcctgggattggtttatacatctcatgaatgatcccaagtgccgcataacagtccttaaccgtatcaaccttgatccggactgcaaataaatcataaatctgatcgatcgtcttatgctgattgaccatcttcttatatatactgaacatgtgtttcacacggccatcaatctctgccttaattccagcgtggtcaatatgtcctttcacttcgtcaacgatttcctgaatgaatgcttctctttcttcctttgcagaatcaagagagcgttctaaatcttcataaacatctggttttaaatatcgaagtgccagatcatctaattcaactttgatcttggaaataccaagacgatgtgcgatcggtgcataaatatccatcgtctctctggatttctctttttgcttctctggacgcataaactgcatggtacgcatattatgcaaacggtcagcaagtttgatcaggatcactcggatatcttttgccattgcaagaaacatctttcgtaagttctccgcctgaacttcgatcttgtctttggaatagcttaattgtcctaactttgttacgccatcaactaactgggcaacttcttccccaaaatctcttacaatatcttcatgggttgtttccgtgtcttctactacatcatgaagcagtcctgccataatcgtttctttatcaagttctaattctgccaatatgatcgcaacacaaataggatgaatgatatatggctctccagactttcgtttctgtttctcgtgtgccttatatgctactttataggcacgttctacagcctcaatatcttcttcatcataaatgctttgcatggttgtgatcagctgtcgtttcagttcctcaggcggtgtgaaactatctggactgctgatatccttctttacacgattaatgtttgttctgctttcttgtttcatgcacggatacctcttgtttcttttgattattttttaagctttgattcgcagtaaatacagcgatatacttggtgttctctgtctgtcaatttaaacacatgatcgatttcttgttctacagatgtaatacatcttggattcttgcattttgcaatattcacgatcttctctggaagttctactttgtgtttggactttacactgccattttcaatgacacataccgtaacttctggatctatataacctaaaacatcaaagttcacttcaaatgcatctgaaatcttaatgatatctttcttgcccattttgctgctttttacattcttaatgatcgcaacactgcaatctaactgatctaatccaagactattataaatctgcattccgcgtcctgcacggatatgatctaatacgattccatttttaatgctatcaatgttcatctgcacttacccccagtaattccatgatcaatgccattcttacatgttttccattcaatacctgtttaaaatagcaggctcttggatcgttatcaacttttacagaaatctcattcacacgaggtaatggatgtaaaatagaaagatccttcttggcgatctttaatttatccatatctaagatatagctatccttcaatcttacataatcagcttcattaaagaaacgttctctctgtactcgtgtcatataaagaatgtcaagctgtggcatcacatcttccatcttatcaacttctgtaaatgtgattcctttcttctcaaaaacatctttcttcagatactctggaatctggagttcttctggagaaattaaaatataattgattccttcatatcttgataatgctttgatcagagaatgcactgttcgtccaaattttaaatctccacaaaatccaatcgtgaaattacttaaacgtcccttttcccttcgaattgttaaaaggtctgtcaatgtctgtgttggatgattatgaccaccgtctcctgcattgatcacagggatatttacatactgtgacgctacatatggtgctccttcctttggatgacgcatcgcaatgatatctgcataacattcaatgactcttgctgtatctgcaacactttctcctttagatgcagacgatgaatcagcagaagaaaatccaagaacacttccccctaattcaagcattgctgcttcaaagcttaatcttgttcttgtacttggttcaaagaacagcgttgctaatttcttgtgtttgcacacttcctgatacttctcaggattctttgcgatgtcatcagcgcggtctaataatctatcaatatcttccacgcttaaatccatcggatcaatcaaatgtctcattacatattcctcctaatggtttgtcctaccttcaattctacatttttaggcacctagtgtcaattctttacttctgattttagacgaagaacgcccttgtctaccataaagactggtcgatacgataattttgactttctaagtccctcttctccagcatcgtcttctctgttcacatatttgaaatcttccatctcatggatcacaaactgttgattgatcatcggataagctccttggatatctgcaaaagctttttcaatatgaacgataaatgtatcttcatttgatgcacgttcaccgattgaaaatcctacgacctttccttccgcacgcagaacacctccgacaagtcctaattctttataattgatcacacaatttttagaaacgcagatctcgtcatgtttctctatatcttctggatcacagttttgcatcttccattccatcagcattgccagtacttctagctggttttcatcggaaagtggttcataggaccattcatgattttctttaaaacgattgatgtgatttctctttccatgaagtttctttcctgataatgttgcgagtttttctctgtcataaatatattctgagatatctctgtcatattcaatctcatagatatccccaaacatctcacgaaactcttcttccatctcatgagttacaccatgtaatacaaacggaatctgtttttctttgcaatcatccatgaaatattgcaacactttctttttatctccttttccaagtggataacaaaaagaacctccctcctcatcagtatgagatacaaataatccatctatgatcgcatactttacttgataaaaaggactccataaaataatattcgctgttgcataatcacaacttcttgtatcatctgctaagatacatcggtcaatttcttccttatcttcaatcgttggtgttttaaactccatctttgtcaactccattctagtgttttcttgtaatatttttatttgtgatatggctgatgattcaaaatccgatatgcacgataaatctgttctaatatgatcgtgcctgtcagcgaaccactttgtgtaaatgacgatacatgaaatggctttgcttcctctgatcctaaatctccaatataaaaatgaaactttgaaattccctgtacagaactttcattgatcagttttgcaagccccggacttgtcatactgtctcttccaggcaggatatgataatgttctcccggttcttttaatattttctctacttgttttgcattcttcttatatactacagaaactttcgcgtatgcaccaagacgttttagatactcacccattgcttcctgatacatcttaggatcctgtgatttcttctgcagaatataaatttcaaatttcatcatatcttttaatttccttcaaaaaattgttttaattttttatcttgttttaaaaccagctcatatcttttgttgatctgttttgtaagttttttaatttctttgctattctggctttctttttttgcatctgtgatctcatccgtatcatgtttttgattattatagatacagaatgtatcccctttcttcatcacataatacgatgtcatccccggtgcaagtgttttaatcttgcggatcttcatctcatatgttacataaacgatataggattcatcgtctgctccttgtttgatcagatatgtaagattcttatatttcttcacatactgatggattgccttttgatcctcagttaattcattcgcatcttctaccatattcttaagattttccagatcatttttctgaactctctcataatatgttttcataaaattctcaactgcttttttctcagtctctgaatcttccttcttcgtttccgctgcatcatttgtttctctgatcacgccttgtgaggtattcttttgtgttgtttgttgaaaaatcttttcatttgtaagtcgttcttgtttcatctggtccaatttcgcatatgccaaaaaagctgcaataaaaaataagatccagcttgtaatgataacaacaactgtagattttctaagcttcacgcacatccctccaatccacctacagcaaatttacagtatattataccttaccttgcgaagcaagtccagtccgaaggactatgcattcacgaatgccctgcgggtataccttatcgagcggagcgagtccagtccggccccaaaatatctcttgctatttttttgaatatgttgtaatataatatagcctatgcaccagtaactcagtggatagagtggcagcctccgaagctgttggtcacgggttcaactcccgtctggtgcattgctttatctagataaaatcaacgaatacaatttaatatcgtcttataagagactatagattttactgtttctgattattaaacagcaaggtctatcgtctcttttttgttattaaggaggaatcattttatggatcagatgtatatgaaagaaaaaccaattttaccattattactatcaatggctctgccaatggtaatctcaatgtttgtaaactcattgtataacatcattgacagtattttcgttgccaagatcagcgaagatgcaatgaccgcattatcccttgtatatccagtacaaaatctgatcaactcaattgcagttggattcggtgttggaattaatgcagtcattgcaatgtttcttggtgcaggaaaagcaaaggaagccaataaagctgcaactcagggattgtttttaaatgtcattcatggaattctgcttacgatcgttggattaatgatcatgccatcatttcttgcaatgtttacgaatgatcaaactgttattgggatgggattacaatattcaacaattatattaatgttttcaacaatcattatggcaagtatttcctttgaaaagatttttcaagcagttggaaatatggtgatcactatgattgctttaatgactggctgcattgtaaatattgtgttagatccacttttaatctttggaattggattctttccgaaacttggaattcagggtgcagcacttgcaacaggtatcggacaaagcagtacattgatcctttatctgattgcatatgtattacgcccaattcatgtaaaaatcagaaaagattacttaaaactagaagctgtttgtgttaagcgtttatatgcgatcggaattccagcaactttaaatatggcactgccatctttcttagtatctgctttaaatgcgatcttagcatcattttcgcaaacatatgttgttgtgcttggtgtttattacaaattacaaacattcttatatctaacagcaaatggaatgatccagggaatgcgtccgatcatgagttataattatggagcaaaggaatcagctcgtgttcgtaagatttatcttatgacgtttgagattgttgttggaatcatggctgttggaacggttatttgttttgtgatgccacagacactgatgagtatgtttacaagtaatcctgaaacattgacagaaggtgcgatcgcactccatattatctgtgcaggatttatagcttcttccgtttctgttgtttctgcaggtgcgtttgaagcgttaggaaaaggtatccagtcttttttgatttcatttttacgttatgttgtagtgatcattcctgctgcatttgtattaagcaaaacagttggagtgcatggtgtatggcatgctttctggattgctgaaatcattacagctgtaatagcttttattctttattaccagttgatcggaaaatcaggaaaaaattaactaaattttgacagattgtaaagaaacgcttacaataaacaaaaagaaaaaaggagagtaaagtttatgggacatatatcaaccgttgaagttcgttatgcagaaacagatcagatgggaattgctcatcacagcaactatgccgtctggtttgaagttgccagaactgattttatcaaggctgctggcatttcttatacagatgtagaaaaagaaggaatcatcactccattaacgagtcttgaatgtaaatacaaaaaagcagctttctatgaagaccagttacagattcatgcaagtcttacaaagctgtctccagttcgtctggaattctcttataaggttacaagaggtggggacctgatcgctactggaaaaacaacacatggtatggtgacaaaagatttaaaaccgatcaacgtaaaaaaagaacatccggaaatttaccgaatgttcgaaaatgctttgaattaaagataacttaactgctcaattagaattaaccgcattagttgatgtggaaatgtcattctactgaaacttaattttaattttcctttggatacaacctttggtgataatccgagggaaccaccaataataaatgtgatattgtttatggactccttgttccactgatcccatttcttctggaattgttcggtggagtaaggagttccttctatacagagaggaattacgaaagatccttctggaatcttatcaagaattctttgaccttcaatttctttaatctttgattcctctttgtcactggcattatctggtgttttctcatcagggagttctatgatctcaaaattatattttttacggatgatctttgtgtaatgatcgatcagttctcttaaatatgtttctttgatttttccgacacagatcatttggattttcatgtgtttcgatacctttctttataacttaatcagcaattcccaatagcctttgtgactgctgccaattcgtctaattgcctcttgttttttcatcttatttaaataatattttactctatccactgtccatcctaattccattgctatttctttctgacttaatgctggattattttgaatcacttgtaaaatttcgtgatcatttttggttaattttatcgtagtttgggtagtaatttgggtagtagtttgggtagtagtttgggtagtagtttgggtagtagtttgggtagtttttgatttttcttctcttcgatacatattcactctaaaatcaccatcaaaatcaattaattctggtttttttagaccatattctttacattccctaagaattcttggtattccggttccccatttttcgataattttcatatacgcaaatgcattggctatcgctggatttcttagtcttgaatacccttcaatcattttctttattgataccgtatttaaaagcataccaggtgatgttacctctaaccgatcatcaaatatcgctacctgtatattacctggttccagataattacgatgagcaactgcattggctattagttcccttacactatttattggaagttcataaacatcttgccgatatattcctttaatctgcatacccatattaatcttttctaacacatactgaaaagctaattgtacctgatcttgaatcggtccgctgaactctctgcgatccacaaaataagctcttgttttccctttaaatactgcacattgaattgttggttgaatttgcattttccctgtcaataatgcataagcattggtaggaataattttcccattatcttctttcaaaattccccacgtaatcaatatattctttgtaacatcacgtattgctgctttctcttcatcattccatgtattttcaattgctatttttttcattttgtcacataaatcttttatgtcatcttcattaatttcaagatattcacatggctcattatcaaaatatctattttgaccttccagaattaattctttcagcatatatccttccgcatgtcttgatgtaccagctacacgtacataggttccatctacaagtcctttgttttttatataatatggacgcatcggtcccggatgaatctctactactataatcgtcttgtcatcaattgattgcaacgttacatctggataaattttaggctcacagctatctgaaatagcatttgtaatagaatccattgtctgaaaaatcgtatcaggattcataccaacgatatttaatgtcttgtcatcaacaccaaaaacaatacgtcctcctctgccatttgcaaaagctactactgttttcatatatttttcactttttttgggcatttcaactttatattcaatatttattgactctcctgaaaacaatttatttttcaatataacttctcctatcattatgcattaaaaatatacttaatactatataaatatgttttgaatcatatcatacaattttgacatttacaatataattttctcatcttacataaaagtgtagcacatttccataaccccatcaaacttcactcatacaatgacaagaaccctcttttcatctgcaatagataccttattgcaaaaaacatttttatgtactaaaattgaaataataaaattattaaacgaggtaactaacaatgattgaaatccgaaaatttgaacccgatgatacagatgcagcagtcaagatctggaacgaagttgttgacgacggcgttgcctttcctcagttagatgacttagatcatgaaagtggtcttgctttctttgaagaacagacatataccgggatcgctgttgattctgatacaaatgaaattgtcggactttatattttacatccaaataatgttggaagatgcggccatatctgtaatgcaagttatgcggtttcttctgctcacagaggaaaacagattggtgaattcttggtcactgactgtataaaacgcgctcctgaatttgattttaagatccttcagtttaatgcagttgttgcaagtaataaggcagctttacatctatacaaaaaacttggatttatccagcttggtatcattccaaaaggatttttattaaaagatggcacttatgaagatatcattcctcattatctaactttgatccattcctgatcttcttttttctcaaagctgccatccccgattcctaatgcagattttgctaacatatcagcataatcattatatttatcattagaatgccctttcactttcacgaacttgatctgcacatactgtttcatttcttcataaattcgttgatacgcctgtgttccttcttttttcgctgcccattctcctgtgcaccatttctggatcccttcataatcataatgaatcgccagctttttatagccattttcttttgcaaaacgcatggccgcttcagaacctttgatctcgcctgctacgttgcgcatggttactaattctttatccgcataaggatatgcaaaataacgttctaccccatcatgcattaataccataccataagaaaatctcttctgagaatgatcataacttccatcaacatatgcaactaatgtatcttcatcaatctgcatcaattcatttgcatcgggatttaagaacgcttctgcttctgcctttgtcttaaatcctttgtatcttgcatttgggaatcccatgacctgtgctttacatgcatcccatgacatatagattcctggttttcttcctttttttactgcgtaaaattttcctgccatatatttcctcttatttctttaatagtcttaatccttatattataattttctttgaaaagaaaaaatcctgcaatgcaggattttccctaaccttatgattctagtcgttatctcttccaccaaataaaatgatcagacgaagcaagctcagaagtgctgatgctgcacctgctacatatgtcagtgcagctgctgataaaaccttccttgtctgccccacttcatcttcgtacatgatccctgtacttccaagaattcgtaacgctcttgaagaggcattaaattccaccggaagtgttactaattgaaagatcaccgctaatgaaaataataaaattccaacattcaataatgtctgattcattccaaggatcactccacctagaataaacaaccaggaaagattggatccaagattcacagctggaaccatagccccacggatcttcaatggtgcatatccttgctgatgctgtacagcgtgcccacactcatgggctgcaacaccgatcgctgcgatcgaatcagatccataagttgcatctgataatcttaatactttattctttggatcataatgatctgtaagattcccgctgacacgttctaccgaaacatcgtaaattcctgcctggtttaaaatacgttcagcagcctgagaacccgtcagtccgcaatgacaacggactcttgaatatcttcgaaacgttgaattcatcttggaagatgcgatcatcgtgatgatcactccgatgatgatcaaaatatacgttggatcaaaataataaccataaccgtatggatacataaatatctcccttctttctctgtaacatgtagatgattatatcgttcctcctacatgaaatcaaggcagtttagaaatattttataatcattttattgaatgattaattcttcatatttttataacaaagaagctcttaattcgtctccggatttcgcacttaaatatgctggtgcgatatcaaatacagtcttacatccactctgtccttctttggaaagcttatatgcagctcttgcatatgcaactaaaacacttgatgtaaattctgggttagaatctaattttaagctgtactcaatgatatgtttgttttctttttcccatcctgtacatccacttcttaatacaaatccaccatgaggaatcttgctgtggtcacgatctaattcttcctggctgatgaaatgtacagttgtatcatagtctgagaagtagttcggcattgtcttgatctcttcttcaactttcttcgcatctgcaccttcttcaagtactacaaagcattctcttgtatgcttctgtcttgttgtaagttctggatcttccccattacgaactgcttctaaagctgcttctacaggaattgtgtactgtttaccgtctttgacaccttccacacgacggatcgcatcagagtgtccctggctgactccttttccccagaatgtataatcttttccttctggaaggatcgcgtttgcatacattctatttaaagagaacattcctggatcccaacctacagaaatgattccaatatgtccatattctttcgctgctttatctacatttgcaaaatgttctggaattcttgcgtgtgtatcaaagctgtctaccacgttaaataatttggcatattctggtgtctgaacaggaaggtctgttgcacttcctccacataacattaaaacatcgatcttatctttccaatcttctacatctttgacattacatacagctgcaccttctgttaaaatgctgactgtcgctggatctcttcttgtaaatacagctgcaagctccaaatcgtcattctgtttgatcgcgcattcaattccgcgtccaaggttaccataacccataataccaattctaatcattgattttctcctttttgactttattaaacatagtatatcatctctgtgttttgcgttcaatgtattctttttatgatttttttgctataatgatcttaaaaattcccgatgattcctgatccttcgggaatattctaacagaaatgaggaattttatcatgtcatttaccggcattttcaaagcaaaaaacggcattgtcgctgtcgttgattcaaaggcatccagagtagaaaatggacaatcttttgaggatattcaaagaaatccagaaaaactattcatattccaaaacggaatcgcgacaacttttggagcaaaccagatcttagttcagaatccttttgaattttcttcaaaagtcattgcaattgaagatctggtttatgaatatctgcatttaaagaatatcttagatgcttctttcttccaatctctgctcgtaaaaatgacatccaacccagccaatacagaacctgtaaactttctggttggacgcaaaatccgtcaggaagaatacatcttagaacatcatcaaatacgttattgcgcctactcacaacggctcgcaaccccaatggaacatttctttactggcggagatgaaaaatatcgggaacactttgataaccttccatatctttcacagatcacctctgttgatgtattgcagaaaactgttgcaaaagaattggatggattgattcaatattatgaccagcaatccgaatataatcctgtaggaaagcctgtgaaatcttatgttttaagataatgctactttatagttttatcttcgaaaaagcctccgcaaatgcattattgatcggctcctgtgcttctttttgctgttttttcaaatatcggttcacttcttttttactcattccagaaccttgtttttcttttctttgtttaaatgcagacagtttttctttatacccgcaaacacatacaaacttctgtccttcaccttctccgaccatttccatcttcttatggcatacgggacatctggcatttgtgacccttgaaatcgtctttttatatccgcaggtacggtcctgacataccagacgtttcccgtgttttccattgacttctaataaaaattttccacattccggacagcggtgtcttgtgacattatcatgtctaaatttaccatccgatgttttaatatcattgatcaatgcctgtgtatagtctgagatttctctcataaatttctggtcattttgtt

SEQ ID NO: 660 - DNA, 40648 bp, Unknown
  gut microbiota DNA sequence
aaagcagtacctgtgcctgaatgttatcctgtttcatcacatcgatcatctttaggattctttgttttaactttggatcatagatcggtgctgcaacctcgactcttcttcttgtatttcttgtcatcatatctgcagatgaaatatagatctctgtatcatctccaactccaaatgcataaatccttgaatgttccagaaatcttccgacaatgctttctacacggatattctccgtcttccctgggattccaggacgaatacagcagattccacggatcagcagaaatatcggaactcctgcatttgatgcctttgacaactcatcgatgatcttgcggtctgttaaagaattcattttcataaagatcccacatggctgaaagctttctgccttcattttctcacgctcgatcctttttatgatcccatcctgaagacttgatggtgcgacaagaagatgatcatacgttccttgaagattaaatgttgccatattatgaaagaaaacagatgcatcatgtccaatttcttcggatgctgtcataaggcttaaatctgtatataatttcgacgtactttcattataatttcctgttccgatctgtgtgatgtaataaattccacgactgtttttcttcgtgatcagacaaactttagaatgaactttgtaatcttccattccatacataaccttacaaccagcttcttctaagatttcagaataattgatgttattttcttcatcaaatcttgccctaagttccatcaatacaagaacttcttttccattttccgctgcctcacatagatatttgacgatccttgcctgccttgccaaacgataaatggtgatcttgatagaaagagtttctttatcctttgcactttctttcaataattcaataaatgtatccatgctgtcaaacggaaaggataataatttatcttcctcaagaatctgttttgtcacactgactcctggaataaaatctctgtttaacgctggtacaaatggacgatagcatccattttttctctcttcttttgacactttatctgtcagcttgtaaacatattttaaatccaacggcgcctggcttttaaagatgtcctgttctgaaatatttaaacgttctgagaggtattttttaatctctttatgacgattgccctcaatttctaagcgaactggttttaatctggccctcatcttaatgatcttcttcatatgtgtacgataatcatccgttgattcataaatctcatcatctggattgatatcagcacttcttgtaatacataaaactgccttttcttctaccgtataattctcaaataattcatcgcagaaatataaaataatgtcttctaaaagtacatagcttcttccttcccccggcagaaagatcatacgctccacatcctttggaagtccaatgatcccaaaagaaatcttttctttcttctttaagatcaacccaatctgcaatattttatttgggatatgaggaaatggatgctgtttcccgatcacgatcggagaaagtattggcagtatcatcgcctcataatatgcttttaattttttcttttcctctttctccagttcctcgatctgacagcgtttgatcttcttatctgctaattctctggatacttttgcaaagatctgatctcttaattcatacagtggtctgacatgttttgcaatctcatctaactgttcttctggtgtcagatccgaacggatatctctgtgattatcatggatcagactcatttcatgaatgctgcccactctgaccataaaaaattcatccagattgttcgtaaatatctctaaaaatttcaaacgttcaaaaataggaacgttctttttatctgcttctcttaaaacgcgttcattaaacttcaaccaggataactcccggtcctgtgtataagaaaaatcatagtttttgttcatcatcctgccctccatcattcattctatttcctatgaaaaaatccggagagatattgatattcccccggattctcattcttattaatatgcgaatttctctgcaaaatatgctttcagatcttcaatcttaacacgttcctgttccattgtgtcacggtcacgaactgtaacagctccgtcttctaaagaatcgaaatcgaatgttacacagtaaggtgttccgatctcatcctgtcttctataacgtttaccaatattaccacgttcgtcgaattcacagttatattctttcgctaattcttcgtaaaccttcatagcaccatcgcttaacttcttagacaatggtaagataccgatcttaacaggtgctaatgctggatggaaatgaagaactgttcttgtatctccgccttctaattcttcttcatcatatgcagagcataagaatgcaagtgttacacggtctgctccaagagaaggttcgatcacatatgggatgtaacgttctttgttcacatcatcaaaatatgttaaatcttcaccagatgtattctgatgctgagttaagtcataatctgtacggtctgcgataccccataattcaccccatccgaatgggaacataaattcaatgtcggatgttgctttagaatagtgagataactcttctttctcgtggtcacgcactctcatctcatcttctttgattccaagtgtctgtaaccagttgatgcagtaattcttccaatattcaaaccattctaaatctttgtctggttcacagaagaattctaattccatctgttcgaactcacgagtacggaatgtgaagtttcctggtgtgatctcgttacggaaagatttaccgatctgtccgattccaaatggaatcttctttcttgatgttctctgaacattcttgaagtttacaaaaattccctgtgctgtctcaggacgtaagtaaactgtattcttcgcatcttctgtaacaccctggaatgtcttgaacatcaggttgaactgacggatctctgtaaagttcttctttccacaagttgggcatacaacatcatgctcattgatgaagctttccatctcttctttggaccatgcatccacagatccctcgatctccattccatgttcctgcatataatcttcgatcagtttatctgcacggaaacgttcatgacattctttacaatccattaatggatctgagaagttaccaagatgtcctgatgcaacccatgtctgagggttcattaagattgcagcatcaattcctacattatatggactttcctgaatgaacttcttccaccaagctttctttacattgttcttaagttctacaccaaggtttccatagtcccatgtattagcaagtcctccataaatttctgaaccgctgtatacaaatccacgtaccttggcaaggttaacgattttctccattgataatttcataatagcctttacctcttcaaatttttgtattattataatattgtatcttgtaataagtaatttttcaaggtatatttcaaaagcttaacgcttgtagatatatcaaatatactggatgaatattactttttatatttttttatattataatagttaatgatattattatatgagatatgaagaaagggaatttataaccatgtatcaaattgactataccaatgttggtaaaagaatgaaaactctgcgtaagcaggcagggtacactcaagaacagatcgctgatgcactcgatgtaacagttgcattcatcagcaacattgaaaatgaccgcgtaaagatgaaccttcgtgtactatcttattacgcaaaacttctgaatgtatctattgattatcttcttcgtccagaatcagatgagaatggtgaaaaagatgatgtactgaacaaagaaattcttcgtctattggaaaaattctctacagacgacaaagaaaaatttgttaaagttcttcgcattttatgcaaatagattacatatctcagacataaaaagagccggatgaccggctctttttttattcactctttttcgttaaaatctgatcttataaaaataacaaagatttaaattcatgattcacatgataacgcatatattcgcgaatgatcttttttaattcccataaaacatccgcactgactttaaaggtataaagcttctcgatcgaactgtaaagaatgtactgaagtgtatataatgttgcaggacttactttcacttttccatgttcacatttgttacataccactccgctttctcttgcatcaaaccagatcagatcttccctgctcccacattttacacatctggatgcttcgattccgattccatataatgcaaggatcttaatctcataaatacagcggaccaattcaatatcaatcgtctttttttctaatgcacgcagtgtctgatagagtaattttaagatctctaactcatcgttattctcccttgtcaggtaggatgcaagttcacaaaaataactcgcataataaatgagatccaggtcttttttcagagtatcaaaataattctcaacccctgcccacatcagattaaaagaattttttccctcatataaagaaaactctccaaacgtaaatggctgacaggctgccgcatactggctggttgcttttttagcacctcttgcaaatgccgaaatccttccacgttcttttgtaagaagtacgatccgcttatcatactccccaatattgccagcctgtaagaccattcccgtcactttgatctcttgtgacatctttatacttctttcttatcatatccatagttcttaagcagcatatcgctgtctctccagtctttcttgactttaacccataactgaagatttactttcatatccagaagattttccatctcgatccttgcctgtgtaccgatcttcttaagcatagatccctgctttccgataatgatccctttatgagaatctctctcgcatacgatcgttgcatcgatgtccacgatatgtccatgacgtctgactttcatcgcatcaatgacaacagcaatcccatgtgggatctcctgacttaacagacgaagagctttctcacggatcaattccgcacagatctgtctctctggctgatctgtgatcgtatcttcatcaaagtacattggaccttcatctaaatatttgtaaatactgtcgatgacatcatccgtattcttacctttcaatgcagataccgggatgatctctgcaaattcacatacatctttgtatgtatcaatcgcttctaagatgtctttttcttctactgtatcaatcttgttgatgactaaaatgatcggtgttttgatcttagataactgttcaatgatatatttttcaccaccaccgatgaacgtacttggttctactaaccaaagtacgacatcgacttcatttaatgtgcgttctgcaacttgtaacatatagtttccaagtttatttttcgccttgttgatccctggtgtatcaaggaagatgatctgccctctttcatcggtgtacactgtctggatacgatttcttgttgtctgcggtttgcttgatgtaatcgcgatcttctgtccgatcagacggttcattaatgttgactttccaacgtttggtcgtccgataaatgttacaaaaccggatttaaattcatttgccataaattgtcctttccctgttttctctatagtacatgttttacttcatcaaaatattctttattctgatcgatcttctcttcatttccaatacagcagcggtttcctgcttctactactgctttaacgatcggtgctaacgctctgatatcttcctgtgtacaggataatacctgatctctgaccttctgaagatcagcttctgtcttgcctaagaaatatgcatgaaaacttcttgcccccatatcaacagcttccattggcatatccatgcttccgatcgttccaatgatatatttcttcatatcacgatcatctgcatcaaaatctgccacataatctgctgcctcatcgtatactttataagattcagaaaggtttggatcacggtatgtcacaaacatagaatctccctgatctgagaaactgcacatacatccatacgcaccacctttgacacggatctgaatccacagatattcataggagaagatcatctgaagcacttttaacgctcctgtatactcaagtcctgcatccttaaagtttccagcgcatgccacatactgaacaccacctgcagttgcaaatccttcattgctctttgtgcatgtaactttgactttctcaccttgtttctggtcttcatataatccttcgataaagctttccacttctgccttcatgaactcaggtgcttcttcttttcctgtataactgatcgtcatattttgtttttcaaagatcacttttgcagcttcttttaaaccattgacgatattgtcatattcttcttcgaaatcttcataccatttcttcacagtctcatacatcgtgatcccctgaattgcttcacggtatgctgcatattctgagaaataagacattgcacggtttgccgcactcttgtgtcctgtctctgtcaatgtgatcttaaggtttgtataaatctgtccgatgatctcttttagtcgtttcttatgatctaatttgctttcaaatgccacttcttttaatagatcaaatgctttttcgatattagaatagaagcattttgtctttaagataaacattggaagaaattcatgcacatccgttggcataacatccattgttgcgctgatgccacctgtctcaatgctgatctcgtttcctaattcctgataactatagtgtgttgtatcaacgatcgttaagatctctgctaaaaatgatgcatatggcacgagatccattggcacatgactcatatcaaatgcgagcttgacgtaagcgatcttgtttgtaaaatactgatgccataatactttcacaccaccaagttcagattccacattggataatggtttgacatcttttctgatatcttcaatgtcgatcactggaatcttctctaattcttcttttgtagatgcttcttcctgtgatgcttttaactgtttcgtctcttcgactaatttctttacttcttcttcggataaagaatctttgtaagcctttaatttatccgcttcttcctgatctttgatcttctgtaagcctttctttggcttcatcaccacgatcgttttatggttattatcgatcagatattctttgatcagattctcaaaatagccattctcgatctcttctcttaactgtttgaagatctcatttgtcttgatatggataaatggtttctcatcgtcatataaccagctgtcgtacatctgaagtccatacatcaatccctttggaaaacgtccaaagtttgcttctctgtatttgaattcatagtaattaaatgctgctaaaagatttcttcttggaattccttcttttgcgatcttggctaagttctcttctaaaatcttaacaaattcatcttcctgatcatcccttgcttcctgtgcgatcacagaaaatactggctgcatgatcccattatcataagaactttgaatatcttttccaatctgtgcatccatcaaagctttcttcactggtgctccaggtgcatcgaataatactctgtttaagatctcaaatcctaagtaaagttttgcatccaagctgtctccgatcactgcattgtaggataaataagtcttttcttcttcggagtcattctccccgactggataatattcttccactcgttttacttctgtaaatggttcttgtttctcccatgatgaatcgatctgtttcttatcgaaatcttttaaataatgttcatcgataaatgtcaggtattcatcaacatccatatctccatacagataaatatagctgttggatggatggtaataagtcttgtggaaatcaaggaacatctcataagttaaatctgggattgcctttggatctccgcctgattcaaatccatatggtgtgtcttccaataaagacttctgaatgatacgtgcaagctgctggtctggagatgaaaatactcctttcatctcgttaaacacaactccattatacgtcagaggagcatcttcgtttaacagatcataatgccatccttcctgctttaggatctctggcttcttatagatatttggataaaatacagcatccagataaacatgcaccaggttaaagaaatctttatcattctggcttgcaaccggataaacagtcttatctggataagtcattgcatttaaaaatgtattcagtgatcctttgaccaattccacaaatggatccttcattgggaactctcttgatccgcaaagtacagaatgctctaagatatgaggaactcctgtatcatcttttggtggtgtacggaatccgatctggaataccttgttatcatcttcattggagatcacaaccactctggctcccgtcttatcatgctttaaaatatatcctgttccatttaattcttcaatagattcttgtttgatgatcgtatatttattattcataaacctttaacaaaatctccttttttctattcattgatatcctttatgctactacaaatggaacagattgaaaagggggtcggtttgatttttgcataaaaatacggcaccgaaagcttattctcatgctttcgatgccgcattgatattttttatcgtttgatcgatcttactttggaaaaactgctgtatctgtacttgccggatacttttttcattgtgcggaccttaaaataatatttctttcctttttttagttttcctttggtataagatgatttcttagaggaaagtgttgcgatctttttatatcctgatttcttctttgtggacatatagatctggtatccactgactcctgaaaccttcttatatgtgatcttgaccgctttctttccactcttccttaagctcttgatcgttgttgctttgggtttaacaacaactgttttctttgctgaactgtatcctgcataagtccagtttccgatcttataatttaaatcaactttttctgaaattccagggatcacaccttgtgttgaatactgccacatatgataacttccctgatatgtacatttgttactatgttgtgcaatccattttgggtaatcagaaaatacagatgctgtcagtttcgtttcaaataagtatttgttactgtaaactgcgacatttttatatccataagattccatcgtattcaaaaatgtttttgcaatatttccgatctgtgtgctgcttaactgatttaacatatcagcttccatatcataataaatcggatatgttaaattctttccctgtaaaagtctgacaacatgttctgcttcgctttttgctttcgctgttgtatcagctccagaatacaggtaagttccataagggatccccagtctctcacattcactggaattgtagtcccaatacttatcatctttatctgtttgatttacaccatatccacatcggatgatcgcataatctgccaaagcactgttctttacctgttcccaatcgatcttgccctgatgcgaacttacatcaattccctgctgtgttgcattggctggtttctctgcaccccagactttgcatgttgtctgaaatatcataaacacgctgatcagcaataagagtaccccaacaaccaatccagtaaacattcctagtttttcacttctcttcattttcatctctgcctcctaagtatgatcgtttccttattttttcttccacatttatcatatcatatttttttcggcagaaagtgaacattttcttaatttttctgtaaatttatacacatcccatcttgatcatctctcttttcaggcgtttgatgatctttttctccagtcttgatatgtaagattgtgaaattccaagcatatcagcgacttctttctgtgttttttcttttccttctttttgattgatcccaaaccttaattcaatgatcattttctcgcggtccgtaaggatcgtcatggctcttgtcagaagtttcttatctacttcatgttctaagtccttgtaaatgatatcttcatcggttccaaggatatcggataataataattcatttccatcccagtctacatttaatggctcatcgatggaaacttccatttttgtcttgttatttcttcttaaatacatcaaaatttcattttcgatacatctggatgcataagtcgcaagtttgatcttctttgccgggttaaatgtattgatcgctttgatcagaccgatcgtaccaatcgaaatcagatcttccacaccgattcccgtgttgtcaaatttctttgctatgtatacaaccaatcgtagatttctctcgatcagcatgcttcttgccgtttcttcattgacagttcctaacatatggatcattttctgctcctccgctgtatcaagcggtgctggaagtatctccgttcccccaatataatgaatctcatttcctcttccaaaaaatgtccttcttccacttaccaagctcaactttaacacaatcattacctcccatttttgatcagatccggatgtagtaacatttcgtaagctccccatttggaaagggatactttggatatggcgatcactgcctttttgtgttctattatccggtcctctttcgtgattttcatatcatttgccatcactgccggcatcatcccatgttcccttccaacactttgatatggaatcatgcggatgccctctgcttcctgcttttctatcatcttgaacaacggctcatgaaaatacttcaaaaatgtttcttcttccagaatacatactggcatttgactgactggttcatataagaaatttcctgtatccaagaatgcacaaacctctaatttcttatgcaggatcttaaattccacttgataaaaagattctttgtcgtgattcatatcttttacggctgatacatacaaataccttacaagcatgcagctggctgtcgcaaggatcagccacggcagaatgatctggctttttatcattgtaaagattccaccagtaaataaactcaacaccagaagatacacgctgtatttccatgcttttttcattggaaatgcacaagatatctttaccgtcataacaatggaaatgatcatcaatcccaatttcagtccatgatcttcgtcataaagctgaagtataagacatcctgaaaaacttccaaagatggatgcggcaaatattttataaaatttcatctttttatgtatgatccattccagtaattttagctggaacgcgatcatgatccattgttccaaaaacatttcgatgaaatacataatgcaattatagaaaatttctaaaaaatattttgtcataccatgacggtaacgccctgcaagtttttacagtttctgacgaaaactttcttctgtctgcatcatctgataaaatagaagttgaaatttgtagaaaaatacgataagaaaggaaattttgaaatgactcatgtgattcatgaaatccctcccgtatatgatgaccgatcaaagatcctgatccttggttcttttccttctgtaaagtctagagagggacagtttttttatcatcataagcaaaaccgtttctggaaggttcttgctgcagtctttgaggatactctgcctgaaacgatcgaggagaaaaaagagtttttattaagacacaacattgccatctgggatgtgatcgcttcctgcgatattgaaggttccagcgacagcagtattaaaaatgcagtgccaaatgatttttcattcattttaaaaacagccccaattcgccagatttataccaacggtgggactgcttataaactttatcataaatattgtgaaaaagtgactggatttgaagctgtgaaactgccttccacaagccctgcgaatgcttcttattcattagaacggctgatacgtcagtggaatcagatttcaaatacctgacctgcacctgtgatatctctgacgatattcttccatctgcgcccatcttcacagtttaaataatgatggttgatcttgtaatgctcaaagcaatgcattgggaatacaactttactgtccgtatgttctaagaaataattcattccccagcaatacttatcttcctgtcttggatcaaggagcataaatgcaagatcgatcttctttccttccagatatttcatctcatcctgaaaggtcttcttgtaatattcattatcttcctctggttctccattccaatgccaccagttaagatcccctgcatggtagattgtctttccttccactttcacaagaaatgctactcccatgtcatttgatcttaaagtttctatttcgattccagcaacttcctttttttcatgtgctttcataacgactgcatcttcgttatctttgatatcatcagaaagaatataatgaatatctttatactgttcttttagtttccagattgctggatcataatgatcggcatggctgtgtgatgcaaagacatagagagtcttactgccgtcaaatgacgggatttctccctgatagtaatcaaacagcagaacattttgttccatctcaaccataaaaccactatgttcaataaatgttactttcatttctggttatcctccaaaatcttttccttcatctgcggatcaaactgttcctgttttaacatctcaatctcatatttgtatggcggataggatttcttgctgtcttccgctttaatgtatggtgtttctaaaatcttaggtacctgttcaaagtctttgtgatgtacgatgtggtttaacgtctcaaatccgatcgttccaaatccaagattttcatgacggtcttttcctgcaccgatcacattcttactgtcattgatatgaaagactgcgatctggtctttgccgatcgtcttatcaaactggtcaatgacattttcaaatccttctccagacagatctaagccgctgtcgctcacatgacaagtatcgaagcagactcttaatttctctggatattttacaccatcatagattctttttagttcttcaaactcacgcccgatctcgcttccttttcctgccattgtctccagtgcaatatgaaccggcatatcctgatacatgacctgatttaatccttcgatgatacgatcaattcctttgtcaacaccagctccaacatgagaacctggatgcaggaccaacgtatgacttcccatagctttggtacgttctacttcaacttctaagaattccactgctaactcaaacgtctcaggtttcgtcgtattcgcaagattgatgatatatggtgcatgaacaacaaacgtttccattccatgttctttcattaatttcgttccatcttcaattcttaattcctcaatcttttttcttcttgtattctgtggtgcaccagtgtacaccataaaagtattcgctccataagataatgcttctttgacagatcctagaaacatgtcctttcctttcatccctacatgagaaccaatcagcataattttccctccgattaaaaatttttcttcttttttgtgtgtcattctgttgcagattataccgaaaatatgctgtaaaatccatattttgatacttaatttaatttttttgaactttttttcgtttttttattgacacaagttccatatagtgatatcataacggtgttgcgcagttgtggcggaattggcatacgcgctagactaaggatctagtccgggttaactgggtaggggttcaagtcccctcaactgcacttaagccgatgtggcggaattggcagacgcgctgtgttcaggtcgcagtgagcttacgttcgtgcgagttcgaatctcgccatcggcataccgaagtttgtgacttcggtttttttatttcatacaataactacaaaaaggagtcctcagactccttttttctttcgactctttaataaattatctgctaaggttgatacagtattcacaataatctcctgctctaccgtctcacattgttccatgatcagatccatcttcttgctgtaaaaatattttttctgtttcttgctgtaactgtccaccaacagttcatctatggtaacacctagtgcatctgcgatcagcttaagtgctggcagcgaaacgcttactgaagccgtctccacatttgacatatgacttaatgaaatatctgccatctcggcaagttgttcctgtgttatattttcttttttacgatattctttaattttcgctcccagagctttataattaatgggcttcatagctctccacactccttatatactctgattttattatgaatcattttttcaaataaccgcctgtggcaatagtttctattgtaatggaccgctggccttatttctgttatgataaaaccaactaatttattgttatcatttataaataggaggtttttatgcatctattcatgaaatttattttagcacctgttctttttgttctatctgtttttgtaatcatacaaacttatagaaaatataagatcaaacatcttttgaaaaaatgggaaaagaaatatcacccatttccattgaaaaaggaagcctgagatttaggcttcctttttttgatatgatgatttgtttgtatattcttgaaaacatttcatctttttatttcttaacactatgcttctgcactaaagcatgcagaagattgtattgattaaattcagatctcgctcatgatcctctgcgtgatctcattcgctttttcataaatgtgagccgcatctgttccaataaagaattcgccatcttcatacagaatctttcctgcgaccattgtcatcttgacattctgcttacttccactgtataccagattctttctgatattgtggattggctgcatatttggctgatgcaggtcgatcattataagatctgcctgctttcctttgactaacacatcacagtctgaaagattcattgcttttgcaccgcctgttgttgccatctttaatacctctgctgcatcaactgcactcgcatcattttcccggtatttggcaagtgctgtgacaagaaacatctcgcgaaacatatcaagacagttattgcttgcaggtccatccgttccgatcgccaaatcaatatttcgttttaacatctcctcgatcggagcgatcccgcttgctaattttagattcgaggctgggttggtgatcacagaaatctgatgtctctttacgacatcaagatcttcttcgctcatatgaacacagtggtacaaccctcctccatattcaaacagccctagctgttccatatataccgttggtgtcatacctgttctctcaacgcactgtaccacttctgaggcactttctgagttgtgggtatagataggtgcatggtacttcttagaaagctctgagatgccttctaagatttctctcttggttgtatattctgcatggaaccccagttcataactggtaagtccatcttctttatggtacttctcataccaattctctacttctttcacagactgggtaaaatcattcactgctccaataacaatcgtccgaaaaccacaatcctcagatgcctggatcatcgtatctggtgtcagatacatatccgcattggcggtgatcccgcttgttaaatattccatgatggcaagtttggataaatgatagatatcatccggtgttaacttggcttcatatgggaacacctgatcatttaaccaagaaagcagcggcatatcatctgcatgagatcttaaaaatgtcatcgcggaatgtgtatgagcattcttaaatccaggcatgatcagattgccttttgcatcaatctgtctctcccatgtgatctttgccgcttctttcttattctccggtccgacatactgtattttatgatctgagatccaaatctctccatcaaagatctcttgatcttcctgcatggttaaaattcttgcatggtagattcttatcatttgatcacctcttatttcttcagacttttccccattctacagatgcattctgttactagcttctggaattttggagctgcacgatctgcactttgctgaacttcttcgtgtgccagtggtttcttactgattccggcagcaggattcgcaatacacgaaattccacagatcttcattcccatatgatttgccgcaatcgcctcacaggcagtactcattccaaccgcatctgcaccgatggctttacacatcctgatttctgccggagattcaaaattaggacctggaagctggatgtaggttccttctttgaggtcgatctgcagatgatctgcactttttctgatcactccttgtaattcttcatcataaatatgactcatatccggaaatctttctccaaattcttcgatattcggccccattaatggagatggtacaaaacttgcgatctgatccgtgatcatcataaagtcacccgcttcaaatccacgatgaatcccaccggatgcatttgtcaaaaacaagatctctgctcccatcatcttcatcagtcgaatcggcagtacaacatcactcatggaatatccttcataatagtgaactcgtccttccatgatcattactggaatatcttctacgtaaccaagtacaaatcttcctttatgtccctgtactgtagaaactggaaatcctttgatctcatggtaatcgatcacagtctcaatcttgatcttctccgcataatctccaagaccggaacctaagaccaatgcgatctgtggtttaaactctgtcatttcatttacttgtttataacattcctttactttatcatatattttattcatattatcgatctccttcttgccagttctttttcttacattatgacacatttttgtacaaaatgaaatgcattccacacacatcctattgtttacaaaaattatagttcccatttcttgctttccattcatttgcaagttatacttaaagaaaccccaatttccctacaacaaggagtactaatatgaagttagcaatcgttgatgataataaattagaacaggagctcattttcaacactcttcgtacttatgaacatgaaagaaacatctcccttgatatttcttcttatagtgatggtaattcttttttgaatacctatgtccctggagattttgatctgatctttatggatatttatctaaatgaactgaacgggatcgatattgtacgcaagatccgtcagatggattccaaagtgatgatcgtattcttaacaacaagtaaagaatacatttttgaagctgccccttttcatttttttgattatattttaaagccttttgaatccacacagatctttcatgtacttgatgatgctttagcgcttcttcctgagcaggaagctgaattatcttttgaatatcgttcttttgatgttcattttccattatcaaagattcaatatatttactcaaataatcatgaggtgatcattcatacaacgaatggaacacatgctttccggcttcctttttattctgtcacagatcatctggatgattcaagatttcttcagtgcaaccgtggaatcatgttgaatatggactatattaagacgatggaatccgattacttcgaaatgacagattcaaagtgttttccgatcaaaacgaaaggacgcaagcaaatccgagagcaatatatcaaataccagtttttgaaacttgaggaggcatgatcttttatgactttttatgatatttttacatatttatgtacatttacaatcatcattccactggcagttttttgcctgtttccagtaatcgatcatctaaagactccgatccgccatctgctgatcaagatcagccttgtttttatatgctattttgttctgttgatcattccgtatatgatctttcaacaggatctgggcaatattcttatattccttgctgtacctgtgttcttttatctatttcaaaaagaaacgaacctgatgcttcctgcatctctctttgttatgctgactgcatgttgtcttggttctctttcttatgttatctatcatgcattcggtgtcatctttcatccacatggacaaagtacagaattttatccagaatccatgatcgcacaactgatctttctggttttcgccgatatcatcttatataaacctgccagaaaatatctcggctggatggttacgaatttccacaatgcctttgtctggcggattgcgtgtattttcccatgctgttttacttttctcgtttttacttatattccacacaattattatgatatttatacctatcatgatctacatgtttacttttccatgatgctcactttactggtctttgtatttcttttatatgtcttattttatactatcatccacagttatgtagaaaatcagtacatattggaagaacaaaagattctggagattcaggcaaaagaatactcccagctttcccaacatgtacaggagacaagagaaatccgccatgattttcgtcatcagatcactgttatctctggattgttaaatcaaggaaattatgaagaattaaaggagtatctgtcccaatatgaatcatctatttctttacagactaagatctactgccgtcagcccgctgtaaatgccattttatcgcattatgatcttttatgtgcacaagataagatcaaaacaaaatttgccgttgattttccaacgctctcttcaatctcttccgttgatttttgtattgttcttggaaatcttttagaaaatgcttaccttgaatgtaagacattacagaagtatgagaaattcatccatctcaaagccagacagacatctcctggtgcttttgttctgctcatcgagaacccttatgagcatgagatcaaaaaaacagacagtggcttcttcttatcctctcgccgcaaaaactgcgtcggtacaggtcttaaatcagtcactgccatatgtaaaaaatacgatggccatctgtctattgagactgataaccaccgctttaaagtcaagatgtttttacaatgttaattctattgattaagctaatttttcttttgctacgtcaactaaaactttgaatgcttctggttcgctgattgccatctcagataacatttttctgttgatgtcaacaccagctaattttaatccgtgcatgaatttgctgtaagaaagtccgttcattcttgtagcagcgttgatacgtgcgatccataactgtctgaactgacgttttctctgttttcttcctgcgtaagaacttgttaaagctctcataacagactgttttgctactctatactgtttagatctagctcctctatatcctttagccagttttaatactctattgtgttttttctttgcgttcattccgcctttgattcttgccattgcttacatttcctccttaacgatccatcttacagatatggtaaaatcttcttcatgttcttttcatttgttgcatctgtcattgcagcttttcttaaatttctctttctcttaggagatttctttgttaagatatggcttttgtatgccttatttctttttaattttcctgttcctgtctttttaaatctttttgcagctgctctacatgtcttcatttttggcatggttatttcctccttaatcctgcttgtatctactcatatttgaatatcttaaactcctagttgttctttggagctaaaaacattgtcatgcttcttccttcaaactttggtttcttatcgatggtggctacatcttctaatgctttcgcaaaatcatctaagatatacttgcttgcattcacatgagcaagttctcttcctctgaatcgaagtgtgactttcactctcgcaccttttgcaaggaatttctttgcatgattaatctttgtgtttaagtcgtttgtgtcaatgtttggtgacatgcggacttctttcacatcgatgactttctgtttcttctttgccagcttttcttttcttgtctgctcgtatttgtacttaccgtaatcgataatcttacaaaccggtggttttgcctttggtgagatcttgacaagatctaatcctgcttcatctgctaacttctgtgcttcccttgcggacataactccaagctgttcgccatcattcgcgatcagacgtacttctttatctctgatctgtccgttaatcattaaatcgctaataattacacctccatgataattaaaaaagtggatagttataagactatccacataaaattcaagcatgatcacgaaatatcatattcttaaatattaacccaagtcacttcctaatctatcatatgtgctaaggtgagagtggatactcttctttgttgtttctgttgttcttcacaacttttgatattatatcatgctttcatttttattgtcaagtatttttcttatctttttatttttctacattgaatgtcactttgttattcaacgctttataaaatgtcagctgatatctctgggcatccgctaatacatcataatcttcgccagtttcaatgatcttgaaattaatgatgttcgcctttctcgcactgtctttgctcactgctacaccattacgttcgtctgcaaatcctttgacattcgccagcatattaaattctgttttgatgctatccactttataagaatattgttttcctgtttgacttgtaaaatagattgtgacggatctccagtttggattaaatgtaaatgttgtcttgcttccagatgtttcactgcatacatcatcaaatccatcatatacaaaaacatcaacatcttttgtgcagatctttcctgatcttgcagtggtagaaatctgaattctgctgtatccgccttttttagctgtcacttttcctttgctgttaaccactgctacctgtggattactgctcttataagtcagagtttttgatgccatctgttttcctccaggtaaagctgttgctttgatctgggcagcgtttcctgtcttgtagaaattgatcgtctgtgcagatgaaagtttgatccctgccgctgcttttcttacatatacagtgatcttctttgttttgactccagaagctttcattgtaatcttagcagttccgtatttctttcctttgatcacaccctttttatttactgtcgctacagattttttggatgtcttatatgtgatctttttctttttcccaactgtttttgcatttaattttaaagtttttccaacaaaaaccgttgccttgcttcctgttgctgttttgatatatgcttttttggcagctttcgcatttgttggcatgatcatgcaggaaactgcaagcaacatcagcatcgtcattatctttttcttcatgttcctgatccttcttaaatagaaaattcttttatagaaaaagaatcctggaggaaagctcctccaagattcctttatcactcagcaattgattattttgctacatactgtgtaattgttaaatcttttgctttgtctgctggtaattttactgtgtatttaccatcttttgctgttgctgaagcaataacttttccagctgcatcttttactacgatgtttgtagcgtttttgtcgcttgttacaacgtatttagcacttgtagctgttactgtaccgtcttttgctactgtaactttgatgttgtggttctgacctttttcagattttgctacaacagcgtattctgtatcagatacttttgtaactgttgctgtgtattttccatcatagttagatgtacctttgatcgtagctgtctttgtagcacctttaccagtagctgataatacacctaatgtaaagttttctttgctttcccatgctttgaatccagctgctggattagcaatatatcctaatgcttctttaacctgtgctgcagagatctcaactttctgttttccacgagttaaaacgtatttgtcagcattagcaactaatcctgtatattcagctgtgttatcttttacaactggttttacagtttcaggtgttacaacttttgcaggtgctggagctgcttttactgttactgtaaatttagctttcttaccttttgcatctttacatgttgctgtaattgttactttaccagctttctttgcagttactttacctttagaagttactgtagctactttcttgttgctagatttgaatgttacagcttttgtagaagctttctttggtgagtaagttgggtgaagagtgaatttctttccagctgttactgttttcttttttccctctttgaattttaaagttttaacaactttaccaactgtaacctttgttgtagcctttgcttttttattgtttttagcaattgctgtgattgttactgtaccttttttctttgcacggatgataccattcttagaaatagtagcaatctttttgttgcttgttttgtactttaacttataagttttagcactttttggtgagaatttcaggcgtgtctttgcattcatccagtgtcctgatgcactgatcacataccctttcttcttaaaagataatttctttaccttttttgttgctgcactaacattagctgtttttggtgcttctgttactgcgacaagtccgaaagccataactgcggataatccacaagctgctgctttcttgatgattttgttactcatacttacattcctccttattaagtatttgggtgatttttttccgtatctgactcaccgtaatatgaatatttatactcataattaccataagcaccgatacgctcatcaactttatttaatacagccccaaggatacgaacatcgcccctcttcaactgcttgatgacatcttgaacgatcttacgtttgattactccctgctcgatcacgatgactgctccatctgtatatttaccgatgatcacagcatcaataacaacacctagtggtggtgcatcaatgatcacataatcaaacatatccctaacattctcaatgaattgttcaaactgctcagaatccaaaatgcttgttggatctggtgacagcggaccagctactgtaatacaaagtccctcaacttctgtctcgtagatgatatcctccacttctgcctgtcctgtcagataatggcttaatcctttatcgattccctgtatatgatatctggctgccattactgattttcttaaatcagcatccaccatcagtatcttctttccactttctgcaagtgttcttgaaaggctcagagaaacagaactctttccttcattcggaacactgcttgtcattgtgatcactttaatatcttttccgcagaaggctaagttcgtctttagctggtttagtccttctaccatacgataatcattgatctctggaagatccattactaatttcttcatcttattccctcgccctctttactttctttgttcgctttgtagttccctttaccaaaggtaattgcgctaaagtattaattccaagatatttctcaatatcttcttctttcaggatcgtatcgttcatcagatactggatcacaatgactgctgccatcaatataaatccaagaactgctccgatcaatacgttcttcttaagacttgggctgtctggtttatctgccttatatgccttttcgatgatcgttggtgatttcacatccatcttctctgcaactgtcttcgctgtcacttctgcaagatcctgtgtgatgctctgtgcaagtgctgcatccttatctgttgtcgtgatctgcatgatacgtgtatcagatggattctctactgtgatcttcttctctaattctttataatccatatcaagcttcagatctgcgattacctgttcaaggactggtcttgtcttaacaattaccatataatcctgtgttaactgactccccattgtaagatctgtaagctgtgaaagtccaccttttgatacaacataaagctgtgctgtagaagaatagatcggtgtcatcgcaaacttcgtgatcagtcctgatgcgcctgcaaagacgattgctgtcaacaaaatccaaacgatcttcttcttcaatgccaaaaacaattctcttaaatcaatctcgatctcatcatcattctctaattcgtacatagatgcttttatcccttctttaattaaatacttttcccctcaagcatctttcttggattctcataaagaatctggtccgcatgcttcttccgtacaacttctgctgccggtttcatatttggtcttcttgtccggaaatcgtgacaatccgttccaaggaaatgaaccagtccttctttcataatcttcttacaaaaagatgctcgtttatcaaaaattcctccgatcaggctttccgcatttatctgaatatatgcacctgtttcgaccagttcgacaatcttgtctacatgtccgaaaactgctttgtatctctctacatgtgcaaggatcggaatatatcctgcatatacaaaatcctgaaccgcacgatatatatgcgaataggcatctgatgtcgcaaactccactaaaacataacgggtcccattcatcgtcaatgctttcccttgtttcagatctgaaactgtcccttgctgataatataattcgctcccaaggtatagctgaatctctggataatacttgtgtgccttctctctgatcgcctcaaacttctctcttaatacttctgtatctggatgtccaaacttcggaccgtaatgcggagtcagtattacctgatccacgccttgttcccgttcttcatccaacaatcccattgaatcattgatgtcctttgctccatcatcaactccatataatatatgtgtatgaatatctatcaacgccataacaatctcttttctaagtctgatatttatattatttttgataacttaagaaatatactaatataatataccacctttattctcaagttacaatgctttttcttatcaaaaagaaatataatttatactattctttgctgaactcaactaactctaatccctcattacgatcaagtacaaactggattccccattcattcttaaataacaacagtggatttcctcgcatatctttgactttcttaacttcagatacaccacgtaatttgttcatatccgtgttgcggtctttgatccagcggattgcctgatatggcaatggttctaaacggatctcgcagttgtattcattttccagacggtattttaagacatcaaactgaagtgttcctacaactccgacgatgatctctgcaaatcctgcttcatgttcctggaagatctggatagcaccttcctgtgcgatctgttctacacccttcacaaactgcttacgcttcatagaatctaactggatgactcttgcaaaatgttctggtgcgaatgttgggattccttcgtattcaaagtcatcttttggaaggcagacagtgtctccgatagagaagattcccgggtcaaatactccgatgatatctcctgcatacgcctcttctacgatcttacgttcctgtgccatgatctgctgtggctgggaaagcctcatctttttcttactctgtacatgttttacttccatgttcgcttcgaatttaccggaacagattctcataaatgcaattctgtcacggtgatttttgttcatatttgcctgaatcttaaagacaaacgctgaaaaaccattttccacaggatctacttcttctcccttggatgttcttgcaagtggtctgtttgtcatcttcaggaaatgctctaagaatggttctacaccaaagtttgtaagtgctgatccaaagaatactggagatagttttccctgatgtactttctccatatcaagatctgctgccgcaccatctaacaattcaatttcttccatcagattctcatagaaatcttctccgatcagatctgctgcattatcatcatctgctgaaatgatcgtttcttttgcttcttttgcaccacctgtggagactgcctcgaatcgtaagatatttcttgatgcacgctcgtatacacccttaaattcttttccacatccgatcggccagttgatcggacatgtctcgatccctaagactttctcgatatcgtctaacagatcgaaagtatccttagcttcacggtccatcttattgataaatgtaaagatcgggatatgtctcataacacagaccttaaataacttgatcgtctgtggttcgacacccttggaagcatcgatcaccatgacggcacaatccgctgccatcagtgtacgatacgtatcttctgagaaatcctcatgtcctggtgtatcaaggatattgatacattttccttcatattcaaactgtaatacagaagaagtgacagagatacctctttctttttcaatctccatccagtcagatactgcatgtttggagtttgcctttcctttcacagaccccgctgtattgatcgctcctccatataaaaggaacttctcagtcaacgttgtcttaccggcatccggatgggaaatgatcgcaaaggttcttctgcggccgatctcctgctcaatgctgtttgccataatctttttcctcttttctatttttatctattattttacatttctacgcatacttagtcatattatcacaccacttcttaaatttctactgattctttataaaaaatatgcttttaactattgtttttcccaagaaacacaagtgtttttcgatgttaattcatggtataatgattctatattaaatctaggaggatatctcatgagcaatacaatcttacgcaatgaaaatgtatctgtcactttaaaatctcttggtggggaactgacttctatcaaagatgcttctggtacggaatatctctggcagggaaaccctgacttctggagcggacaggcacctgtcttatttccgatcgttggatgtttaagaaatggaactgcaaccatcggtaattctaagacttgttcttttggccgtcatggtcttgcaagaaaattagaatttactttggtttcttcttctgaaacttgtgctgtttattctttgaaagcggatgattctacaaaagaacagtatccttatgattttgaactccagatgatctatgaattaacggatcatggagtgaaagtcagtcataaggtgatcaatcatggggacatcgttatgccttactgtattggcggtcatcctgcatttaactgtccagtgtatgaaggggagaattttgaagattatatcgtggaatttgaacaaccggaaactgctgcctgtgcacagcttacagatgatggtttgatcaataatgacgatcgtattcctgttcttgatcatgaaactgtgatccctgtaaaacattctttattttacaaggatgctttgatctttgatcagctgaaatcacgcacaattacattaaagcataaggaaagcggccatggtatcttagttcggttccctgatttcgattatctgggtgtatggtctagtgcaaatgatggtccatttgttgctttggaaccttggagtggaacttctacttgcagtgatgaggatgatgtgtttgaacataaaagaggtgttcggttcttggagcctggagaaaatgaaactttaagttttgtgatcgagattttatagtacgtgataaaaaggagactctgaatatttcaaagtctcctttttcgttaaattatatggattttggatatttataatatgtttatgtgaaattcgtattctttgacttctcctgcctgtacatactggatatttcgtttttcttcgaatttatcaccttcgtcactgcaggttgagagtcctatccatggttccattgctacaaagtctgcttctttggctgtggaccataggatcaggtatggaaattgttcgaaatctagtcgtatccccttgttatgttttttgctctttagtgtgactgctcttgatttcagctgatctaagataactgcatccactgaaaacagatcatgtttgagtggtaatgtgtcggtatcttctaagaaaccgcttctgtgttccatatcaatcagccctgtttctgtgaccggagttggaacggtgcaagtttcttttttctcaaagactaattcgtagtcatcatagctttcttctttatagagcggacaatggaaacctggatgtccaccaatttgaaatggcataatttctttatctttattttcgataatatatctgatcgtaatctttttgtctttcagagtatattcaattcctaacttaaattcatatggatattgggcaagcatttcttcattgctttcgatttcgaataaaatgctgttttctgtctcagtcacacacttgaattctttttttcttacaataccatgtcttggcatgtttgtctgttttccatcaccgatctgtgctttatcatctctgatacttccacagattgggaataggactggtgcctgaccggaccagtattctggatttccttcccagagatactccactccatcattgtctttgatagaatgaagtgttgctcctttggattcaaagatgactgtaagttttttgttctttaatgtatatttcattgtatcttccccttttatatcgcacgatctataatgttttgatcgttacttctggaaggatattttcaacatcttccatacggatatgtcctgtttctggattgattgcattcgctgctgacacagcgatcgcgtaacttaatgcatcctgaatctcttttccttgtttgaacgctactgcaaacgctcctaccatagaatctccacatcctacggtattgactgcttttaatttcggtggtttaccatggaaaattccttcttcacatacgactaaagctccatctccacctaaagatacaacaacatattcgattccgtatttctcacgcatttctttggctgcatcgatcgtctgatatctattttcgatcttgataccaagtaaagcttctagttcttcgtcatttggcttaaccattgttggtcctgctttgattccttcttttaagtaatctccactcgtatctaaaatgactttctttcccttgtttttgatcattttaactaatgttgcatagatgtctttttgaaccccggctggtatgcttcctgatattgtgatgatatcgctttcgtcaacaattcggtcaaaatcttctaaaaactgctgtatttcttcttcactgactggtgctccaggttctaagtattctgtagacgactcatcttctgccaaaatgttgatgcagcttcttgtctctgactgtgtttttgtaaatctgcttgggattccatctttctttaacatgtcttccacataagctccgttaaatcctccggcaaatcctgttgctaacacttcttctccacaaaaatctatgattcttgatacatttaatccttttccgcctgcagaattgacacatttctggacacgtgcaaccgttcctggtacaacaatgcctttgatatagtatgctttatctacagatacatttaatgttaccgttgtaatcataattatgcctcactgtcaattaaaatcttaccttttacagttcctggtgttttgtacatttcgaatgcttcatcaatcctgcttaatggtatcttcttaaagattaaagaatcttcaaattttaactgtcctgtcttgaaataatgtgctgttaagatccattcttttcctggaaatggagcactatatgacatccatgaacctgttaatgtaaattcttttcgattgatgttttcccattcttttacggaaaagtttaattctcttgtcggtgttccgataaagcatacactagctttatttgcagccaattcgaatgcatatttcattgttgtagtcactccagctgtttcataaatatacccgaatccttttccatctgttactgccattgcctgattcataaagtcttcgtctaaagtgttaattccttcatctacccctaattttttcgctaattcaagtctttctggactaatatcaaatacaacaactttctttgctccaaaaatctttgcccattgtgctgtgaataatccgatggttcccccaccaagaatcgcaacgcattctcctgcatgataatccactctgtttaatccatgaagtgcgacagttgctggttcaaagaatgccccttgttcaaagcttacttcatcttcgaatttgactgcattcttttctggaactgttacatattccgcaaaacttccaaattctctagatccaataaagctgtaatgcttacacaaagaataatttcctttctgacaatcttcacattccatacatggtaccaatggaaccccggcaacacgatcacctttttttagtgttgtaactccttctccaacttcttcaatcgtacctgaaaattcatgtcctaatacattagggaagaaatgacatgcatctccgtttactcgtggtacgtctgatccacagattcctgtatattttactttaattaaaacctgccctttctttggctgtggtttttcaatttcttcataacgaatatcattttttgcgtgtacaactcctgctttcatgcttattctccttcctgatgtattagtttgcttttcctacactcttgcatactttcattttggacataacgtattctttgacacattcttttcctgctgcattgtatttcttagggtcaatgacatctggattttcttcaaatactttttcaactccgtttgtaaatgcaattcttaaatctgttgcataatttactttacagattcctcgatttacacactctgtaacggttgcatctggtacaccgcttgttccgtgtaatactaatggaatatcaacaactttacgaatttctgataatcgatctaagtcaagttttggttctcctttgtatacaccgtgcgctgttccgattgccacagctaaggatgtaactcctgtttgttttacaaattcgacagcctgtgctggatctgtatatgggttgtcatctccaccatctaagtcatcttcttttcctccaactttaccaagttctgcttcaactggaattcctgatggtgcacatgcatctgcaactgctttggatactgcaacattttcttcaaaacttccgtgagatccatcgatcatgatagatgtgtatcctgttctgtatgcctgcattgctaattcaaaactgcttccatggtctaaatgcatggctactggcacgcttgctctttctgctgctgcttttacatttgctaggaagaaatctaatcctgcatatttaactgtagatggtgttgtctgcatgataactggagattttaactcctctgctgcttccataaccgccatgaccatttccatattctctacattgaaagccccaactgcataatttcctgcctgggcatctaataacatctgttttgttgtaactaaaggcatctctttttcctcctctaaagttcggggcagacttttttaagtccgcccgttcatatatttacacttttatatcattgtttgcttgtttttaatattcgctttcttttaaagctgctgctctctgtttagatccacgaactgtaaagatcatgcaaatcacataaatgattccgataattaccagtcctttgatgttctgctgtgtcacgatctgtgtatacagatatgtgattggacttccaccctgatcaagtgctgctacctgtgaagctccgtttgttaggtttacagatttcgctaatgctgttgtccaagggattgcctgacttgcgatccagatggttgtgaacatgatcacacatcctgaaatcaatgatctgaataaatttcctctatgtactgctactgcgataccaatgaagaatccgattgttgctaaatcaccaaatggaaggattgtatttcctggcacgatgatcgcgatcaagattgttaatggaatgaagatcagtccaactgttacgacttctgaatctccaaggatgattgctgggtcaagtccgatataaaattcagcttctccagactgagatttctttgttaagatttctttcattctttctgataatggcattaatccgtccatgatacattttgtgatcttaggcattaataccataacggctgacatcttgatacctaactggaatgctgctgagaaatcatatccagctaaggctcctacgattgcaccaaggataccaccgataacgataggctctgctaatactccaactttttcctgtaaattatcgattgaaaaatcaattttatttaatccaggaatcttctcaataattgcatcaattgcaaatgcaaatggtgccatccatgttcctgttccatgaggtacagtgattccgtctaattcaaagtaatcttccattaatggcgcataaagatcaccaaatttataagcaatgatagcatgaacaacaactccaccaataccgatcgcaaagtttcctgtgactgcatatgcgatcgctcctgtaaatgtcatatgccagatattccaaatatcaatattaactgtttttgtaagttttaatactaacatgataatgttgactaagatcgcgactggaatcgcaacagttgcgatacttgatgcccatgtgattggggacattcctggccatccaaggtctacaacactcatgcttaatccaaagtttttagacatctgctgtgcagctggtccaaggtttgcgttcatcatgtctacgatcagtcctaatcctacaaaacccacaccaaccatcaaacctgcacgaaccgctttaccaatttttactcctacgataatacttaagatcgcaattacaagtggaagcattgcggacgctcccatatcaatgatgtaattgatcatatctccaaaaattcccatgtttgtctctcccttttttttgattttattctatatttttacatatacctttataaaaaaaccattttaaaataaacgtttcaaataaattttatattcatttcttatgtctttttaaaatggtctcttacgtctagtcttttctttcatcttacttatttaatacttcaagaatcttagcttttgtcttatctacacctaatcctgatacaaatggcattcctgtaataagaggtactccaaagtctctttttacctttgatgttgtcacgatcagatctgctggaagattagatgcgatctctgaaattcttacctgtgcgatttcgatatcaatgttattttcttttgctaattctacgattgcgtttgctgcgattgttgatgttgcgactgctcctccacatgctacgattactttcttcttcataattatatattctccttttctttgatgatttcgatgatttcttttgcgtcttttgctttgattaatttctttaatacttcctgatcctgaaggactgccaagattgcctgtaataattcaagatgtcctttctcatcaactgccagcatgaaaatgacttgtgcatttacatattcatcatccgttcccatctctacaaattcgactggttgttttaatgttgcgattgcaattccttttttgtttacatggcttacgtctgtatgtggaattgcgactcctttttctcctgtattgattcctgttggaaattcagcttcacgatcttttaaagcctgcacataactttctttgcaatacccttgttttacaagttttcctccgagtgcttcaaaaatgtcatcgcttgattttgcttcgagtcccggtatgatcagttcttccttcagcttttcccaaaccatttttgtgactcctccttttttctcttttctactctattttttgttactttgaagtgacgtcctttcgatggttttattatattatggttgcaaagaaaaaaacagtcaaaagactttccttgatttttgcaaaaatataaacagattgaaaacttttcaaaaatctgtgaaaggttttcaacctgctttactttcttctataacaatgtatcttattatttgatacgtatctcgtatttccttatcgtatctgcggcctcttctggtgtcttcgctgctgcaagttcttccttaaacccacgatttgtcagcatattgaccaaatgaaagaaggctttcatatgctttttatgatcttctgtgctcatgcagcagaaaaatcttaccttagcgatctctccgtcaatatcttcgatcgtaacaggttcttttaagcggatcaagttcattccaacttcattgcatcctctgtcaaatccttcatgtggtaatgcaaattctggagagattataatgtaggcaccattctcctttacattgtcgatcatggcatcaatatatttatcttctatcttgccttgatctaataatggctgtgctgatctgataatcgcatctctccaatcactacattctatgtctagctgaatatcggctgctgttaataattcacataaaaatggttcctgtatctctacttcaatcccaaagaattcctgtacttttcttgttacttgattcatcaatgaaggatctttgataatctgacttaattcatcgatcaatttctgtgcatctttttgtggcaatgcaactctttcctgaatcggaattggttcaatcttatgtttttcctgaatctcttcaatctttccatttactcttaaataatcttcatcagaaaataccggagatacaagaatgtattccccttcatagtctcttaatggaattgttgatatcacgagatcaatattctgatacttctcattatccagtaaatgtgctgaaactacatctaccacatgaaaatcaaaacgattcctcatcttggcaagaagcagctgcgaagttccgattcctccgccacatacgatcagcacacggaattccacttcttttttctttctgcgctctagcgctgcacaaatatgaattacaatatagtcaatctcaatctcagatatctctcgatccataaaattacttagcatatctttatacttttgaacaacttctaagaccttaggattcttttccacatattgttttagaaaatcatccctctgtgttacattaaaggaacgcataatgatagattctaaatgatctgtcagattctcataaaacgcaaaatctctatttaagtttacaccaagatcttttgaaatatgttcaataaattttcttgtaaccagttgaagtcctataatcttttgttctcttcgctgtctttttacatagctcatactatccagcacaccacataagaaatccacttcgcctttggcatcttctaaatcccaatactgacagatgtatttttgaatatctttcgccattgcatatttgcttttgttcccttcaattggttctgtcattacatttccattgcgaattctttcaatggaaagcatcagatattgaagtaaatagtcaaaagaatcatccgtcataaatcttccataggcatgttcctgttcattgatgatcttttgaagattccttcgttcatcttcactcatcttaatttccatattcagacctttaaaaaaactccggattgttgaattttctttaattccattagaacctacagacattaatcttaataagaataaacgtttatctccttctaatccttcaagtcttaatcctttatttgaatgtgagattacttttaattttcctgattccaacattcttttgacttcatccagatcattaatgatcgtagcacggcttacatataatatatctgcgatttgtgataatgtaatatgatctttcgtattgatcaaaattgctgctgcaagcattcttcgttcttcttttgatagtttgtatgtataaaaatcttcctgctgtgttgtctctctcgcctgacttatatcttcttccatcacgattaagccgttacttccaaaacggatcggtttgatctcttgttctttgaggtagtcattgatatctttaatatcattacgaatcgtgcgttctgaaacctcaaattttgctgctagtgttgaaatcgtgtgatcattttctcttcggcctaacaaatctaatatttcttttgatcgctttttcatatgattttgcctcctgtgtaatgtatatattataatacattacgcaagaggcttcaaagtattttataaattcaacgcttcgattggttttaaattcgctgccttattagcaggatataatccaaacacgattccaagtatcgctgaaaatgctaatgcgatcagactaattcctgctgatatcgtataatctgctgacattaactgattcattccaaaaatggttgctgcacttaatgcgattccgatcacacctcccatacaggacagaacggttgactcgatcataaattgagccaggatatctttcttcttcgccccgatggcttttcggattccgatctcttttgttcgttctgtaacggacacaagcatgatgttcatgattccgatcccacctaccagaagtgagattcctgcgattcctccgatcatatatgtcatggagtttgtaacgtcgctgacgctgtctgcgatatcagactgatttgtgatcgtataggaatcttcatctcctgttttttctaacaggaagctatctactgcactttctgccatgttaagcattccttcatttgttgcagatacataaaaactgctgatcgtgctgttttgcatgatcctttgtgctgttgtaaatggagtatagattactgaatcgttggagtctctctgagatgatccatcttcttctaagactcctatgatcttgaagtttcttcctgagattcggattgtttctccttctacatcggtatgtccaaataagtctttggctgctgtgactccaatgaggcagacttgcagccggttatcattatctacatctaagatataacgtcctttttgtacactgatattttgaatatcttcgtattcctctgtaattccttttaatgttacactggatgaatttccagatgcttttgctgtagagcttcctgaaatgatcggtgatacactctcgattgctgggttattttcaaggcttttaatgtcactggttgtgatcttattgcttcttctgcttgttaccgttgctgagatcacattgccgcctaattgtgataatgtgtcactgacgttatttgtcgtactttgtacaatcgatacaagaactgtaacactcatcacaccgataatgattccaagcatggttaagaatgatcttaattttgttgaacatatagaagcaaatgccattttaattgcttgtgtgatcttcatattctgcctcacctcctgaatcttttatgatctttccatcgctgatttgtacctgtcgcggtgcttccattgccacattgttgtcatgtgtgatcaatacgatcgtatttccttcttcataaaggttatgcagcaacatcatgatctcttttcctgatctggaatctaaatttcctgtcggttcgtcggcaaggatcagggatggctctccgactaacgctcttgcgatcgcgaccctttgctgctgtcctccggaaagctgattaggtttgtggttcattcgtttttccaaaccaactgcttttaatgcctttactgctttttctcttcgcttctttgtcggcattccctgatagatcagcggaagttctacattctccagtgcggagagttttggtagcagatggaactgttgaaagataaatccaatctttttattgcggatcactgataattctttttctttacattttaaaatatctgttccatccagtgttatttctccagaatccgggcggtcaaggcatccaagcatattcataaatgttgattttccgcttcctgactgcccgatgattgccacaaattcgtgctctttgatcgaaagtgacacatcatccaatgcataaacttcttctccaccaagaaaataagttttctttagattttttacggatatcataatgatcacctcctactgttttccaccagatgacattccaccgccttgcttatttccaccttgcattccaccaccagatggtgcatccattccacctttcatatcggatttttcatcagagctgctactgcttcttgtgatggtcttaacctgatctccttcgctgactcctgatgtgatctgtgcataagtatcattgatgatccctgtctctactttggtctgtgttccattttcattgtcatccgttactactgttacataactttccccgtcttttgtctggattgctgatactgggactaagaccgcattttctgctttggctgttgtgatcgttgctgtgacactcatggatggcaaaaggtcagctgcattacttaactggatcgtgactggatatgtcgcaactccatcacttgttgatccaactttcgatacttttgttactttccctgtaaatgtcttatcttccactgcatctgctgttactgtaacactctggcctttcttgacacttttgatatctaattcatcaacattgatcgttactttataactgcttgttttcagtactttgcatacactctggcctttactgatcgtttttccttttgtgatcgtgccacttacgattccattatattttgatgtaactgtcaggttacttctttctgttttcaaggttgataacttcattgtcagatctttatattttcgtacattacttgcataatcatcatcggatgaatcactaccttcaatcgtatcttctagagtttcaatctggctttctaactgtgtgattgaatcttccagatcagaacttgtaagcttagcgatcacatctccttttttgactgccgctccgtcttttttaagaactgactgtacggtgacatcactggaaaatgtgacattttgcgttattgcttttacagaaccacttccttctactgtcttttcaatcgttcctgttgttgctttctgtgtctgtaccgttttttgtggctgctttttctggaagaagaatttataaattccaaatcctccgccaccaagtaatgctaaaatgatcacaatacaacatagtttatgattctttatttttgatatcatatttttcttttccatatatgcctccaattcatatgctgtttttgattttctgtttgttattgtagaaaatctttttgaacatctcatggtagttttatgaacagtacatgttaatgttatgaacattttgtgacttgaaaacactggaatttccacatttttcgtgctatcttgtagataacaaacttgtagttaggagttatgatcatatgaattggcatggaaaacgttattattcgtttgatagttttttaaagaattattttggtgagaaaatttataaagtatccttagatggtggttttacctgtccaaacagagatggaacacttggaactggtggttgtatcttttgcagtgagggcggttccggggattttgcttcttcagctgctttgtctgtgacagatcagatcaccgctggaattgagatggtttctagaaagattgagaatgggaagtatattgcttattttcaggcttttacgaatacttatggtccgattgaaaaactggaagctttatatatggaagcggtcaataatccgcgaatcgttgctcttgcgatcggtaccagaccggattgcttgcctgccgaggttttggaacttttaaatcaattaaataagatcaaacctgtgtttgtggaacttggtctgcagacgattcatgaagagaccgcttcttttatccggcgtgggtaccctttgtcttgttttgatgaagcagttatgaatcttcataaaatcggtgtattgactgttgttcacctgattcttgggcttcctggtgaaacggatgatatgatgcttgagtcagttcgttatctgaatcaccttccgattcatggggttaaattttctatgctgcatattttgaagaatacggatctggctgatcattatgaggaccatccctttgatgtgtttactttggagtcttatgttgatctgattttgaaatgtattgagaatctgagtcctgagatcgtgattcatcgattaactggagatggaccgagagatttgttgattgctcctgagtggagtgtttataagcggaaagttttgaataggattgcgcatgagatgaaggtgaaggatgtttggcagggggataaattgtgatttgtagtttgaatgacggaaattattggtagaatattataaaaagagatcatgtgcctgcaacccactcgcgttcggactcccacgtagccgtactaagctcctgaatggtctaacgaccatccactcgctaagtgcagacgtgtccgtacggttgctgac

SEQ ID NO: 661 - DNA, 17536 bp, Unknown
  gut microbiota DNA sequence
gtaaaggagatacgtcatgcgaaagaaagataatacagattattatataaaccggcatagttgctttttattgcaataccatatcgtgtttgttacaaaatacagacatcccgtcttaacaggcaaagtaaaagatgttgtttatgaacgtatccactatgtagcagatcaaagagggtttcacatcctagagatcaatggcgaatcggatcatgtccatatcctgatggaagctgatacaacaacttcaccggcggaacttgcaaatgttttaaaaacacaaacagcacgaaaagcacgaaagttgtatggcgaaaccattttaaaaaaatattactggaaaccttatttttggtcggatagttattttatttcatctgttagtgaaaacagtctgcacacaataaaacagtatattcggaatcagaggaaacgataatgtgtccgtcaggacacattcacccacgcccatattaaaatatggacgtggtactctgcttagattttatagaacaaaaaagcagcttttcatacactttcgcatacaaaaagctgttttgtcattcttaattaatcttcaatcttttcttctaatttcagattgattcttcccatcttgtcgatctctaatactttgacagctactttgtctccgatattcacgacatcttctactttctcaactctttcattagaaagttttgaaatgtggatcattccgtctttgtttggagaaagctgtacaaatgcaccgaagttcatgatccttacaacttcaccttcgtaaatatctccaacattcaatggttctacgatggatttgatgatgctgatcgctttatcgatcattgcctgatcttcgcttaagatatcaatacgtccactttcgtcaatatcgatcttaacacctgtttcatcaatgattccattgatcgttttaccctgtttaccgataacttctgaaatcttctcaggatcgatcgtatactgagagatctttggagcaaattctccgacgtggtctcttgcagctgggatcactggattcataacatcatgaaggatatgtgttcttgcttcttttgttcttgcaatcgcttctcggatgatctgttctgtcaatccatgaatcttgatatccatctggatcgctgtgatacctttgtctgtacctgctactttaaagtccatatctccaaagaagtcttctagtccctgaatatctgttaagatgatgtaatcgtcatctccttctcctgttacaagtccaacagagatacctgcaactggagctttcactggaacacctgctgccattaatgacagagatgaagcacagatacttccctgagatgtagatccgttagattccatgatctctgatactgtacggatcgcatatgggaattcttcttcacttggtaatactggaactaacgcacgctctgctaatgcaccatgtccgatctcacgacgtcctggtcctctgcttggtcttgtttctcctacagagtaagaaggaaagttatagtgatgcatataacgttttgttgtttctgttacatcgattccatcaagacgctgtgcttcagataatgatccaagtgttgtcactgtcataacctgagtctgtcctctctggaataatgcagatccgtgaactcttggcaggcagtcaacttctgcgtgaagtggacgaatctgtttgatatcacgaccatctggacgtttgtgatcttttaagatcatcttacggacagtcttcttctggaatgcataaacagcttcaccgatctgtgctaaccattcttcattctcagcatatctttcttctaatttttcttcgatcgcacggatatttgcttctcttgtctgtttgtcatctgtaaatacagcttcttccattgcttctggagtaatgaaagctaccatatcatcatacatctctggatctacgatatgatgctcgtagtcatgtttttcttttccacattcagctacaattgtatcaataaatttgatgatctcctgattcacttcgtgagctttgaagattgcttctaacatcacatcttctggtacttcattcgcaccagcttcgatcatgataactttttctcttgtagatgcaacagttaatgcaagatcagaaacttctttctgtgcagaagttgggttgatcacgaattctccatcgatcagtcctaccattgtagatgctgtaggcccgtcaaatgggatatctgaaattgctgttgcgatcgcagaaccaagcattgctgtaagttctgggctgcaatctggatctacagacataactaagttgtttaatgcaacgtcatttctgtagtcttttggaaacagtggtctcattgggcggtcgatcacacggtctgtaagaattgcattctcagaaggttttccttctctctttaaatatccacctgggatcttacctactgcgtataatttctcttcatattctacacttaatgggaagaaatcaattccatctcttggcttttcagatgctgttgctgtagataatacaacagtatcaccgtagtgcataaatgctgcaccgtttgcctgtgctgcaacacgtccaacttctaccatcagtgtacgtcctgcaagttccatactaaactgttttgtcatagttcgtctcctttatattttttgtcttaaggcgccgaaacaactgaaaaaccgactacttgtcttccttcatattgtaataagcttttcagcagtctcggaaaacgcctcagtaacttagttagtatagcatggtttgtttaaaaaaaccagatgatttttattttattggcgatttcatcgaaatttcctatgcaataaaaaactgccgcatgacatttcatgcggcagtttcaatatcttcattgataagattattttcttaatcctaatttttcgattaatgaacgatatctttcaacatctttgctctttaagtaagctaataagttacgtctcttaccaaccatcttaagaagtcctcttcttgaatgatgatcttttggatgctgattgaagtgatcctgaagttcgttgattctagctgttaagattgctacctgaacctctggtgaacctgtatcttttgcgtctttaccgtatttagctacgatttctgctttcttttctgatgaaatcattgtgttttcctccttaaaattcttatatcgcctgataccaggaaagggttggagtgcccaaatctgagtatcggtttcactaacttttatagaatatcataggtttctatgatttgtaaagaacttttttatttttctttcttttttcctaattgatggtttttctttgctgctgcagtcacagcttcgatcactgcacttctcattccttttttctcaagaacgttaaccgcttcgatcgttgttcctgctggagaacatacagcatcttttaattctcctggatgctgtcctgtctcaagaaccatctttgcacttcctagtaatgtctgtgcagcgaatgtatatgcctgctttcttggcagtccctgtgcaactgctgcatccgccattgcctcaataaacatataaacataggctggaccacttccactgactccaacaacggcatccattagattctctgtgatcttttccgcttttccaaaactttcaaaaatcttatgtaccaggtcaaactcttcttccgttacatattcattacagcatagtcctgacattccttctcctaccagagctggcgtatttggcatcacacgtacgatcttaacttcttttccaaattgacgctctgctgcttccatagaaacacctgctgcgatcgttacgatgatctgttctgagcttacttcatctctgatctctttgatcacagccgggtatacctgtggctttacagataacaccaaaatatctgattgttttgccacttctttgttgtctgttgttgtaatgattccaaattcatcttttagtttcgctgttttttcttctcgtggattggatacgatcaattcctgtggacttacgactttctgtgtcaaaattccagtgatcattgcttgtgccatatttccacatccgataaatccaagtttcattccgtttttcctcctatgattgttctaattatccagcttgttcagtaatttttcaaaatactctggcaaaggcacttcaaactccatatattctccagttcttggatgtacgaatccaaggaccttcgcatgaaggcactgcccttccagtgtatactttgacttctttggtccatagacatcatctcctagcaatggatgcttgatcgatgccatatgcacacggatctgatgggtccttcctgtctctaattgacattcgatataagtaaaacctttctttagacgttttaataccttataatgcgtcactgcatgttttccatccatgacgattcccatcttcttgcggtcttttaagcttcttccgatcggtgcattgactgttccttcttcttccttgatatttccataaacgatcgcatgatattttcttgtgatcgaatgatcatacaactgcttggcaatactttggtgtgccatatcgttcttacagacgatcaagatccctgttgtgtctttatcaatacgatgcacgattccaggccttaacactccgttaattcctgacagatcatccttacaatgtgccatcaatccattgaccaacgtaccactgtaatgtcctgctgccggatgcactaccatgcctttgggcttattgatcaaaataacatcctgatcttcatagccaatatcaagattcatctcctctggcaaaatctcaagttctgtcggttctggaacctgtaaggtgatcacatctccttctttacattttttattgcctttggaagtcttgccatttaatgctgcacgttcttccttacacaatttattgatataacttctcgtaagatcgctgcactgctccgaaagcaccacatccagacgcttacctgccatttcacttgtcactttaatttctattgtctcgtccatgttttcctttcctgttaagaaaatcaagatcttcttccttatagaaaaataagatcaagatcaaaagtaatatcattgttacggtcacataaatatctgcaacattaaagactggaaaatcgatccatttaaaataaaagaaatcaaccacatatcccctgaatactctgtcaatcagatttccaaacgctcctgccatgatcaatgcataactgatacgaagtggtatatatttcttcggctgtggtattctccgatagatccatgttaagatcactgcagcagctactgtgatcaatacaaagaaaatctgatgatcctgaaggattccaaaagccgcccctcgattctccagataagaaagttcaaatacattggggatcacagcgatcccttctgtacctcgaagtgcagataatgcccaaatcttacttaactgatcgatcaagatcagccctatgatatatatataaatacgaatctgtttcttcatgtctcgtccttaaaaacttatccctgtaatacttgtttcatttcatcatccgtcacgctcatatcaatatatgcatctccgacagatcttaacaatacaaacttgatcttatctccgaccatcttcttatcggatttggttgtttttacaatatcatctgctgaaagttcactgatatctccattcatatcaaatgcttcaaaaacacctttgatatcatcaacttcttctttactgatattcccttttatacaagaaatctctgctgccagacagcacccagctgccacacactctccatgaagccatgtaaaatcctttagtttctcgatcgcatgccctaaagtatgtccaaagtttaatagcgctctctcacccttttcctttggatcacgttctaccacaccgcctttgatcagacagctttgatagatcatttctttcactgcttcatgctctcttgccttgatcgcatctatattttctttgatccattcataataatcggcatctttgatcaatccgtgtttgatcacttctcccattccagagaaatattctctctctggcagagattttaaggttgttgtattgatgtatacaagctttggctgatgaaaagccccaaccatgttcttatactgtaagaaatcaacaccagtctttccaccgatactgctgtcaacctgagatagaagtgttgttggaacctgtacaaaatcaatgcctcgaagatatgttgcagcagcatatcctgtcatatccccgacaactcctccacctagagcgatcaacagatcctgtcggtcaaaatggttgatgatcagttcttcatataatgcttcgatcgtctttaactgcttatgtttttccccggcttcaaaactgaatgtgatcgttttggaagccttggatgagatcagttcacaaacttcttttaaatagattggtgcaacattgctttctgtcacaatacagacttttttcttctcaatttcaaggaattccatctggtccaggaggtctgcaaaggaatctcttaatacgatatcatatgctttctttccttcattgcagatctcaatcttattgttcatttccaaattgtttttgctgttcatcttcttcatctccatctgtctgctcgcatcctgcaatttcgaattccatctcataaacaggattatctaaaatatccatctgcccattgataaactgcttcattctggctttgtagctttgataatcactttccagtttacggatcaacttctgataattctcaatcgtcttttcatgctgttctttctcttctttaaagtcttctttcgcacttgttaagatcttttctgcctgatcctctgcctctgataccaactgttttgcattacgggatgcttctgcttctaatgcctgtgctttattgtttgcattctcaattgtctctttggatgtctcttccgcaagaaccaatgctctctttaaggattcttcgatcgtgcggtaatggcttaaattctctgtcaatgcagatactttctctcgcagttcgttgttttctttatagactttctcatagtctttcgctaattcttctaagaattcatcaacttcgactgctttgtagccaaatcctcttcttagttccttccctaatacctcaactggtgtaatcatatattcctcctattgaaagatcgccagtgtgataaactgacggcctttttttgatgtttttcctaaatcttccaccagaaacttcccatatccgcgcacggatatgatatcgccctgtttgatcttttgtccacctgataaacacatcttcccattatgaaatactttctggctctttagcagcttctcactgatattcctggataaagaaaaggcctgtgaaaccataacatccagcctcatggacgcaacaaatccttcttttttcttgtattttgggacatatccggtctcttcccatgaaacttcttccacaaaaactcgtgtatgtcttacctgatcaagctgttctttgatcacacctatgatatgttccatacagaaaatataggcatatctcccatcgatcaggatatcaccgatcaaatgtctctcgatcccaaggttcatcaatgctccaagataatctctgtggcttaattcttctgcgaatttatcaaaaacaggtgagatcctggcacaaaccactggaacctcaccctgataaccaaataattcttctgagccaaacatcaccactgcccttgtaaaatacttatgccctccaacaagtattggatgtgcataagcaagttcttgcttcatatcctgatagatactctgttcatattcattcagaaagtgtgtatatgtatagatattctgattatatgctttctcacataattccatcagacgtttctttaataactcttcttccttcatgaccttttattttaattgtggtgagatcgtattctcattcatgatctcgctttttaaatctccgctgacttcaatactgtctggtgctgcaataaaaatattgtttgatactgcctgtaaggatccattgatcgcataagttgctccgcccacaaaatcaatacttctctgtgcaactgtaagttctacaccttccagattgatcacaactgttcttccttcttttaaaagatcagctgccgtctgtgcttctgcaaaatcctgtggctttattacataaacttccacgcctcttccattcatagatacgaccttgcttcctgtacttgtaaatcttcgtttctttgcttctctgcttgctgtaattgtattatcaaacggctgacttatcttgctgttactgctttcttcttctacttcaggctctttcttcttaaagaaggagaaagtacttcttggttcttcctcttcttcctcatcgtcttcgtactcttcatattcttcatcgtactcttcatcgtctgatagtttcataaagttcagcagtttgtcaactgtacctttcatagatcttcctccactaaatattatagtttctctctccaaagattgccgttccaactcttaccattgtcgcaccttcttctactgcgatctcataatcattggtcattcccatggaaagtatactcatatctacattatcgaagtttttgttgttgatgtcaacagataattgcttcatcgcacggaaatacttacgattgtcttctggatcgtcaacaaatggtgcaatctgcattaaccctttaatctttacatgttctaaggcagaaatctctttcaccacatcaaaaacatcttctggattcaatccaaatttggtatcttcgtgtgcaaaattcacctggatcagaattggaacttctttgacatcatgctttgcagcttctttgtcgatcgcctgtgcaagttttatggaatctacagaatgaatcaatgctactttatccacgatatatttaattttattggtctgaagatgtccgatcagatgccatcttaccggccaactgatatttgcatatttatctctgatctcctgtaccttattctctccaaaatcaagtactttttcttttcttaattcttctaccatttctaatggtttggtcttgctgactgcgatcactgtcacttctcgtggatcacgtcctacacgtttacaagcttcttctacatgtttctttacttcattatagcgttcgatcaacatatccaattccttctttctgtaattcttataaatttatatgccttaatatatgatctggttttccttgatcgttgttccatcaagaacaatgaaatcataccgactaactccctgattggtatcatttgcaatgatcgaataatcatctttctcgatcagaatatcgattggacggaaatccgcatatccctgatttgtacaataaactccttttaatgtcttcattttctcaatcaaaaatgtatctttggaatccattgcctgaagcactacgttctctccaacttcttctggatcaagataacagtaatccttcgttcttccatagatcgtaaagctcttttgttccaccgtcacatcgcctttgttgcttgtatcacgtacggtaaactgttctttcgcactgttatctccttttgtaaggtattttactggaacctggtagaatttcttctttacaatggatgtgtttggaatctttaatcccttgtaggaatcaagcgtcacatcgatttctaagtagcgctcattgatataacgtaccgcgtaatcattaaacttaagatatccaaaatacgaacttccctttttggcgacttccaccgttgctgtggctgttgtctgatcttgcaggaaacgaaccgacacttcacttttatccttcaacatccgatactgatctgcttctagtggaattacgatctgccatttttcgcttttgttgatcctagctacaactttgcctttctttactttatcggacgtattatacctctgaacacgatactgactttggtcaaaatccttgcttgtgatatcttttgcgctcttaccgtcaaagtcatcagaataaaattgtgttaccccactgcttgtacttttctgtgtctcaaaacttgtatccccaagcttttgtttgactgcttctataactgttttcatagaatcttcacttaaattgaggattgcattcttgagatcatatttcagatcataaaccgtgctgaacttatgatcactatatacagactgataatctatgatcttatgctgaatctcttcatcatcgatcacttttttatttttctcaagctgctgcacctgacttacaaatgcatcctgaaccttctgatctttatcaaccgtaaagaccgttcctgatttcttgatccgttttccttcttctacataataggtaatataaccgctttgtgaagcctttagaagttcctcatcacggatcgcaattcctgtaaacgataaggtattggtgatcttatcttccgttaccttgtagacagtcagctttttcttgcctagaaacaggatgacattaatcaggatgtagaccaatatgactacaaaaatgatcattccaatattccaatgtatttttgtttttcgtcttcgttttgctgccatctcttaaatctcccatcgcctgagcgctgctccatttaaatagtcaaatttacatccttgcatataatcatttgtttccatgatctcgtcaaatcgatcttttaatttccaccagctgatgccccagttagaaaatgatgcatcttccttgggcactctgctgaatagacgctcgatcaccatatcttttcgtacataacagataaaatttaccagtctgtccagatattcttctggatcacaaagagttatttttccttctttatactcctcatacatttttgatcctttgggaatataaagagaatgtaattttacgatctgcactggaagtgcagaaagaatctttgctgtctcgatcacatccgtcatgtcatctcctggcagattcaaaataatatgagtgcagatttcaaatccatatggtgctgtcattaacacagcatctagatattctgccagtgtatgtcctcgattgatcttgtttaaagtcttataattgactgtctgaagtccatattccatagagatcttcacctgatattcttcagaaatcttctttaaacagtctaaatattccttcgtaatacagtcaggtcttgtggataccgaaattcctacaatatcttccgtctgtgctgcttctaccagatacttttcaaacttgtcaaccggcaggaatgtgttcgtataattctgaaaatatgcgataaatttctttgctttatagcgttttgtgatctttccttttgtcgcattcagctgttcacttacagatacctcactgttcatagcttcaaagccggttcccacacctccacagaaagtgcacccatctccatccatacggtttggacaagtcaccggaagattaactggtaatttatatactttttctccatataattcctttaaatgtgtgctgtaagctttgtatcgttccatcttagttttcctttgataatatatctgtcattgtatggtaaagagctgattttgtaacgccttttaacaccacggaaatgaattcctcaccgtctttattctttgtaagaagaatcaggcaagaacccgcctgtgttgttgtaccagtcttgcctccgatcatatatacctggcttggaagtgtgtatgttccagcaatatactgatttgtggaagccatatcataaatcttttgttctcccttggaaccaagatattcaatcctgctgcttgatcttcctgcaatattaaagaattcattatgtttagctacttctttaaagatcagataaagatcatacgctgtagaataatgatcacttaaatgaagtccattcggatttgcaaaatgtgtattggttgctccaagttctttggctctcttattcatcatttttacaaaatttgcttcacttccagccactgcctctccaagtgcaacggctgcatcattggctgacataatgatcaatgcatttaacaatgcttccactgtgatcttatcccctttcttcaggtggatcgccacagctgctccatcagggaacgtaatgtcatgtttgatcgttacaacctgacttaaatttaaattctccaaagtcagcaatgctgtcatgatctttgttgtacttgccgggtaagcctggtcaaaaaccttctgactaacgatcactttattctttgtattattaaccaacagaacttccttggcttctggatagtcgttattatccgccttttctttggatacaaccgctaccttagaacctctggattcccaacggtcactcaatgcatcttcttttaatgtcgtttcattcttctgataatgttcatcatatgatgtaaatccacctgtcttcgccgatgtctggcagccagataatgcgatcatcatgacggacatacaaatacaaattaattttttcattttatgctttctgtaaaaaaagaccgtcgtgtgacagtctatttatacatattcctccaatctaaatctcctcggtccagtgccaaaatcaatacttctgccgttggcagattcgtagcacacggaatattatactgatcacagagatttaaaacattataaaaatctggtgttctcttcttatttgccgggtcctgtaaaaagatcaagaggtctatttcattattggagatcttagatcccatttgctgcataccgccaaaatggccggcaagaagtttgtggatctttaagtttgcaacatcttcaatcatctgtccagtcgtacttgtagcatataatttatgtttttttaaaatatcctgatacgcgatacataaattctgcatcaggttctttttgccatcatgggcaactaatcctacattcatagatagaacctcctagtgtctttttctttgtaaatatatattaagtaccattcctatcgcgattgacgccgacattaaggaacttaatccataactgataaatggcaggggctgtccggtgttcggcatggttcctgtagcaactgcaatgttgataaaagactgaaatcccatataacacgcaactcctacagccacataagttccgatcagattccctgatttcttcgccacattcatgcactgatatacaaggcatgcaaaaacaatgatcaataccacacatccaacaaacccaaattcttctccgatcacagagaaaataaagtctgtctgattttctgataccaaatttacatcacttgcagatacatttgagatcgtattacttccaaatcccttgccaaatagtccgccagcaccaatcgccatgatcgaattgcttgtctgtaaagcagtggaatctgcgtaattctctggatgtaaaaaggacatgatccttgctacctgatgtggctctaacaacacctgtcctggtgtctggacataccacaaaaagattgctaaaagtggtacgcctacgatcaatacctgaacgatcaatctggaggataatcctgccataaagatcattccaagaataataaaacaaatatcgagtgtagaagaaagacttggctgtttcaagatcaaaagcagcgggattccacagattacagcaagttttcctaataccttcggttcattcagatcatcctgatgcttcgcaagaaatgctgcaacaacaatgatcatgatcactttactaagttctgatggctggaaagttcccaatggacctaatgaaaaccatcgtttggcaccattgacatcttttccaaataatttaacgccaatcaacatgatcacattcaaaatatacaatatttctgcatttcttgtaaagacctgataatcgatcagtgatacgaccacaatgattccaagtcccataatgatccccaatgcctgctttggcacataggatgctttggcactgtgaataaacaaaaggctcatcgccatcagtacaagtacgttaaaaacaagtttgaaattgtaattctgcagtcgataatttcgcaacatagtatctctccaatgttattttctaagctcacggatcggaatatttgcatataatgcaggtccttcggattcttcgctactttgtgtgatctgaatatcaagtccctctggatcgatctccatatatttggagattacttgaatgatgtcgtttttgatcagttccattgtctcaggagaacaatttgagcggtcagataccaataatagttttaatcggtcttttgccacttctcctgaactttttttcttaaaaaaattatcaaaaaaacccatcgtttctctcccctctacttcttaaatacgtttgcaagtctctgaaagaaagttggtcctgtgatttccatgaatggaacgtctttgcccatcacacgattacagatattctggtatgcttttcctgctggtgtattgcttccaaccaatggttctccctggtttgtggaaatgacaatattctcatcatctggtacgattccgatcaggtcaaccgcaagaatatcaagaacatcatctttggataacatatctccacgttctaccatatccatacgtatcctgttgatcaccagatcgatcttatgtatatcatttgcctctaatagtccaatgatacggtctgcatcacggattgctgatacctctggtgttgtaacgatcagtgcacggtctgctgctgcgatcgcattcttaaatccttgttcgattcctgctgggcagtcaagaatgatatagtcaaattcactttttagttcttctaccagttttgacatctgttctggtgttacggatgtcttatctcttgtctgtgcagatggcagtaagaaaagatttggatatttcttgtctttgatcattgcctgtttgattctgcagtttccttccacaacgtcaaccagattataaacgattctattctcaagccccatgacaacgtccagattacgaagtccgatatccgtatcgatcaatacgactttctttccttccttcgctaatcctgttcccacattggcagtggttgttgtctttccaacgccaccctttccagatgtgattacgataacttcactcatttttgtttcctccattcactatactatgatttcatttaagagcgctttagatatgggctcgatataaatattttcatcttctacaaatgcaatctgtgcttccatcggctgattgtcattattctttgatcttccgaaaagctttttcttcttctctggttctccatcggcacttcttgcgatgtgttttccgatacggatctgcatcggctgcatgtcaagtgctgcgacaaaagcgtgatcatctccatcacatcctgcactcaaatatcctttggcacatccaagaacaactacattacctttggcacatacggaagctccaggattcacatccccgaccactacaacacttgcatcagattccagactctgtccggagcgaagtgttccacggtagaactgtccatctccctttcttctctcatcaaccatggactgacttcttttttgttctctttcctgaatctttttcaatacatccttaaaagaagtttccatgatcttatcatcttctatcacatatgcaatcgtcaaagttgttttttctgcaatgatctgcagtacattctgaagttctttggcatctagttttctgccttcgatctttagtgcgatctgtgtctgtccattaaagaaatcttttgcctgcacaaatttatcttcgatcgctttgatcagttgatcaaacttcattcctggatctaacaccatggtaagtcccagactgtttcccttgagcaataccggctgattcatacaattcctctcttctttctctaatctcctgcagtaccaacactggtttctgtgactgatttattattcttctctaatgtcttctttgtcttatcatttgcaaaataatactcataaatatcctttgcagtcgctgctgcattagatgaggtatatccaaacggaataacaaccgttgttgtgatctctggcttctcatatggtccataagagataaacaacgcatgattcggacgtttcttattctcctgtgctgtacctgtcttacctgctaattttactttcatgccttggaagatactgcttacggagctgtcctttccgctgactacacctctcataccagtatgcactgcattccagtatgttgtatcataatgaagttgtcttactttcttaactccatatttcttgactgtctttccattatcgtcagtgatcttgtccatgatacttagatcatatacggttccactgttggataatgttgtcacataattcgcgatctggcttggcgtgaaactattacgtccctgtccaatggcagaacgtacggatgtttcatcagaaacctgtggagatgactcatccagttcaattcctgactgcttattaagccctagctgtgttgcgtatttctccaagtacttaagaccttctttactgctgtaggaacctgatttgtctcctaatctatatcctacttcataaaagaaataattacaagatgcttcgatcgctgttgacacagttcttggtccatggcgatctggatatttccaacacttcgccggtggtgtgatcttatcgtataaccctgtacagttgatgactgtacttgtcgtgattgctttctcattaagacctgccaaagcagacactggcttaaatgtagatcccggtgctgtcttatgtttcagtgcctgattatataatggtgtagatgctgagtttgccagctgcctgtagtatccggaatctgttccgtttgataaacggttgctgtcatatccaggataacttaccaatgcttttacctttcctgtcttggaatctgtgatcacaacagatccggaacatggatccataccgatctgtcctggtgtgatctgtaaactctttaactttcttcgaatgaaatcatagctgtttagggaaccagatttcaatgccgtataatcactgtcacctttcttttttaaaactccctgttcataaagaaggagacatacttctcttccgcttaattttcctttcatgatgctttgttcgcagactgtcatatcaaaatcatctgcatcaaccaaagcatcttctacataagcagccagtgctttcatgatctcttcagtgtcattgtatttgctgctgatattcagtgaagaaatatcaatccattccttgttcacggcataccttaagaattcacttaaactgatcttctcattcttccacttctgatatgtcttatccgtcgtatcgatagaacttgaaatcaatactttcttgctagacaacagactgtatac

SEQ ID NO: 662 - DNA, 4178 bp, Unknown
  gut microbiota DNA sequence
agtatgttgcgttccttttttgagataggtgcggatgctttattgtttgaagggttgtatattgctaaaaacaaatccctttgtgaagcgttattatcaacaaatgatttctatgatccgagggattttggttttacagatcatgaggtaaagaaaatactggatgattatggattgacatcacatttaaaagaaataaaggaatggtatgatggatatcattttggtaatgctgatatatattgcccatgggatgtcataaattatatagatcagcttaagtatgatcagtcaatggatccacaggatatctgacacacaaaggccgtacagaaagtggaaaataccatctggtaatttcaaaccgagagatcaggaatctttttgtaaagaagatcagagagtggttttcggatgtctcaagaaaagatggaaagacactggaggaattttgcagtgcatttatcaaaaaggattccaaaaagatagaacagatttttggagattatctctggaacacgatcagtataagggatacagcagttgccaaagaaaatttcatcaagtacgggattgcatgttataagaaattttctaaagtagtgataggggaataaaagtttatgtctgatacgacaaaaagaaaaaaaccaaatatgatccatatcggcatcggtattctgacggtacttttagtggtctttatcgtcattctgatgcagttggtctcgaacattcagggaacagcccgcgttgtaaattatgcggggttaataaggggagaaacacaaaggatcattaagctagagaattccggacagcgagaagatgagctgatcaaggaagtgcagtcctttatcgaagggctgcgtcatggcaatgaccaattaaaactcgtacggttaaaggatgatgattttcaggataagatgaaggaactggatgaatattttatttccttacacaaagaaatttatcgtgtgcggacagtcggctatgagcatacagatatcatttcaaagagcgagagattctttaagatctgtgatgaggcaacaggtcttgcggaagtatatgcacagagaaaagcaacgtcattagcaactcttgagaaattcatcacagcagatatcgttgtattgatgctgctgatcggatatgagtttattaaagcggtccgttttgcggcgatgaaccgtatattgcggcataaagcttatttagataatgcaacaggacttccgaataagaataaatgtgaagagatattaggtgaactgaatccaccagaggatattatcgtatgcagttttgaccttaataatctccgtcggatcaacgatagtatggggcatgatgcaggagatgcgtatatttatcggtttgctgtttgtctgcgatcttccataccatcggaacattttgtcggaagacttgggggagacgaatttatcgcagtgctgcaggggcttgataaacaagcggtgagaaagctatttgaagatcttcgcaaagatatagcagcagaatccaaagaacatcgagagattccgttaagttatgcagcgggttttgctatggcaagtgattatcctggcaaaacaatgagagaattattcaatgatgcagataaaaatatgtacatcaataaaaaccatgtgaaacgggaagaagcacttgaagagaagcggttgaattatcaattattaaaactgctgaatcaacatggaaagaactttttagactgtttatattgtgatgctaagctggatacatatcgtgtgatccgttccagtgaaaactttttcttagctttagatggtgcgtattccagtgcagtagagcagatcgtacaggaaaagattgggaaagatgagcagaagaacatttgggaaaggcttcagattacaagacttcaagagaagatgaaggagaaacaggatgtacaggaatatcaatatgatatgcaggaagaaggattctataagcgtatgacattgatcccagttgactgggatgaagataagaaattacatcattttcttctggcatttgaaatcatccgaaaaggagctgacaatcagacaggggccagagaacagttacagatttattatgaacagctaaaacaatcaatcattgaaaatgacagttatgtcgatgcacttttggaattatccgatgtgatctatacggtcaatctaaagacagatattctggagagaaatattattctaaagggaaaagagcaaaagaacaaagagatgtttcttgattatccattaccatgtaattatcaggattactgcgcagaatatgagaaaaaagtcacgaaggagacaaaagcagagtataatatgacaaatgatacgaaaaaactgctggagagatacaacaatggtgacacaaatatttctgtggaatattgttttcatgaagatgatggaagtattcgctgggtacaaaaaacaattcttatgacacagatcgtggtatacgatgaagagacaatgagcgagattccgacagtttatgcgatcatgctcttacaggatacatcgcaaagacataaacaagaagaattagaacacgcacgtttacaggcagcatttgacgaaatgcgtacagcaagtcaggcgaagaccgatttcttaagccgtatgagccatgatatcagaacaccattaaatggaatcattggacttctaaatatcaatgaaaaacatttcgatgatcagaaactggtattagagaatcataagaaaatggaaattgctgccaaacatctgctttctctgatcaacgatgtattgcagatgagtaagatcgaggaaggtcagatcacactggcacaccaagagattactgtgaagaaactgatgcgggaagttgagacgatgatcagagagcgggttctagaggcaggaatccgatggaactatgaagaagataacatagatgacagatattcatatgtatatgcaagcccattgcatcttcgtcagatcttattgaatatttatggaaactgtattaaatataatcatccgggtaatcatccgggtggaactatttctacaaagatggaacaaatggatgttcatgataagatctgtacgtatcgttggacgatcaaagacacgggaattggtatcagtaaagattatatcgatcatatttttgagccattttcacaggaaaagacggatgcccgaagtgtatatcaggggactgggcttggaatgtcgatcgttaagggactggtagaacagatgcatggagaaatcaaagtgacaagcgagaaaggaatgggatctacctttgtgatcacgattccatttgaaatcgcacagaagaaagaacagccagtggctgagaagatagtggagcaagcagatattcgtggtttaaacttattagttgccgaggataatcaattgaatgcagaaatcatacagacacttctgacggatgatggagccaatgtcactgttgtggaagatgggcaacgggcagtggatcaatttaagaatgctccacaaggaacatttgatgcgatattaatggatattatgatgccggttatggatggattgacagcgaccaaggagattcgatccatcaaacgagacgatgcagcacagataccgatcatcgctatgacagcaaatgcatttgaagaagatgcaaagaaatgttttgcagcagggatgaatgcacacttagcgaaaccatttcagattgataaggttgaaaaaacattagtacaatgtattcataagagtatataataaacaatatagtaaaaatctttttgcatgaatggatataattaaattgggtgataatattgtcattctaaaaaatgtaaaaggagacccaataatgagtaaaggaataaacagcagaaaagtagcagtgatcggaacaggatttgtaggttcatcttctgcatttgcattaatggaaagtggattatttactgaaatggtgttgatcgatgctgataagaatcgtgcagaaggagaggcattagatattgcccatggactcccatttgccagaccaatgaagatcacagcaggcgattatgatgatatcgtggatgcagcgatcattgttgtgacagcgggtgcaggacagaaaccaggagagacaagacttgatcttgtcaagaa

SEQ ID NO: 663 - DNA, 187 bp, Unknown
  gut microbiota DNA sequence
gttttttactctgtctgacactggaagaaccagatgttgcatttgatccttccggatctcatgtatgtgctattgatcttggaacagataacttcgcagcgatcgtatgtgatgattactcatccgcaatatacaaaggcggagctgtcttatccaagatccaatggttccataaacagagagcaaa

SEQ ID NO: 664 - DNA, 7683 bp, Unknown
  gut microbiota DNA sequence
tcaatatgaataagatcaacaaccagaattttgtctccatgccgatcactctcctgcggacaatgatcacatataaagctctgaatgccggcatcagaatcatagagcaggaagaaagttatacttccaaagcgggtctgatcgcaaatgacaggatcccaacctatggtgtcgatgataaggatgcttcgttttctggaaagaggatcaaacgtggtttataccgttgctctaacggaatgatcttaaatgcggattgtcacgcagcagcaaatatcatgcggaaagcgatccctgatatctggaaagataccagagattatacgtttctttctgctcctgatgtgtatggattccacaaactgaatccgaaaggtattcccgtcaaagggatagcggcataagtgaatatgccttgattggtacggacagccaatcttttggtcagaaatgggtaactgtcacgactgttagaagccacttccatagaaactactgtaccgcatgggaggggtaattcaccatttgataataatcatgtgtcaattgagaaagatattcttttccagcgggttctaaatgatagtaaactctggtttggcgtttcccaactttaacctgccgatcagagatatatccttgatcttgtaatttataaagaattggatacatggtaccttctgcaattttgatttgtccgtttgtgatatcttgtatggattgtgttagttggtatccgtaacagtcttctttttctagaatttttaaaaacagcatttcaattttataaaaacttttctttgccatattttctccactacttaataaattttctatgactaattgtaatattatatatatgataaaacaatacacaaattatataagtaatagttgacaataatacatagaaaattgtataataaaataaataatatattaaataataaagtatatagttaaacgtaaattaacatagtatttatgaaattagaaaataaaagggggggggtacgaaaaataagaatcggtaaaaaatccatacaatgaagaaaatcctggattatattgtatggaagaaaaaggggtaacataaacatagaaggtattaaagtaaataaaggaggaatatgataggatcaaatctaaaccaaaaatgattgtagcgtttttattaatgagtgcaatattaatgatgtctattcaaacaagtatggcaacggaaaaagatattatgagtaacgatgtgataaaacaagcatttgataataacgtgaataaaataagttgtattccagaaactatagaaacgatagaggtatatgattcgagattagatgaaaaagaaattattaaaccgcagtcagcaaaggcttcttatgattattataaaacatatcgaacaggtgtttcaggtgcatatggagcgacaggatattcaaaaccatctgtaacggtatcttcatggtcagcaaataaaatgaaatttaaaggtacatgaaacttacagctgggggaacatatactatgacaggaactaagactatatcgttaccatgatatatggctatgaggaggtgttcatatgtcaacaaaaaataataagcttcgatttattgatgaagaaaaaacaaaggaattacaaaaagattggaaaggatatggaaaatctcaagtattatttggaattgtggtttttgtgatttttgtgttatcagcattatattactatattttatagattttaagtttttaagtaagtggttatggattttcatggaagaagtcatctacaattacaaaacgtgtgattgatggtggcagaacaggagaaattttatgtttaggagtcataaaaaattcttctggttttacaaagcaagtttcgctgtcatttgaattttattgcaatacagggggaggaattgaagttcgttaaattctgtagagcttaagttaatctaatagcaacttaatgctggagaggactgtcattatggcagtccttacttatttgtgtgccgagcatggcactaatctcgttggtgcaagtccagtcatgggtatttaccgccaagtgtagcgaactacaagtcagtactagtagttgtaaatcaagaggttgtgggatgaaagattagtgtcttacctcttattaatcctatcaataagtgaattaacactttcagctaattcctttttcaaatccccaaacatttctctaatagccactttctttcgaatcaaaaataaaccaatcacgatcaaaacaacaacaggcaacatccatcttaatgcacccatccaaaagctggcagcagtacttccacgatagcttaattccaaacgatttccagtcaattcaaaatcacaaagatcatgaatattctcatccgacttgatcagggcagagactgctttggtagatgtattctgttttaccgtatttgtcacaatcttctcaggcataacagctacagtaacagattctttcgaattcacagaagcaaatacataatgcccatgaagtttctcaccattttgattcgcaggtaatgaaatcttatcagaaaatgtgaccttcttaccaccagcaaatgaaaaatgcgcttgtgatttcatcaaactattcggaaacaaagcagagaaatccttattacagtctgaaacacttcctttttgtacaaaagataacgtaacattctgatcaccatctaaatttacagaatcaatggtttgtcctttgaactgctttttgatcacagataactgatggtcagtcacagccttttcaaaagaaaaagacactttacgacggatatctttggatgtgttccataccgtagcaatctcataagttgaaattggctgtgtaacagaagaagtaaagctgatttctttttgtttgatcgaatcactaaacatctgtttttcatcaaatgtataagtaacaggaatcttttggtttttctgaataaaatgagagagatccagagattcttcatagttgatcttcagtgtaaaagggttgtccttgctgcatgtggagctgtaagttccaaaagaattctttgaatgaaggacagttcttgttttctgtgcaagatcagagaaattgttggcgtcaaaactgatacataaagtttttccatcggatgtattttcccaagtgatatcatttccagcaaaataagaacggatctttcctgcattttgatctaatgtttgttgtggaagatcaaattctatcactcttgcaagttttccagatttctttgtctttgtatcaatatgaatggaagataatggtacataagccatttcatcaatattgatcttatctttcgtttcataagtcgttccaaggaaagaaatctccgtactttttaaatcccataggtcagaagaggagtctttgtcaatatattttccctcatacaaagccgtataaagccatgtcatcagatctttagatgtgaaattttctttgtaaataagaccggaaacaaatggggaatctccatattcataagtgatctctggggaaaaattaagaagatcacgaactttcttcttataatcatcaagagaagaaaaacgaagatagaaagtatacgtatcgtttccgtcagaagaagatgaagtataagtaagagcatccgggcaggattctttgatgagtttattaagatcttctttgcttcccttgaaataactatgaaaatcgcgggaagaaaaggtacaagacatcactcttgtacctgaaaagtctttatttaattttactgtactggtaagattcacaccgcacccgcataagagaagcagtgagaacagtaatccaaaaagaaaaacttttttcttcataagggtctccttattatttgagattagctaaataagtatcattgatcgcgataacttttttcatagcatcacgtcctggagctccgatcgtattacgtttttcaacgcaagttttcatgctgatggcatcataaatatcttcttcgaaagcagggctgatcttctggtattcatctagaggaagttcatctagagaaatatgtttatcaagacaaagaagtacaagctgcccaacgattccgtgagcatcgcggaaaggaacaccgtgatttacaagataatccgcagcatcagttgcatttgtaaatccgtgttttgcacttttttccatctgtggtttgttaaatgtcatggtattcatcattccattaaataaagaaatacatcctttgacagtatcaatcgcgtcaaatgtaagttctttatcttcctgcatatctttgttatatgccagagggattcctttcattgttgtaaggatagaagttaaagctccatagacacgtcctgtcttaccacgaactaattcagcaatatcaggattctttttctgaggcatgatactgcttcctgtactgaatccgtcatcaatggatacaaatttgtattcgttagagttccagatgataacttcttcactgaaacggcttaaatgcatcatgatcgtagatagagcagataaaagctcgatcacataatcacggtcagatacagaatccatactgtttaatgtaggaccataaaaattaagcaaagaagctgtttgttcacggtctaatggataagtagtacctgcaagagcaccagctcctaaaggacagtagttcattctgtcataaatgtcagttaaacggctgtaatctcttttaaacatttccatgtaagcacctacatggtgagtaagagtgacaggctgagctttctgaagatgtgtaaatccaggcataaatgtatcaatgtgttctttcatgatacgatgaagtgtttccattaattcttttaataaatatttgatatcaacaatttcatctcttgtataaagtttcatatctaaagcgacctgatcattacggcttcttccagtgtgaagtttctttccaacatcaccgatgcgatcaataaggtttgcctctacaaagctatggatatcttcatattcacttgtgatctcaactgctccagtttggatatcctttgaaattccttttaaaccatcgatgatctgatcacgttcttcttctgttaatacaccaacacttgcaagcatcgtaacatgtgcaatacttccgcggatgtcttgtttataaaatttctggtcaaaggaaatagatgcattaaagttgtaaactaactgatctgtttcttttgtgaagcgaccgccccataattgtgccataagtgtttcctcttttctgtatatatttttattctttatcataaaatcaaatgaatttacttttctattctacatgaaataactcgattttgccacaaattttttgcatcaaaggggaaaaatttatttttgatactctcatcatatagattttttgaatttaagatagaatagacagagaaaaattaacgcacaataaaaagaaagttatgaaaatgggcggtgactatgaaaaagagatatcagatagaaaaatatacaatcctgtttgcgattggaggaatggcatattttttgctggaagttttagtacgtggatattcacattattcgatgtttttatgtggtggggcatgtttcctttgctgtgggcttctaaacgaaaatgtaaagatcaagataagttttattagtcagatggtattatcttctgtgatcatcacggtattagaacttattacaggttttattgtaaatatatggcttaagatggatatttgggattattcgcatcttccatataactttaaggggcagatctgtttattgtactcggtattttggtttcttatttcaagtgtagcaatcgtgctggatgattttctaagatacaaattattcaatgaagaaaagccacgttataagattttttaagaatgtagtataaatagcagttcacagggaaagctatcgacatttgagggaaattctgttaatctattataggtacaaatagtagattggaggaacaacaaaatgaaatttacaatgggaaggacaatgaagatccttgtagcaattttgatcgtagcaatcattgcgatcgttatgctctcaccatattcttttgaaaaatatacagcatcatctaaaatgattcaggttacttcgactgatactgtaacaaaagatgcaaatggtaagaaaaaacagcaggtatattcatataaaaaagatgataaaaaatacacagagatcgttaatgttttagatcagtattcttatcattttacaacaaagacattaactaactcatctcagatgagtgattctagtaagccacagatgatcatgttatttggaaataaaatgcttgtgatcagtgattcaggagaaatccttctagataatcatgtataccgcatgggatattctggtggaaaagatgcgaaaaaaatgatgaaaagcatcaacaagattttaaagagtgaataaaatataataggggaagatatcatgggatataaacgtctttataaaaatttgatcgacattatcaaggaagaacaggcaaaattgggatttcgaagagaaagtatccgtctgtactatccactaagttcgttaaaccatttttttgaaacacaggatacagaagaacagatgaaaaacagacttcatggaataccagattttatcaaagaaactttaggagatatcaaagttactagcaaaaaagaaagattttgcttctatattccagaagaaggcagtaactacgtccatgaaaatacaaacccaaatgaatttatcaaagaactggtagaaatcgttggaaaacacggatgtaaaatggaagatattattgcgttatttaaaaaacatgataaaaacgtgtttgtagaagaaattcataatggagaatttgattatctgatccgtttttcagaagaaaatgaagatccatattattactgttttcacgatgaaggatgtcacattatctatcaccgctttttaccagaagattatgaagatttcggattttaaagaatgttattaagaatacatataggaggaataagtcatgagtgaattattagatatgattaaaacaagaagaagtatcagaaagtacaaatcagatatggtaccaaaagagatcattgataagatcgtagaagcaggaacttacgcagccacaggaatgggacagcagtcaccgatcattcttgcagttacgaacaaagaagtgagagataaactgtctaaatggaatgcagatatcatgggaacagacaccgacccattttatggagcacctgttgtattggttgtcttagcagacaaaaaccgtccaacggcagtctatgacggaagtcttgttatggcaaatctaatgttagaagctcatgatttaggaatcggaagctgttggattcacagagcaaaagaagaatttgaaagtgaagaagggaaagaattattaaaatctttgggaattgaaggggattatgttggaatcggacattgcgtacttggatatgtcgatggagagtatccgggaattcctgaacgcaaagataattgggtgtactatgtagaataaattttaattttgtaagttggccaactgtagtctttcagtatatgataaaaaataaataagcaaccgaaagcgatgcggtggaattttgctc

SEQ ID NO: 665 - DNA, 143 bp, Unknown
  gut microbiota DNA sequence
tcgtccaattgggctgcgaatttgttcaaaatatggcaaaattccaatgctgcgttttcggttgcttatttattttttatcatataccagaagtctaaagtgtggacaattacaagattggaaaacttaagtgggtgtgtatg

SEQ ID NO: 666 - DNA, 28921 bp, Unknown
  gut microbiota DNA sequence
tataggtataaaacatcatatatacaaaaaaaatcccgaccgcaatagttacacttattaataacatccacattaattgattgatattctcacacctttgtatctgcttaatagaaagataattttttccatctacttttaaagataacaccattttattgtcatttatcaaatatgttattttcttattgtgttttatttcattaggaatttgtggatatttagggaattctcgctctcctattaaaaaaacaggcccaacataaatatccctttatcctcggcttttatttatgttgagtctgttatttctttattcagatagataaaaaactaaattattcaatagaaagaatctccatattcgcctgtccttccacagctccatatgtaaatgtgatcttagttccttcgtccatatcatttaatttattcacaagttcttcatcattcaccataaatgtctggtaacttccgtcagacatctcaatctctacagaacttgtgtctgcaaatccattataagtacctgttgcactctttggtttggcctgttcatctttctttgttgctgttgttgtctttgtctgttcttttgtgctttcttctgatgttgctgttgcaactggtttttcttcttctgtcgtatctttttctgtgttttcttctgttgtaggttctgctgttgtcgtttcgctgtttgttgattcagggctgcttgggctcttctttccgcaagctgcaaatgtaaatgcgcttagcacgatgattgttgaaattaataaaaatctttttctcatagttcatgtactcctttctgagataagttcagtatatcctatttatactttcatggcaagtttctatcatattcctagtcttattttcatatcattagaggtagaacataaaggaggatctatgttgaacgaaaaatatcaggcactactggatcaatatgatatttctgtctctcatactcgacggggccgaggctgtgttttgtgttttggggaaaatgatgtctatgctttatcccagacttctctatcagaagaacgtctttgtgctgtttctgaatggactttggcaatgcatgaccatcatttttataaaaccgaccagtacattttaaataaagacggatattttcttacttttgaccggtattacgaaacatttgcgcttagaaaaacttatttgggtacggaatgtgatattcatgctttaaaagatatcagatcttctgcagaaaatctcgcaagctttcataatcattgtcttgctatttctttttcatctgaaaatcttagaaaatatacatccatttccacatattatgagcaaaaatatttggaattaaaaagtattgcacgttacatacgcaaacgcaaaaagaaagggatttttgaatatttatttttggaacagacgaaagccttctgggaacagatggagcgttccatccaaatcttaaatgaaaccacaccttctcgccgtggatggtgtcatggggcttataaccaccataatatcatcatgacatcctctgcccctgctacgatccattttgaacatttttaccatggatatccgattctggatgtttattatttcctaaagaaggcacttgagaaaaataattataattttgccttttgtgaaacctttttatcaaactatgaccgctttatgcctttgtcaaaagatgaccttttatgcctgtatggattgtttttatttccggaaaaattctggaagatctcgaatcagtatatggcacacaaaaaacattggatttctccacgatatatcgagaaattagaggagtttattcacaataaagaagctcgctcgattttcctcgaaaaatatgtacaaatttataatgttttttcatgagttttaaggtataattaaacaaaaggcatttttataacttaaaggaggagtaatttatgaactacaaagaaacttatcaggaatggctttctaatccttattttgatgaagatacaaaaaaagaattaacagctatcgagaacgatgaaaatgaaatcaaagaacgtttttacgcagatcttgcatttggtactgctggacttcgtggaatcatcggtgctggtatcaaccgtatgaatatttatgttgtaagaaaggctactcaaggattagctgattatatcttagaacagggaacagataagaaacgtgttgctatcgcatttgattcaagacatatgtctcctgaatttgctgacgaagcagcccgcactcttgctgctaacggaatcaaagcatttatcttcgaatccttacgtccaacaccagaattatcatttgccgtaagacatttagactgtatcgctggtatcaacgtaacagccagccataacccacctcagtacaatggatacaaagtatactgggaagatggtgctcagtttacagatcctcatgcttcaggtgttacagcgaaagttaatgcgatcactgacatttcaacttgcaagacaatgtctaaagaagatgccgtaactgcaggtttatatgaagtgatcggtaaagaagttgatgacgcttatatcgcagaagttgaaaaacaggtgatcaaccaggcttccatcgatgagatggcttccaaattaaagatcgtttatactcctctccatggaacaggtaatcttccagtacgtcgcgtacttgacgatcttggatttaagaatgtatatgttgttccagaacaggaacttccagatggtgacttcccaacagtcagctatccaaacccagaagcaaaagaagcatttgcattaggtcttgctcttgccaaagaaaaaaatgctgatcttgttcttgctactgaccctgatgctgaccgtttaggtgtatatgtaaaagatgctaagagcggagaatatattcctttaacaggtaatatgtctggttctttattatgcgaatatgtattaagccagaagaaagaaaaagctggatctcttccagcagatggtgctgttgttaaatctatcgttacaacaaaccttgttgatgagatcgcgaaggcttacaatgtgaaactgatcgaagtattaactggattcaaatggatcggtaaagaaatccttggatttgaacagtctggaaaaggtacatatctgttcggattagaagaaagctacggatgcctgatcggtacatatgcaagagataaagatgctgtttctgctacagttgctctttgtgaagctgctgcttactatgcaacaaaaggtaagacattatgggatgttatgatcgacatgtatgagaaatacggatactgtgtagacagcatcacagcaatggacttcccaggattagaaggtatggataagatgaaagctatgcttgctaatttacgtgagaacccattaaaagatatcgctggttataaagttcttaagatccgtgattacagcaaagatactgttcttgatgtagaaagcggtaaagtagaacctacaggacttccttcttcagatgttctttattatgaacttgaaggtggagcttgggtttgcgttcgtccttctggtacagaacctaaaatcaaattctactatggtgtgaaagcttctagtatggatgaagctcaggttgaaagtgctaaatttgctgagtgggctaaggctcaggcataaattctgatttgaagagtagtctttagtatatgtgacagaaataagataagaacaaatatttataaaaaaccgatggcaacacgcatattttaagagcgttttttacaaatcgcctatccgcgcctgttcctttgaaaactccctcgctgcgagccgaaatgcccgcagctacggtcagacattcaaccacagggcgctgcgaatttgtaaaaaacgcacttaaaatctgctaatcgttgccatcggttttttataaatatttgttcttatcttatttctgtcacataaaactgaagactattcaaaccactacacagtgtatatgttaaacggtattggtcaataagttttgtattcgttgacggaagatgaaaggaactcttagacacctatttggcgagatgtttgaaaaaatttttaacttaatttctacgagaccttaagaagataatttctctgggtggagaaatacgtcataattcacttactacaactggtcagattgccgaatcgaatctgaattcattccagcttgactgtgcttttattggagttaatgctgttgatgaagaaggaaatatctttttaggaagtatggctgaggcatcaattgtacgcctgctctgtcacatggttcctgaaatctattttctcgcagatgaaaccaaacttatgaagaaagattttatctacatctgtcaacttggaaaaggtcgcaatcttattacgaattcttcaatctcagaaaaatgcattcatacatatgaacaactcggtgcctgtgtgatcacagaaagtcaaaaagaccggagataactattcccgttatctccggccttttcatttcttgtaattatttactctttgcagctgttgttgtgttcttcgccgctgttgttgtagtagttgttgctgctgtagatgctgttgtagctttatatttaaacttaacttctttccacagatcctgatctacagacttcttgtcatcccacttcttgtctgcatcttttgtccacttcttgtagactttctcgtatgctgcctgctgtttttcctgaagcagtgtggatttgtttgatgcagctgctgttgtgtcgtttggatttaacatcttgatgatcacgtatgcatcgtctaattctacgactccgcttacctggttcttcttaagttttgctgctgctgtttcgaattttgttcctaatgcagcttttccttttgtataggattcttcgttgtcagagtttacgctgaacttcttagctacagagctgatactctgacctttcttgatcatctttaatgcggattttgctttctttagctgatctttcttctcagcggctgtcatgtctttttcttttcctgtcttgctgtctgttgtctttgttgtgaaaacaagtttgtagactttaacagttttggcttcgtcatctgttactgtaacgtttgctttcttgatgattgcctgcataactttacttgcgattgtgctttcttcgtacagtttctggatcatatctttatctgcttctgtcttcttcatgactttcttacctgttgagtcttttgcgaaggcagttacgctttctttgatctgcttcttctcagattttgttaacttcacgttgtagtcgtctgcgtgtgctgctaaaactttgatctgttttaactggttgataacgctgtctttgacagactgctgcattgtgatcttctttcctttgctgtctgttccgacctgcatagaccacatgctgtctccgaagtatgctccgtactgagcttctgcctgatactgcatgattcttgcatatacatgtgcttcctggaatgttacttcttgtcctgcatattcaaataatgtcttctcattcttgcttttacatcctgtaaataaagaaagagttaacgcaagaactgcagttaaacatagcaacttctttgctaatttcttcatttcattttctccttcatattatgattatattaggctaatgtctggcgatattatagcacaaacttattggattatcaatgaattgagcgagttcacacaatgttcaatcttttctaactgcttcactttctttgtctttgacagatccagtacaaatgtcggattcttgcctgcctggaaggataattcacgtttgtattcttctaataccactggaattttttctacgtccacggctgcatctggtttcatttcaaatgagactttttctcctttttgtttcacatctgtcatataagcgtggtgtgctaatgatttcaaatatgcaacatataacagattgtagactgctttcggcatttccccaaagcggtcgatcaactcatctgtcatatcttccatttcatctttggattcaatagatgaaatacgtttgtataattccagtttttgatattcattatacacatacgttgatggaataaatgcattgatgtcgagatcgagtgttgtgtcaaattcatcctcgtcttttaattcgccttttaatctcaagactgcttcattcagcatcttgcaatacagatcgtatccaactgcttccatatgaccggattgtgcctgtcccaaaagatttcctgctccgcggatctccagatctcgcattgcgatcttataaccggatcccagatctgtaaattcccggattgcctgtaatcgtttttctgcggtttcttttaacagtgtgttttttttgtacatcaaaaatgcaaatgcatttcgattcgatcttccgacacgtcctcttaactgatacaactgggacaacccaagctggttggcatcgtgaatgatcattgtgtttacattcggaatatctagtcctgtctcgatgatcgttgtggataccaatacatcgatctcatggttcataaatcccatcatgatctcttccagttcgcgttctttcatctgtccgtgggcaaatgcaactttcgcatctggaagcaatctctgtaattcggctgtcacttctgcgatattattgacgcggttatacacataatatacctgcccgccacgtgtcatttcgcggtagaccgcttctttgaccagttcttcattatattccataacatatgtctggatcgctcttcggtcatgcggtggttcttctaatacactcatgtcacggattccgatcagactcatatgcagggttcttggaattggtgtagcagataatgataagacatcgacatcttttttcattgtcttgatcttttctttatgtgtcactccaaaacgctgttcttcatcaattacgagcagtcccagattcttatactgcatgtctttggacaataagcgatgcgttccgatcacaacatctaccgttccatttttgagtccttcgatcgtctctttctgctcttttgctgtacaaaatctagacatcatgcgtacggtgatcgggtaatcatgaaatctctgtgcaaatgtattgtaatgctgctgtgcaaggatcgtggttggtacgagatacgccacctgttttccattgtctactgccttaaatgctgcacggatcgctacttctgtcttgccatacccgacatctccacagatcagtcggtccatgatcttcttgctttccatatcccttttcgtatcatcgatcgcatttaactgatcctgcgtttcatcgtatggaaataattcttcaaactctttctgccatacagtgtccttgtcatagacatatccttcttttgcctgtcttagtgcatataactgcacgagttcttccgcaatatctttgacttgacctttgacacgtgttttcgtcttcttccattcatttccacctaatttatgaagtttcggctttcttgcatttgcacttgcgtattttgcgatctgatctagggctgatgctaaaataaataaattatcaccgccctgatattcaatactgatgtaatccttttcaaccccatctgttgtgatcttttcgattccgcggtaaataccgactccatgtttttcatgaacaacgtaatcaccgatattgatatctgcaaaacttcggatcttttctccttgttttttcttctctttctttcggcgctttttttcttctcttcctttgaaaatgtctccttctgagatcaatacccatttggctgccggatattcaattcctgtcagaagctttcctgctgtgacaacaatctgccctgcttccactccatatttcaagtccttatcatatgtcacaaccaaaccattttctctcagatcactgcttagacgtttcgctcttgtaacagatggagaagcaacaacgatcctgtagtccttactctgatatttggtaagatctttgactaactgctcaaaactgttgttataagactgaatggattttgtatccataaataagattctagcaactctaaaatcattgatctcagcagataagatcgaataacatagcatcttatgtttctcgatctgatataaaatactctcataatttgtcaccgtatttgcctgtttaggcaaaagatacccaccttccagacggcttttcatactctctgagaattccagataaaatgcatctgcacgttctctgatatgttttggttcatccatatagatcatgctttcttctggaaaataatctaagatgcattctgtattttcataaaaatatgggagataaccttctactccgatcaacatatgaagttcccttaattcctcacgaacacggtccatttcttttcttaggcgggcttcctgatcatattttttttcttttttaaacttctgtgataacttctcataatcttcttccatatttcgaagaccatgttcaatccttggctggtttaaaatgatctctgatgccggataaatggtcagagtatcgacttcttcgatggatctttggctttctttatcaaaacttcggatcgaatcaatttcatctccccatagttcgatacgatatgggctttcctgcgtgtatgggaaaatatcaatgattcctcctcgcacagcaaactcgcctggagcctcaacaaatggtgctttttcgtagcctctggcaacaaattcttctgcgatcgttgcctcttccagtgtctctcccattttaaacgtcatcttatgattcttgatatcacttaatggaacaacctgatccatcacagcatcgatcgtcatcacaaaggttccacatttgtcatccacgatcttcttgattgccagcatacggtctcttgcgattgcatttccatgaacatcggctgtatagaataatggatcttttgctggaatatactgaaccttttctccaaagaaatgacttgcctcaacccattgtcttgctttgttctcgtctggtacgatgataatcttaaattgctttttcttatgatttccgatcagactggtcagatgccatttggctgtatcggtgcatcctgatacaagaaccgggccacagtaatcttcgatctcatcctttaattgtctgtataccggatcgtcttttaatatatgttctaacactttctatccctactttttcttattgtggcggttcatcgcttctgtgatgtcgcccataacgatcagctgtactgcatcgtacacttcatcaaaacgttccgcaaagattgcctgttcttcttttgtaaaatgtcctaatacataatctgccagatcatatccttttggtttctctccaacaccgatcttcacccttgggaaatccatacttcctaaatgactgatgatacttttcagtccattatgtccccctgcacttccctttcttcggatacgcagtcttccaacatcaaggtcgatatcatcatgaataatgataaaatcttctggctctaatttatagaaatccatgattggacgaagactttccccgcttaagttcataaatgtctgtggtttcacaagaaggactttttctcctcccatataaccagttccgatcaatgccttgtgtttccctgtatttatacttatgccttctttgtctgcaatataatcaagggcttcaaatccaatattgtgtcttgtgttgtcatatttctttcccggattccccagtccgacgattactttcataagatatctctcctttttccatagaatctataaaactgacaaacacccggaaatcaatggattcccgggttgtctttttctttctttagttatagtatatcccaatttacaattctcagcaagattttttctagttataatgcctgaaagaattctcttgtcttatttaccttcttcatcaatgtatcaaactgttctggtgtcagtgactgtggtccatcacataatgctttggctggatcattatgaacttctaccattaatccatcggccccagctgcgatcgctgctaatgccattggctctaccatatctctgattcctgttgcgtgagatggatctaccatgactggaagatgggatttcttcttgatcatagggattgcagaaagatctaatgtatttctcatggctgtttcgtatgttcggattcctctctcacaaaggattacattttcatttccacctgccataatgtattctgcactcattaaccattcttcgatcgttgctgcaagtcctcgctttaataagattggtttgttgatctttcctaattcttttaataattcaaagttctgcatatttcttgctccaacctgaatcaggtccacatcttcgaataatggaagatgacttgcatccatgatctctgtaacaactggaagtcctgttgctttcttagcttctaataataattctaatccttctccatgaagtccctggaaagagtatggggaagttcttggtttgaaagctcctcctcttaataatcctgcaccagaattcttcacatcgtttgcgacttctgtgatctgttcttttgtctcaatagaacatggtcctgcgatcacctggaagtctccaccaccgatctttactccgtttacatcaacaactgtatcgtttggatggaattttctgttggccttcttgtatggctcctgaatacgctgtacattttcaacgatgctgtttgccatgatatgacgcatatctacaacagatgtatctcccactaatccaaggatccttgtgttaacaccttcggattcgtggattcccagtccctgctcttccatctctttctttaatgcgttgatctttgcttcttctgcctgtttctttaaaataataatcatgatgttcgtcctttcctggcaagtcgtttctatcctgcttctctggtgcggcctttgcttctttgagtaaaaagaaaaggcatgcactctgttgcaagaatgcatgccttaaatgttttactctgtcggtttaaagtgacataagttttggcgatgattcattgcaacaaaaatagtcaggataaaaataataaccctgaaagctaaagtaataaaatgtgcaattattcatcttacttgttgtcatcttagtttctccttgttttgatgtttttacgatacatgaaatttttttctgtgtcaatagatttatagatgttttttataaaatccatagactgtatttatgatttattttatgaattataaaatttattttttgcgcactgcaagaaatgatgcgatcaatgctgtgatcggtactgttaatacaacaccaagacttccagataatccttgcatgatctcaattccgatcacataagagttcgctaactgtctgtagcttaggtcatatgcgtaattgatcactaatgttgtcattgcaccgcccacataagcaaaaatcagtgtattcgtcatcgttcccatcatatctcttccaacattgattcctgatacaaaaagtcgtttcatggacagtgttttgtctgtttcataaatttcctgaatcgtagatgcaatggacataccaacgtccatgacggctcctaatgctgaaatgatgattccggcaaaaagcaattctccgatctttatctttgtattttgtccgacatagttcaatgcttcgatatccgatacattatatcctgtgatccctgctgcttttccaaatgccatcgctgccactgctgcgatcacgactccgatcgctgttccaaggatcgcagacactgttttgctcgaatatccaccaagaagtcctaatgttacaatcgttgtcaacactgctacaatgatcgtcaacacgatcggtgaaattccccgatacatcatcgggaacatgataccaatgatacatgcaaacgcaaatacaagactcaaaatagcataaacgcctttcttcccgccgatcgcacataccactgccgcaaagatcaacacaaatccatagatcgccatggtacggtcctgactatatacggtaaatcctgcatttgttccacttttatttacgatcacgatgatccttgctcctactttacagtccgctccaaataaagttccgcttggattgattgcctgtttttcttttcctttgtaggttcccgttgtcattttgaccagaactttctgcgttccataacgacttccgtcttctgcaagattatctttgatgatctttgttacaactgctttttcatatttttgtcctttataagatgccaatggcgttttctgaaactgattgcatttgactatgatccctgcaaataaacacactgctattgcgaggatcaagatttttttccatgatactgctttttccataagttgtcttctttctataaatcgtagccttttatttataaagaaaaatcagagaatgcctgtgtccggatctatcattccgggcgcaggcttttgctctgtctgataaattaagttacgacactaattctttatcatctctatttgattgttgcttttttggctgtgctgtaggctccataaatacgtttcccatttactgttttgtaagaacggactttgacgtaatattttttcccttttttcagacctttgatcttgtaagatattgttgttttcgcttttcttactgtctttttacctgtaaatttcttgtttgtagaatatacaacttgatatcctgatgctttcgtattctttttccatttgatcgttagctgttttttgatcttatttactaaagagatactctgtttctttggtgctacagtcactgtaactgttttggaagctgctttgtagtctgtagttgctgctgctttgactgtgatcttggcaactcctagtcctttgactgttacttttcctgcggcatcaactgttgcaactgctttatttgatgttgtgtaagtgagttttccatttccatttgtttttgcatttaatttaaatgctttggatgtttcactcttcttataagatgctgttgctgtgatcgtctggttttttgcctgtactgctgttgtatcatctttctttgttgtatttgagttcgcatcatcttttttggtatcttctgctttcttcacaatcttatatgaagatgatccgtctaatacttttcctgtgtccgcatcgtatgttgtaacttcaaaagagtcatctgttacattgactacagaataacttggtgtccatgtctggcttctctcagaaatgaaatcctgttttgctgtgatcagattgtagaatttagatcctgttgctgagtttgcttctaaatatacagttccttttggatttacaaccgttccaccttttgttgtatcaacgatttcgtagcagttgttttcttttgcgtaatttgctgtattttctgtttttgcgaatttatcatgtgcctgtccatcactctgtaactgatatgttctggagtatgtatggtcatgtccctgaagtacaacatcaatatcatatttatccattaatggtgttaactgtgttcttaaaaccattccgtcagaatctgaatgatcatatcctgatccataaatgtcctggtggaacattacaactttccattttgcatttggattttctttgattgctttacgcataacattttcgtgagttgcacagttgtaattgtttgtgtctaatacgataaataatgtatttccatatgtgtaataatagtctgttcctgctgctgtctttccttctgtatactttgctttatttctatatccacttgtatcaaatgcatttggattgttgtaatgcatctcatactgtgctgatccagaatcgtggtttccgatcgttgttgctactggaagagatcttaaagcatctgctccaaggtaacctgcatactgtttttcattgttattgttatttacctgatctcctgcggatgcaacaaaacttagatttggattctgttttaccgcgttatttaatacgttgttccagttataactatcatttcttgctgcatagttattatctttcatcgcatctccttcagtacttgtctgtcctgaagatgctccaatctgaggatctcctacatataagaaagaataatttttaaatgattttatagaatatttctgtacatcctggtattttccgttctggaatacctgatagtagtaagttgtattttctttcaggtcatttacagatgctttatttgaatagtactgaacaccttcgatcgctactgcctgtgtctgttttccttcgacttcttttgcatcagacatatctgcttttgttgcgatcttaacttttggtgtttcttctgtcttgctgtagtatgcaaaattaagctgtgattctgtcgctcctggtgttaaagatacattttcatagtttgtgctgtatttatcccagtttgctttccatgtggaccagctttctgttttagaagcagatgcatcattccaatgttctgtcgctgcgctgactgttgatgaaaggattggagatgccatcataactccgcctgctaacatcatggctgatacagttgcttttgctgcatatttttttgcatttcttgctatgtttctgcgaattgttctcacaataagatcctcctttgatatagtcaatcattctctgttatgtttaactataaacttgtgagattaaggaaaggtacatgggaatgataagtttttgtaaaattttttaattgtatgacgggaatgtgtcgagtattcataaaaagataaagaaagatagcggtacgaaaaacgaattccattgacggattttttgcaaaacgctgatccgccaacactcctgcacaactcactacgttcaaacagtgcccgtgttggctgcgattttgcaaaaaatcctatggaattctaccatttcgtaccgctatctttctttatctttttatgaatacctgaagacattcttgtataaaattaataaaattcaagctgatgggtgtatgttaaacgttatcgttttttaatttttatagaagcagacagatattattaatgctaatacagtaaaacatacacactgtgtagtggtttgaatagacttcatgtgtatatgacagaaataaaagaaaaacaaatatttaaaagaatgcggagttgccaccggattcttttaaatatttgtttttcttttatttctgtcatatacatgcaagcctacatacaaaaacgccaaagacattattcacggaatgtgatttctcctgttttctcgtccatagcatctacgatcgcaagggattctaagtgtgtctgttttcttaagaaatctcctcctggctggaatcctttctcgatcacaactcctgctccgaccagttctgctccggaatctttgaccaatttcgctaatccttctaaggctttaccgttagcaaggaaatcgtcgatcagcaatacatgatctccttctcctaagaattctttggatacaatgatgtcgtagactcttccatgtgtgaatgattctacctttgttgtatatacatctcccgcgatgttctttgtctgtgttttctttgcaaatacgactggtacatcaaaaatctctgccacaacacaggcgattccgattcctgatgcctcgatcgtaaggatcttattgatatcttcgccttcaaaacgtttcttaaattctttaccgatctcacggaataattttacatccatctgatgattcaaaaagcggtctactttgaggacatttccttctttcacgactccatcttttcgaattctctcttttaataattccatcacttggcctccacgctcttttgtattttaaataatattttaactacttttgcctcgctttgcaagcattgcttgcatttcttttggataatctatatcgcaaagttcagtttcttccaataccttgaaaaatctggcattttctatgtgttttttgaggattttcttgccaccttgatcttttgtaagcgataacaattctcgtttatatttctttgagaaccatacgggatttccaaggttttcttctgttctgacacagccaagttcacaagattcatctgccataaaagagagaaatctttcgattgtctctcttttcatattgggctggtctgctacgaaaaatgcatagaattctgcatctttcgctgctttgatccctgctttgatcgaccatgaaatcccatatttactttctggacaaaacactgtcgttattggatcgtattgcatttgcttcacaatttcctgatactgtgtaacaacaataatctcaaactcttcatgttctttgcatagatcgatcaatcggtccaatccgtaacggtacattggcttggttccgatcatttgcaataatttattctcctgaccgaaacgtttgctgtttcctgatgcaagataaatgaccgctgcttttattttatccatgttatattattctttctccaataatcccataacgatcttttcactggtgatcggcaattctcggatccataatccggttgcattaaatacggcatgggctaatgctggagatggtgtgttgataacgatctctccaatggattttgctccaaatggtcctgttggctcataactgctctcaaattctacacgaagctttccaacatcgactcttgctggaactttatactgcatgaaagaattttgttttacatatccatttggtgtgtaatcaacaccctcatacaatgccattccgattccctgaccaagcccgccttctacctgaactcttgcaagatttggattgactggtgttccacaatctacgaccgcaacataatctaagatttcaatatgtcctgtctctttatcaagctcaatctcaaccattcctaccataaatggtggtggggatactggagaactgtttgtctctgtcacctggaaagtttcattattgttgcacatagatgctgttgcgatgtccactaatgaaacttctttgccgctctctgcatctctgactttctttccgtcaaattccagagtatctgtatctgcagcttccatcatctcagctgctttattgaaaatatgtccctttaatttttcgcaggcacgttccactgcttttcctgtgacgtaggtagaacttgatgcgtaagatccagaatcgtatggtgatgtatctgtatctgctccgctgaccatgatatcatcaatagaacattccagacattctgccgccatctgggccaagatcgtatcacatccagttcccatatccgctgctgcaatagaaagtgtatacaatccatcgtcatttaatttaatcgttgcagaaccaacgtcaacgcccgaaataccggaaccctgcatcgccattgacagtccgacacttcgaacttttccatttcccatatctttgcatggatatttttcatcccatttgatcatctcttttgcacgtgcaaggcatcgatccaaagcacagctgtttgctgtttctccataatatgctggcatcacatcgccttcacggaccatattcatctcacggatcttcgttgggtccattcctatcttagctgcaagttcactgactgctgattccagcgcaaacacaccctgtgtcgcaccatatccacgataagccccagctgacatacgatttgtatacacaacatcatatgcaaaacgatgtgcttccaggtctcgatataacggaattgatttatgcccagataaccctaccgttgttggaccatgttctccataggctcctgtattggataatgtataaacatcgatcgcacggatctttccattcttgtttgctccgacacgaactgttacctgcatctcatgtcttggtgaagatgcgatctgagactcttctcttgaaaaaataatcttggatggtttctttgtcatccatgtgacaaatgctggatatacttcggagatagaactctgttttgctccaaatcctccaccaattcttggttttgatacacgaatctttgattttggaatgcataatgcattggataggatccttcgtacatggaatacgatctgtgtggaactaacaacattcaatcttccatattcgtcaataaaacaataagttctgaatgtctccatcattgcctgctgatttgcttttgtatgatatgtatgttctacaaccacgtcgcaatctgctaataccgcatcgacatctccttcgtgtgtttcttctgttgcacacaggtttttcttattatctgcaccaatattacataatgctttccagttatcttctggatgcactagcggtgtatctttatccattgccttacgtggatctaagtttgctggcaatacttcgtattccacacgtaacatcttgatcgcttgatcaacgcacttttcattctccccagcaacgattgcaacgggatctccaacataacggacatgctgatccagaatctgtctgtcatatgggcttaattccggatatgtctgtcctgccatcgtaaaacgttcctgtggcacatcttcccatgtataaatcgcctcaatccctggcactttcatagcaaactgagtgttgatcgatttgatcattgcgttcgcatatggacttcgaagtaatttcacgatcagacattcttttggtgccttatcgtttgtaaatacaggtttccctgtcacaagtgccatagcgtcttttttcatgatcggctggttaactactttcattcgacacctccatctttatttttcttatattccaaaaagtctaagattcctcgaagctgtccttcatatccagaacatctgcaaagattccccgcaaggtattctttgatctcttcttcactcggatctgggatctctctaaataatgcaatcgcattcatgatcattcctgggttacaaaatccgcactgttcagccccttggttcgcaataaaagctccaaactcagctgcttcttcctgcaatccttctaaggtatcgatcttgtgtccatcaactcttgctgcaagaatggaacatgataagattggctggtcatccataaataccgtacataatccgcaatttgatgtctcgcatccacgtttcacactgtaacaaccaagatctctgacgagatcgatcaggagagtgtctgcatcaatctgtggggttactttctttccatttaatgtaaatgtaatctccatgtttatttttctctcctttcttctaactgttcaaagcctcttcttaataagacttttgataactgttcacggtaagcagcacttcctctcatgttgcttccaaaattcatctgacctgtcacttcatctgcgagtttttttcttccttcatcatctttgatctgttccatccactgatctgataatctgactctgcaagctctggatggtcttgcaccgacaaccgcatatgcctctttctcacctaatgaaacagcgcaggtcaaaactggaaaatctgtctttgtatttctatgagaaagataaacactttcctgcggatgcttcttaatgatcagacgcactaaaatatcatttggatatttattggctgcaaattgatctaatggaatgattccttcatgatgtaactccacataactgtcaaacgccagaaaacagcttaatacatcagaaaaaccgaactttccaaaaatacttccacctactgtcgcaagattacggaactgcactccgacaatgtgtgtcacactttcttttaccgctccctgactccatgtatttaatccttcatgaagttcgatctgtcttagtgttaccattgctccgattgaaaattcctcatcattttcttcgatctgatcaagcccaagacccgacagatcaattgctttttgtacatttcttgtgaccatcttaagccacaacatgccaccgatcacgcagttggtcttcttctgattcagctcataagcttgctcaagactttctgctttgacgtattccttgatctttaacatcttatttctcctttaattttttaaaatatcccttgtttatacattctttcacattctacagagcaacacaggcaattggcaaaaaaaagagtactttctgagaaagtactccttcaggtatcgtcctataatccccagtattctccataggtatctttgatgttctgtacatcgctgtctgtaattccatcaatcgtactcttaacaaactggtaagttcttggtctctttgatcttaatgcggatggatgctccttataatccttgtaagattctgcaaaatactcagatgctgatttgatcgcatatgctttgttatatccatcatatttatccttctcagcattgtaaattgacttccattcactcgttccaactttatctcctgcaaggaaattagcaaaatgtcctaattcgtgaagtaatacagaagatctcgcactctgaagtgcgatcttatggctcttaacgctaaatacacctgtcgcttccgcatttttatcaatcaccatcttaaacttcagatcttcaaatgcattcaagatcttaccatctgcctgagaaccaagtgttcttaatgttgttccagaaacaccagacatctgactcaattcaaccgttgttgtcttggtcgttgtctgaacgactgtcttgatcgttctcttcttagaacccttcttgtcataatccttctgtgttttgacaacttttgtattcacaaccttacgtctggaatgattctgagatgttgttgttcttctctttgttgttcttcttgttgttattttgcttctgcttgctttcttcttaagcttctggattcttgtgcttttctttgttgttttcttcgtcgttaccttcggtttcttgccaagcggtacttgaatcccatcaattgatgttgttgcttcgcttggatgctgcatagtatcaacgctttcataggaagccatctgcttctcaaacttctcctgctgacggttattgtaaaatgtgactccaccaaaaaccaatgcaacagctactaccacggacaccaatccgaccatgactttcttcttcataactctcgccccttcttaatattaatatctatactttttgcttttgtctctcaatctccatatgagagacactcaccctataatatatttttatcgtacaatattcgcacttttttgtcaataaattccgatggatttcagcctgtttctgaccatatttcttagcggatcctttttattatcatttctggattggatgcatataaaatcgcagtttctttgctgatctgtccttctttatatagattgatcaatgactggtccatagatatcattccactccctgtagaggaatagatcaaaccatctatttgatgcactttattttcacggatcatattgcggatcgccggggtcacttccatgatctcaaacacaggaatcaatgttccatccatcgttggtatcagctgctgggagatcactgcctgtaatacagaagccagctgaatcatgatctgacgttgctgatttggtggaaatacatctatgatacgttcgatcgtattcgctgccccgatagtatgaagtgttgaaaataccagatgccctgtttctgcagctgtcataactacctgaatcgtgtcataatctctcatttccccaagcaatatcacatccggactttgtcttaatgcggctcttaaggaagtaacataatttacagtatccatgtttacttctctctgactgacgatacttttcttatgttgatgtaaaaattccaaaggatcttccaatgtgatgatgtgatcttcttttgtttcattgatttcttctatcatgcatgcaagtgtcgtggattttccacttcccgctggtcctgttacaagcacaagtcctttgtttaattcacttaatttcattacctgctctggtattcttaattgcttatagtctggcaggcggaatgcgatcacacggatcactgccgctaaggatcctctctgtttatatgcactgacacgaaatcttgacaatccaggaattgcaaatgagaaatcatcatcccctgtcttcaacagttgatctatgtctctgtctaacgctttctcataaatctcccggattattttttccgtatcttgcggcatcattttttcttcattgatgcgacgcatcactccatttactttcatcgtcaatggaagccctgctacaataaacagatctgaggcttcctcttttgctgctaatgttaaaaattcttcaatattcatgctggccccttttacttatttctataaaccggaaggaaatcatccttcttccatgccccaacagcttcttttttccatttgatcacttcataacacagatcattctttttctccggataataaatctgcaatttcacagataactgctgtgtgtctgtgatactttcctgaaatgcaattgttttctcttttttattatatgaaatccccttgctttttgtaaacgatcgaccaacccttttcatataatcttttttatccttagatctgcgatacaacttccatagtttctcatcgatcgctccaacttgttcattcgctgcattggatgcctgataaaaagccgacgtacgttccaaattctttttacttaacgtatgatctcccttggcacttgaaagtgtcaaagccgcaaaaactgctaaacagaccatagctaacacgagcacgatcgaagctgctccaatccctaaaaatggcattttacgatctttcattatctttcctttcctgcctgtatcttaaaatatcaagctgataaatctgttggttttccctccacatcgtaatctttcccagaactttcgctggctgcctttcaagctttatcgtcatatgataacgggcttttgttttctttatctcattccaatcctgatcataataacactgataatctccggctttaccatctatttgtgtaaaatattcttgaaaatctttgatgtcataagcacccgcttctatcagttctgcagcttgtgttacataattttttgtctctgtcatttctcttgcttttgcactaatgttatgagcttttacaaatacctgaagcaggattgatccacagattgcaaaaaagaataataccatcattaattccatcaggatcaggtgtgttccattgcttttttgtctcatacttcctcctaattcctgctgtgtctgtatacacagttctgatatatcttgccatcacttccctgaatctttatatgatacagctgttttgtttctattacagaaaaatcttttgctgccacgatcttctctccctgcatcgttgttgtatccagaccttctcttaccattaattctctcaacgcacccttctcttgatagagatatgtattgtattttttcccattgatcttttctgtatggatcagggctgtgcgtccatgaaagctgccgatctcgatgctgtccttttcatcccactgtcttatcttttctgttacataagaaatatcgatccgttcctcataatcctcattcatcacagaagctgtatgactatatatattcgccccgatcatactcaaggaaaacgcacaaactgcgaacactgcaaataagatcacaagaaacatctgatctgtcatatgtctttgtctctccaaaaacctcacctctcattcaatgggatcaccgtaacttgtggcatgcggttagacccaatgatctcatatgagatcacaaactcgtctttgtcatactccaatccataatgtttctccatataagaaagactttctggatatcgcccttccacactgtaacattgtaccgcccctttgatcacggcttctttcagactttcttcctgtcttttctttgtttcccgaaaaatctggctgctgctattccataacacagccaccataatgccacagatcataactggcaggaaaattcgaattttattgtcaatttttctttgtttttgaaaacgatttctcaaaatctgcctcccttatccaattccagccataataccaactagtggcaacatgacagataataaaatgatccctacgatcacacataagattcctaccagcgtcggttctaacacagcgatcatcttctgaatctgatcctgcagttgtttctgatacagatctgctgcctgttccattacctcatctacggcacccgtttcataaccgatgatcatcaatctttcctgcattccatcaaaaatatgtgcctctttcaacgctttcggaaatatctctccttctttcatctgttcctgacattgctgaatcttcattttcaatggttcataatctgttagtttctcagaaagtgacaaactttcatccatgtcaagtccactctttaaagccatcgccattccacttgcgaatcttgttcttgcacgtttccatgcgattttcttcataaatccgatggtctgtatcttagagataaatttaattctcacctttttataaaaaataacaaaacatgttatgatcaagatcaccactgccaaaactaccagaacaattgctgactgtctcatccaatctccaatattcaataactgacgtgcaactcctgtcatctcttgccctaattgcatatatacctgttcaaatactggcataacttttataaataatactgcaacgatcactaacaacatcccgagcatcgcaaccggataagtcactgcactcttgaccgcatctaatatttcttcttccctctggtaatatgccgccaatgcttccatcgtctcatccagtcttcctgtctgttctccgatctccgtcatatgaagtgcatattctgggaaaacccctgttttctccattgcaggataaagcattccacacatttcaagttcttcgcggatctcttttaatatctccctgccttctgtctggacatctccatcttccataatgtaaatcccctcaagcgatgaaatcccagatttcaagatcagtgccatctgaccacaaaatgtgatcagttcttcgttgctaagtttcttcttcatatctatcccttcttaataactatactgaagtacataatgttctccattcccaatatattctttcacatcttccttgttatcactattcgctgccagtgtcggatccattaactcccagcttttcccatcgaactgaatgatattatctacccatcccttttcattcagccaggtactgatccaggcatgatagatatcccctgaatacccgatctcaagcttggtcggaatgccctgcgaacgcagcatcgccgtcatcagtgcagcataatcaaagcagattcccttctttgtcttcaatgtctcatctaccgatggcagatatccactctgaacattctgcgctttctcatcatcatattttacatttttgaccacataattataaacagctttgacgattgccagatcatctttggaatcttttgccagtttcttcgcttcctttactgctttcgtcttacttgtaaattctacatactggttaggatataaaaatggcagaaatttattttttaatttcacctcaaaactatccatcatcaaaacactgtattcatcgtcctgcacattttcatatacagagatctgatatgtaccatttccactggtcaatggaaaatatgtcggctcttttgtccgttcaataaaatatttatatactttattattctttccgatcacttcaacactgatcttctttgcacttcccttatatcgcagtgctacatagccttgagccacattcgatatatcaaccacaacctccccatgatccaaaacttccttccccggtgcttctggctttaatactcctgctttctgagctgttacctgcttcttccggccacatccgccaaatggtaacataatgatcaggcatgtcacgatcagtattatttttatgacatacttcataagaattctccttgtatttacttcctctagtataacagattcacaatatgccttctaatttttttacgtatacaaatgctctcttacataatttaaaaactgcttctttgcataatccaatggcttattttttctataaaatagtgatatcacagaatgtaattcatcttctaatggtatcattttaactccagcacatttagcttctctataaaccgttgaaaatgtgatcgtaaccccaaccccttcacttacaaaactcatgattgtatttgcttgtggaaattcaaaagctattttcggttcaaatcctgctttctcacaactcttataaaacacttcgtaacttccgctgcctctctctgggaagataaaaacatcatctttcaattctttcagttgaagtcgatctcttccataaagcggatgtttttcatataacactgcacacaatttatcatcatacagtggggaaaaacggaattttttctgatcttccatcatattttctctcaagatcaagaaatcataacgatcggagttttcctgaatatcacttgcgattctttcatcaatcacaagtttgatatctggatattcttttctgaaatccgccaccaatcttgcaaaatgatatggtgcaagaaccggcatacaaccaatcttaatttcctgatttttctgaacatttttcaacatctcttcataggttcccgtcattttctttgcataagacaaaaagatctctccttctttggacaactcaaatttccttgtattcctgcggatcagtgtaattcctaactcattttccaacttacggatctgttttgataatgcaccttgtgtcatgttacaggcatatccagcttctgtgaaatttttctgtttacataattccatataataatataattgctgtatttccatttttccatacctttttcaaatatcttcgtatattcctatttggaatatatcaaatctcaactggaattgcaatacttcgctctctatatatataataagaaacacaaagggaatacgattgataaaatatgaaattttgatgaaaggaatcgttgatattatgaaaaacaaaaaaagatttttttaccatagattgttattttatattttaggactgttgatcatgtctgttggttctaatttatttttgaaagcagctcttggagttgcacctagctgtacgatggctttgacattaagttatctttccccagttcacagctatgccttatttaacttcctgatcaactctactttcttagtttgcgaagctctgatccttcatgaattcgggaaaatgcagttgactcagcttggtttgacttttgtttattctttatttatcgaatttacttcttatggtttattctttattgaacctcatggacttgccgctaagattttactatctgtcatcgcatgtgccgttctatcaataggtgtcggattcacgatcagttccgggttcgctgttatgccaatggaaggacttgtgaaaactatctctgataagaaaaatataagctttggcgctgtcagagtttgtctggaagttttatttactgtatgttctgcgatctcttcttttgtattgcttccagaattaccatccgttggaatcggaaccgtgatcgccgctttcttaagtggtaatattacaaatatattttcttctctatttcataagagaatcaatgcctaccttggatttcaggcataatcctatagaaaaaaaacgtaatctcaaatgaacctcttgagattacgtttttttattctatcctgcttctttagtttttgcctattcccatggatcgatttgctgattcgtcggtacaactttgatcttctttgaaatcgttatctttgtccctgtttttaattttgcagaaatcgtcactgttccagctttatttcctgtgattcttccattcgagtcaacagatgccacggatggattactactcttccatgatgtgaaagatgatgtattgatcactgttggatacacaccgtactctttcatcattttgccttgatatgttggcttcatctgcattttttctgtttcccatattgtaccgtatctgctgtctagttttaaataactcttctttaaatatgaattctttgtcacgatattttttgtaaattgctttcttgccttggatttttctactttctttgctttggaactgctaaagtctaatacccaggtattggcttcgtatccgtctcttgacacaaccgtaactgctgcaacccctacactttttgcattcgaaagtaacagaccttttctatgtgtggaagaattgatccaaccctttacgatctgcttcggtgtagtttctgcggattgtgcgcagttttcatagatgatcttcttgttgatactttttgaaagctttccatttggtcttctatgcggacttgtttctggaatatagatcgttgtttcaaatccacgcataattgctgaatttgtcaatcctcgatccatcttcaatgctttgcgtccatttttcttacggtatttgttcacttcttttaagattttctgtgcatggttataatcctgatatcctgtaacagataatttccctgtagaagcagcctctaccttcttctggctgactcctgcagttgtaaatagcattgccgctgctaatgcaatactggcagctcttcttaatagtttcctcataaactttctcctcgtattatatagtagtagtttttagagaccctctccaaggtctttataaccattaaagtcat

SEQ ID NO: 667 - DNA, 2121 bp, Unknown
  gut microbiota DNA sequence
cttgtatgatggtgcagcagataaggcgaaagcaaaatgtcagtttgaacagatgctagataaaatagtagaagaaatgaaacagtaatataagagccagacgcttaagacgcagagccgttaattctgatactgaaaaattaggattatcggtttttatttttaagaaaggacataaaagaaatggaaaaaagtaatattgagattcgtttagagaaaaaggaagaacaacaaaaagtagaaaatctggtaagagaaagtttttgggatgtgtatcgtccaggatgccttgagcagattgggagatttggctgttttttcgtcatgttcatttgttataagtaataaaagattgacaagttaccgtttggttactataatataagtaaccaaacggtaacctatgaagaaaatgaaggtaagaatagtaaaggtaaatctaatatatactgtggcatttaaagaaaaatgaaaacaaaaggagaatatatggaatcagatataattaaaatcagccatctgaataaaagctttggcgaagtaaaagcggtaaatgatttgagctttcgtgtgaaaaaaggagaattgtttgcttttcttggagtaaacggtgcagggaaaagtacaaccatttctattctttgtggactgctgaaaaaagacagtggaacggttcaggtaaacggaatagaaactgacaaagccggcgcacagacaaaaaggatgcttggtgttgtatttcaggatagcgtacttgataaaccacttacggtgaaagagaacctaatgagcagagctgctttgtacggaattacaggaaatgcctttgataagagattacaggagctggtcgagattctggattttgacgagtttttaaacagacctgtaggtaagctgtcgggaggtcagagaagaagaattgatattgcccgtgcattattgcacagaccggaaattttgattcttgacgagcctaccacagggcttgatccacagacaagacagttaatctggaatgttatcgagaagcttcagaaaacagaaaatatgacagtatttttgactacacattatatggaagaggctgccaatgctggttatgttgtgattcttgacaaaggaagtgttgcagcagaaggtacaccgtttgaacttaagaatgattatgtacaggatatagtgtctgtttatggtgtttccgaagatgaaataaagtcattgaacagagaatataaaaaaatacgtgacggatatcagataaaagtaagaaatacgaaggaagctacgaagcttattgtagagcatcaggacctattcatggattatgaagtagtaaaaggcggtatggatgatgtatttcttgtagtcacagggaagaagcttggaggtgagcattaatgagaacagtattggcgttaatgaacaggaataggaaactgttttttaaagataaagggatgttgtttacatcaatgatcacacccgtcattctgattgttctgtatgctacgtttcttgcaaaggttttcagagattcttttacagcagcgattccggatgtgatcacaatttcggataagctcattaatggaacagtagcagcacagctgacagcatcacttatggcagtaagttgtattactgtaatattttgtgtgaatctgactatggtgcaggacaaggcaaatggaataaggaaggactttgatgtttcacctgtcagcagtggaaaaatttatttgggatattttctgtcaacagttgctaattctttgatggtcaatggacttgcgtttgtattatgcctgggatatttacttaaaatgggatggtatatgaatgcagcagatgtattatgggttctatttgatatgatattgctcgttctgtttggaagtacgctttcaagtatcgttagctttccattaacaacacagggacagctttcggctgtaggtacaattgtcagtgcaggatatggttttatatgtggtgcttatatgccgatttcgaattttggtgcaggtcttcagaaggtgctgtcttatcttccaagtacatatgccacttcattgattaagaatcatatgcttcacggagtattcgtggagatggaga

SEQ ID NO: 668 - DNA, 180 bp, Unknown
  gut microbiota DNA sequence
tgataatgaaagtgctaaattttggctttctatcatcaatgggctgaaaaatcgtggcgttgaagatattctgatcacatgtgtggatggactgacaggatttccacaggcaatcgaagctgtatttccacagacagagatacaacagtgcatcattcatcagatacgaaataccacaag

SEQ ID NO: 669 - DNA, 2624 bp, Unknown
  gut microbiota DNA sequence
aagaaagcaaaacagggaagaactattgctgtagataaaagaaagatcaaattaggatcaaaagtacagatcaatggaaaaacatacgtagccgaagatgtcggaggcggtgtcaaaggaaaacatatcgatgtgttctttaaatctcataaacagacaaagagatttggtaagaaaacaggtgttaaagtttataaggtaaattaagatacgaatgatgattataaaatatagcgtaaaaatatcagccagtttggaagaaaagatgaattcaaactggctgatatttttttgcttttacaaatgaatatttaacggtattaaaatttataagtaccattttctcttaaagcagctaaagcatcaataacgctctgtttatcttctggatatgtaacaccataccactgatctttagatacaagcacttcaagagaggcttttccatcatgtaacaggtcacttgcgacactaggaataaagtattcaccttttaatggattctctttgatcgcttgatcaaggaaagcagggaatcctttttctaactcgtccatgatcataggctggaatccaaagaagttcatggacactaaagtatcaaatggaagcgatgcccaagttgcaccgtcatcttctgtgaattctgcatgatcttcacgtttttcgatatgagttctttctgtgatagaaagtaactggtggttgtcatcaacttcacagacacctctggatacgtatccattctctgtaactgtatttccaagatgatatcccaccattgcaaatggtgcctttccatctttctcttcatggcttgtaaggaaatcagccatgactttatatccatcaacaccataatagtcatctgcgttgatcacggcaaatggttcattgataaatggttttgcacataaaacagcatgtgcagttccccaaggtttgacacgtccttcagggacattataaccttctggtaatgcatctacttcctgatatgcataacatacttccattccttcaggaacccttgctccaacagtttctttaaaatctttctcaattgctttctttatcacaaagactaccttaccgaatccggcacgttttgcatcatagatggaataatcgatgatcgcatgtcccattggatccatagggtccatctgttttaatcctccataacggcttcccattccggcagccagaattactaatgctggttttttcatgaaaaaactcccttctgatttttaaactaaaataagtataacgcaagatggaacagatggaaagagaaagaaaaaataaagaattggaattgataaagatctatttcggtcagctagaatttattgtataatttgagtatcgaattgtagcaaaaaaagagaaagatttacaaatattcgaggaggaagagtatgaaaaaacgaatattatcagttttattatcgatggttgtggcaaaataaaaggatatccacgaggataagaaaaggataaagcgatgacagagattcaacatgaactgatcatgccgaataaggatcttccatttaagatgttcctttttgaaggcagagatggtaattatatcagagaaaaacattggcacagatcgatcgagatctttgcggtctttcagggaacgctggagttttatttaaacgatcaggagtatttactggaatgtggagattttattattgtcaattccaacgaagtgcattccattcatgcaccaaaagaaaatatgactgttgtgctccagatgccgcttaatatgtttgaaaaatactacactggggatcagttcatttgcttcgcccatgccccgcaggcacaggatgaacagctcatggaaatgatctgtgagatgtatatggcatattctgataagcattgtggctatgatctgaagattcaaagcctgttttatgatatgttatatctgatggttacaagataccgtgagattaatgtacacccagatattttacatcaacacaagcagttaaccaagttatctgtgatcacagattacatgaaagaacattacaaagacgaattatctttggcaagacttgcagagattttcgggtattctccatcctatctatcccgaatgtttcaaaaatatgcaggaatcaattataaagactatttgcaggcaatccgcactgaacatggatacagacagctgatagagacaaatatgacgatcagtgatatttccatggaaaatggatttccaaataacaaagcattttctaaagctttttataaaaagtatgggatcatgcctgctgaatttcgaaaaagacaaaaaagtgccataaacaagataagtaattagtcgagaaaacaaaagcatattgttataatcttataagtgataaatgctgtaaatgtggaagaataaagaaagagttgagattatctgaaagagtctatcactgtgaatgtggaaatgagatggatagagatcataatgcagcgatcaacatccgtgaagaggcaagaaggatgttgacagcataaactgtccgtatccggacaattggataataagaaaatatgcccgtgtccgggcaaaagaattgcggggcacgcgaggatag

SEQ ID NO: 670 - DNA, 332 bp, Unknown
  gut microbiota DNA sequence
acatatcaactaaacaacatctcttgacctcgtatcctgcttctttaaatacaagcagatctctcataaggctagttggcttgcagcttacatataccatctcgtctacgttaaagttaatgatttttcgtaaagcctttggatggattccgtcacgaggagggtcaagtacgagaatatccggcttctgggttaggttatccacaactttcaggacatcgccggcaatgaattcacaattgtctaagtggttgtccactgcgttctttttggcggcttccaccgcttcttctacgatttcgacaccgactactttacttgctacgggtgca

SEQ ID NO: 671 - DNA, 361 bp, Unknown
  gut microbiota DNA sequence
ttcctaaagacaaatgatgcgtgtatcgtaaatggaagtctggatacgatggaagatggatatctggaagttgtatatatcagcaaagatgcaaaagtcaagaatggagatgagcttgtaacatcttatgtaagttccaaatttaatgaagggatcacgatcgggaaagtatctgatctgaagcttgattctacaaagcttaccaagacagcgaaagtgacaccagtcgttgatttcaagcatttaaaagaagttttggttatcacagatcttaagaaaacaaagaatcttgatgaagaaacaaaggaatagcaggtgaggatatgaagatcaaacgaattttattttatgtgatatcggt

SEQ ID NO: 672 - DNA, 10624 bp, Unknown
  gut microbiota DNA sequence
caaagaaggctgaagtgtaagagatgtagaaagattcttgtatgttgttttgaaggtatatcctttacaatttaataaaggggcatagtttcaatggtaaaacatcggtctccaaaaccgcagttgggagttcgagtctctctgcccctgttacgaaaacagattaaattttatttagtctgttttttcttttataggaaaagaaagcgtatgtcagattttaccctttgaattttagcaagattactttgtgaaatgttacaaaaatattacggaataccacaaaatcactttacaaaagaagaataatgtgttaaatttaataaatgtaacagaaatgtaacaaaatatcaaagagtagaattgaggcagaattatgataaagacaataaagaaagtagctgttataataataacagtcgtaataatgatatcgacagttacgatagctgatcaagcatcgtcgacaaccgttcaggcagcatcagggtacagtggaaagatttataaacactggtgcaaattaagaacagcaaagtctaaacgttctaaaacgatcaagaaactaagtgtaggaacaaaagttacagtattatcaacaagtggaagctggagaaaaattaaagtgggtaacaaaactggatatgcattaaaaaagtatgtttatatcagtacaaatgcaccaaaacttacgggaagtacttataacaaaggacaaactgttgcaagttttgcacaacgatttgttgggaatccatatgtatggggaggaacaaacttgaatacgggagcggattgttcaggattcgtaaaaagcgtctataagtcatttggatataatcttccaagaagttcatcctcacaaagaagtgcaggacgtaaggtttcttacagtaataaacagccaggagatctgatctgttatagtgggcatattgctatttatataggcaatggaaagattgttcatgcaagttcaagaaaaacaggaattaagatttcaccaaaggctaattatcgaaaagtactttctgtaagaagaattgtaaaataattaagaaagcaggataagatatgagatatgaaggaatgatctatcggccgccaagtgaagcatacagtctgatcgtacaggtaacgatcggatgtagtcagaatcgttgtattttttgcagcatgtttaaagaaaaacgatttaggatcagaaaagtagaagaagtcttagaagatttacaagatgcaagaaataagtatcgatatgtagagaagatttttttggcagatggagatgcattgatttgtaagatgacagatcttgaagcaatccttcattttatcaaagatcaattcccagaatgtaaacaagtaactttatacggatcgccaagaagcattttgatgaaacaacaagaagatttggacaaattaagagaacttggaatatctatgatctatatgggattggaatcaggaaatgatgaagtccttacatatatgaaaaaaggtgtaacatcacaagagatgatagaggcagcacagaaagtaaaacaggcaaagatccgtttatctgtgacagctatatcagggttaggtggaagacggctatggaaggaacatgcaaaagatacaggacttgttttatcccagatgaagccagattatataggattgcttacattaatgatagaagaagatcttccgttagcagataagatcagaagcggagaatttgaactgttaaatccatatgatattttgatcgagacaaaagaaatgttaaaatatatggattgcccagattgtattttcagatcgaatcatgcatctaattatgtgaatttaagaggaacattaaatcaggataaggaagcaatgatcaatctgttagacgaggcaatcaaaggaaatgttcatttgaaatcagagtggatgaggggattctaatatagctagaatcaaggaacgagacaataggaatattatgagcctattgtttcgttcctttttatgcagagaaactcataacttaatgaattcaggtttcttatctcgaaagacggtataataacgaattccaagattagacagaaaatcaggtaatttacaaaaatcataagccatatgttttggacaatggccatcagatccgatcgtaataatttcaccaccaagttccatatatctttttatgatctcatgatgaggatttggatcactcattccgtatttaagtccagcagtattcacttcaatacctttgccattttcaatgatcatccttaaaatggcatctaaaagatcagaataatctctataatggaattcaaaagaaggatccttgatataacgtgcagcataatcaagatgtccatagacacaataatgattaaaagaagaaatattttttaagatatcttcaaaataatgagcaagtcccagacgggcaggatatgtttcaaaataaatcgcatcatatggatccataaaatcaacaatatgagtagaaccaatgataaaatcaaaaggctcatccttgacgaatgcagcacattgatctagggttgttggcattaatccaagttccactccataattgatttcaatctgatcctgatagtgttctttcattttaaatatttcttctttataggaaggaagatctagaaggaaatcaaatccatcaggattaacaggataatcaatatcatgatgctctgtaaaacaaatagttttaagaccaagtgaaacagcatgtcggatcatttcttccataggagattcagaatcggaagaaaaactggtatgtaaatgataatctgcaagaatcataaaaaactcctttgtaaatagttaatataatacttttattatatacattatgacagaaaggtaaagaaaaaataaaatctatgtaaaaagttctttaaatataagagtaggtttgttaaaattatttatgtcggaataacgacaaatgaaatatatgtgggagatccaataagagggtctgtaaaaacacaggaggaatcgtaaaaaatgaatacactaacacatgtcggtaatctgtttgcgtttatcggcggacttggaatgttcctgtatggaatggatatcatggcatcaggacttcaaaagacagcaggaaataagatgaaagacctgcttggctatttaacaaataatcgtattttaggtgtacttgtaggagcactggttacagcaattattcagagttcatcagcaaccactgttatggttgtaggttttgtaaatgcagggattatgaatcttacacaggcagccggtgttatcatgggagccaatgtaggtacaacgatcacggcatggctggtatcagctaatgaatgggcgggagcgttaaaaccagatttttttgcaccatttattttaggaatcggagctttcatcatcacattctctaataagcagaagatgacacagaaagcggagattgccgtcggatttggtattttatttattggattatcatctatgtcatcatccattggagtatatcaggatagtccggtattctacaaagcatttcaggtattaggaggaaatccgatccttggtattttagtcggcgctgttgttacagcgatcattcagagttcatctgcatctgtcggtattttacagacattagcgatgagaggaatcgtaaactggagatcagcgatctttattacgttagggcagaatattggtacttgtatcacagcaatcttatctagtgcgggtgcaaataaaacagcaaaaagagcagctgtgatccatttaagttttaatgtattaggtgcagctatttatggggtgatcatgacgattttctttggaatcttcccagatcttgcaatgcagcatatatcaagtacacagatttccattttccactcaatctttaacatatctgtgacgatactgttattcccatttgcgaatgcattggtaaaattatctggacttatcattcgtgaagagccagtagaagacgaagaagaagaaccagaagagaaagcattacgtcacttagatccacgtattcttgaaacacctgcatttgcagttgagaatgcagtgaaagaagtggtacgtatgggtgagatcgtattaaagaatttaaatcgtgtaacaaaagaagcaatgagtggagaaccaagacagagtaagatcgataaagttcataatgatgaacaggtgatcaaccatttagaaccaatgattacagaatatcttgtaaagatcagtcatttggcgatcacagaaaaagagatgaaagttgtcaacaatctgtttgattcgatcacagatattgagcgttcaggagatcatgtagagaatatggcaggatatctgcagcatatcaaggatatgaatgaaaatatttcagaagatgcgattgaagagcttagaaatatgaataatattgtaagagctgcatttgagtcagcaatccgtgcgattgaatttgacgataccaaagaagcaaaagaagcattatcttatgcagaagatgtatattgtacaagaaagatcatcagaaagagacatattcagagaatgaaagatggagcttgttctccagatattggtgtatatttccttgatatcatttctagtatggaaagaatcgcaggatatgcatttacaattgcaagatacattttaagtcagaatgatgaagaagaataaggaaaagttttttattcattgtgccgaagaaacgggataaaatttggtagaattgtacaaaatcgttttattgtatacatgataaaaatactaaatttcacttgaattttttgtcagtattgtttaaaataaaaaggaagtttgtcaatagattaacagattggcaaatccatcaaaatttaattaatcaagacttaggaggaatttgagatggcagttaaagtagcaattaatggatttggacgtattggacgtcttgcattcagacagatgttcggagcagaaggatatgaagttgtagcaatcaacgatttaacatctccaaagatgcttgcacacttattaaaatacgattcttcacagggaacatatgcattagctgataaagtagaagctggtgaaaactctatcacagttgatggaaaagaaatcacaatctacgctgaagctgatgctaaaaaccttccatggggagaacttggagtagacgtagtacttgagtgtacaggattctacacatctaaagaaaaagcatctgctcatatcgaagcaggagcaagaaaggttgttatttctgcaccagcaggaaacgatcttccaacaatcgtttacaatgtaaaccacaatgaattaaaagcagaggatacagttatttctgctgcatcttgtacaacaaactgcttagcacctatggcaaaagctcttaatgatcttgcagcaatcaaatctggaatcatgtgcacaatccatgcttacacaggagatcagatgactcttgacggaccacagagaaaaggtgacttaagaagatctcgtgcagcagcagttaacatcgtacctaactctacaggtgctgctaaagcaatcggacttgttattccagaattaaacggaaaattaatcggatctgctcagcgtgttccaactcctacaggatctacaacaatcttaacagcagttgttgaaggaaatgtaacagttgatgaagtaaacgcagctatgaaagcagctcagacagaatctttcggatataacacagacgaaatcgtatctagcgatatcgtaggaatgagatatggttctttattcgatgctacacagacaatggttcttccattagataatggaacaacagaggttcaggttgtatcttggtatgacaacgaaaactcttacacaagccagatggtaagaacaatcaaatactttgctgaattagcttaatttgatattggaatgaggacaggcctgtaattatacagtgtaataagactcagataaggggtccggtcttttggaccgggcccctatttttaatcaaggattgagaaaccctgatcaattaagatatgccttatggcatacaatcttaggaggaaaaacgaaacatgttaaacaaaaaatctgtagatgacattaatgtagcaggaaagaaagtcttagtacgttgcgatttcaacgtgcctttaaaagacggacagattacagatgaaaatcgtctggtagcagcacttccaacaatcaagaaactgatttctgacggtggaaaagtaatcctttgctctcacttaggaaaacctaaaggagaaccaaaaccagaattatctttagcaccagtagcagtacgcttaagcgaactgttaggacaggaagttaaatttgcagcagatgacaatgttgtcggagataatgcaaaagcagcagtagctgctatgaaagatggagaagtagtacttcttcagaatactcgttacagagcagaagaaactaaaaatggtgaagcattcagcaaagatcttgcaagcctttgtgatgtatttgtaaacgatgcgtttggtacagctcatagagcacactgctcaaacgttggtgtaacagaatatgttgacacagccgttgtaggatatttaatgcagaaagagatcgatttcttaggaaatgcggttaataatccagaaagacctatggtagccatcttaggtggagcgaaagttgctgacaaattaaaagtaattgataacttacttgaaaaatgtgatacactgatcatcggtggaggaatggcttatacattcttaaaagcacagggattagaagttggtaaatctttagtagacgatgaaaaaatcgactattgtaaagaaatgatggcaaaagcagagaaattaggaaagaatttatatcttccaatcgatacaacagtagcagacggattcccaaatcctatcgatgctgagatcgaagtatctgttgtagcagctgatgcaattccagctgataaagaaggacttgatattggaccagctacatgtgagaaattcgcagaagcagttaaaactgctaaaacagttgtatggaatggaccaatgggtgtatttgaaaatcctatccttgccaaaggaacaattgccgttgctcaggctttagctgatacagatgcaacaacaatcatcggtggaggagactctgcagcagctgttaaccagttaggatttgcagacaagatgacacacatctctacaggtggtggagcttctcttgaattcttagaaggaaaagaccttccaggtgtagtagcagccaacgacaaataatcattgcacttaaatatttaatatttaatacactttataaacaaaatgtcaagaaagaaggatattagtcttatgcgtaaaacaatcgtagcaggaaactggaaaatgaacaaaactcctagcgaggcaaaagcattaatcgaagaattaaaaccattagtagcaagtgaaacttctgatgtagtattctgtgtaccagcaatcgatattccagcagcaattgaagctgcagcaggaagcaatattgcaatcggtgctgagaatatgtactttgaagaaagtggagcttatacaggagaaatcgctcctaatatgttaacagatcttggagtaaaatatgttattcttggacattctgaaagaagagaatactttgctgaaacagacgagactgttaacaagaaagtattaaaagcttttgaacatggaattacaccaatcgtttgctgtggagaaactcttgttcagagagaacagggagttacaattgacttcgttcgccagcagatcaagattgcattccagggagtaagtgctgaccaggctaagactgcagttatcgcttatgagccaatctgggctattggaacaggtaaagttgcaactacagaacaggctcaggaagtttgcgcagcaatccgtgcatgtatcgcagaagtatatgatgaagctacagcagaagcaatccgcattcagtatggtggatctgtatctgcagccagcgcaccagaattatttgcacagccagatatcgacggtggattagttggtggagcatcattaaaaccagactttggtaaaatcgtaaactataaataaatttgattaattaaatgatgggtccctcggatattgaatatccgggggattttttcttttttatataatggtagaattcgttaaaagattaaagaaataaaagactagaagcaagcaataaatcggtttataataaataataagatcaagtacaaaaaagattccgagagtagatgaaaagggggcatatgatatggagaaatacaaaagaatttttgtcattgtcttagattccttaggaatcggagaaatgccagatgcagccagatttggagatcatgatgtagacacctttgggcatatctgtgatatcgtgggaacattaaatattccaaatctaaaaaagcttggattgttaaatttgcatccaacaaaagaaatggaagaagaaaaacatccaattgcctactataccagattaaaagaaactagtaacggaaaagacactatgacaggtcactgggagatgatgggacttaagatcgagaaaccatttcttacctttacagacacaggttttccaccagaattgatccatgaattagaagaaagatgtggaaagaaagttattggcaataaatgtgccagtggaacgcagattttggatgaattaggtgaagaagagattaaaaatagttcaatgatcgtatatacatctgccgattctgtgatgcagatctgtggaaatgaagaaacttttgatcttaagaatctttatcgctgttgtgagatcgcaagagagcttacgatgaaaaatgaatggaaagtcggaagaatcattgcaagaccatatgtgggaaagaaaaaaggcgaatttgtaagaacaagcaatcgaagggattatgctttaaaaccattttcaagaactgctttaaatgcattaaaagatgaaggatttgacgtaatttcagtaggaaagatcaatgatattttctgtggagaaggaatcacaaaagcatatcattctgaaagctctgtgcatggaatgcagcagaccgtggatgtatgcaaagaagattttcatggactttgttttaccaatctggtagactttgatacactctggggacatcgaagaaatccagtcggctatgcaaaagagatcgagaaatttgatgttggtttaggaaatctgttagaagttttaaaagaagatgatttattgatcatcaccgcagatcatggaaatgatccaacttatacaggaacagaccatacaagagaatacacaccatttatcgcatattcaaagtctatgaaagaaaatggaaggctagaagatcaagatacatttgcagtgatcggagctacgatcgcagataattttggtgtcacgatgccagaaggaacgatcggaatatctttattaagtcaattaaaatagtacaactgaaataaaaacaccacagaaggaaataaagatctcctgtggtgttttgtttataatttggtatgtatattattcatctaaaatcgaattcataaaagaaataataccagcttccacctcatctttgatttcatcataattatgaatttcatggcggtaaccagaataaacacgagtttttactgtatgtccagtatctacaagccagttggtaacttcataaataccttttccatattcaccaacaggatcctgatctccaccgatattataaatcggaagatcagaaggaatcttgccagcccattcggtaccagtgatcgctttcatcatctgaacaaaataaagcagagattgatttgtagttggccgggtaaatgcatcaaatggatcttctgcatgatctcgttgaacataaggatcagaacagatccattcattgcctatggaaatattaccacaacgttcacacatccagcccattagatcagcagtaaaggaagggtcagattctttcccttttccttcagctacagcagccaataaggcagattcagcttctgtagcaccacggaaatgaccagctgtaccacagattgtgattcctgcaagttcttctccatattttgcagcaaaatctctcgtaataaaagatcccatgctgtgtccaaacataaaataaggaagatcaggatacattttgctgacgatttcttttaacttatgttcatcttccatcatcgtatggaaaccagcatcaccccagtcaccccaggtatcgttatacattgcagtttttccatgtccaacatggtcatctgcagcaacgatataccctgcatccataaattttacgatcatatggaaataacgacgggaatgttcaccaaagccatggatcacctgtacaattccttttggtttgcaggcaggtacataaacccaaccttgcacctcatcacggccattaaaggaatgaaaactaacttcatgaagcatactaagcacctccaaatctgtaaaaactaatatgcaagcaaagaaaagacgaatcaacatattagttcttttaaatcatatatgtctttttgactatctttttata

SEQ ID NO: 673 - DNA, 1648 bp, Unknown
  gut microbiota DNA sequence
cttgatctctttgacctttccatacgcatcgtaactgtaacttctgaggactttctctgttgtctgccccttggaatgcagttctcctttgatctcctgcagccatccgttttcatcataaatataagataatgactggattccatctttggtggtcggataggataccttactgagatttccattctcattataagtataccggatctgatgggctttgatatcatctaccgttggctgggcattctgactgatctctgcaaacgttgtgatccttcctcttgtgtcataactatattctgtataacgatatgccgtctctgtttcagatgataccctgtaatctgtcatctctgacagctggcctttatcatcataacgataccggctggtcagtgtttttgttccttctttgtcataagactgtgtttttgtaaccagattccggttgttatattcataggtctttttcgccccattggcatagacttctgagagcttatttccacggtcatcataggtatactttgttgtaatggattcactgccgtctccaagatccgatgttgttgtcactgatccggatgcactggctgtttcctgcttgacatgtccattcgcatctgtaacacttgttgtcgttgatccgtctgaattcacctgataggaaacttttgtcttctgtcctccctgtgtgatctcggttacacgattctggtcatcataagcataggatatctgatctccattaccatcagtttttgttgtctcatttccctttgtgtcatactctgttttctgtaagatggaactgtttccaacctttactgcggcatcagaagtcccttttgtgatctctggattctggatcgcagctgtctgttttccttctttgtcatataactgcaaggcgatctttccatctccggaagtctttgttccaagactgatcgttgcgatctcttttccgtcactggtgaacacatgatccgtatataatccatggctgaaacttctgacggtctgccccgctgcatctgtccatgacttttcactgacatgtccattggtctttgttgtctgaacgctcagattctgatagtctttcgttccattcaacgtatggatctgtgcatcttcatatccataggaagtttccgtgacggtatctgtcccgtctgctgattctgttgctttgatcacacggtttagtgaatcataacgatacgctgtctttattccggatgcactggtttctgttgctacggttccgttatcatcgtatgttttagattctgtctgtgtcactccatcggatgttactttcgtctgtatcgctcttcccatgaaatcatacgatgtttccgtactgcttaagatatttcctttcctgtctttactggtattttctgtttcacgtcccatgacatctgtttttatcacagatgtctctttctcttctccctgtgtcgttgttgttgtctgtgtcgttccctgtacagtatcctgatatgtcgtttgttctacagaatcaggagctccttcctttgttgtcgtgactgttgttggctgtccgtgatcatcataggatgtaactgttttggtttcttcttttttattttcgcctttatctgtttctgatattaca

SEQ ID NO: 674 - DNA, 13250 bp, Unknown
  gut microbiota DNA sequence
aatgtttgagccgatacacctaatatttttgaaaatttattgatagaataatatttactcataaacaaattctccatataatatttataatttattataagattattttaacagttaaacacctccataatagatgtaatacgttttggacagtgattaccaaattttgtacttacagcatctcaataaaagctgccattctcgtattgatctgttcaatatctgcctgtgaataatctgtctcaaccactgtgtacgggattccttttttgtctttcactaatttcttgataagtgcggtttccacattatatgtatgacacgcctgaagaacaagatctacgacaccatctacctgaaaatcatcgatcagctcatccaaaagatccagacgattcttatttggagacatacaagaacatccaatgtttaaatattttcttgcgagtgcatcatatacatctggattctcttcatctaccattgctaacggtttcattccagtacagttttcaaaacatacgacaactccaccattatcctcaattgcacgaatgactttcaaggccgcaccgccagatggagatccggttacaaggatccttggttttttccctatattttttccttctgtatattctttttcaattttatctgttactgcattgattctgtcttcaagaccttctgtgttaatgtcaaaaccacttccatatacagtattgatcacatctaatccattgactggtgcaggatcatttgccattacatattgaagacgtcttaatgctttattgattccatttcttaacttgatctgatgaagaactgcctcatctgtgatcgttgtctcaaatttatcttctagaactttcttgaaacgaagtaattctttcttatataactggattccatcttctgtctgacagtttggaagttctacgacatgaactggtttaaaatcagcaagcatttcgtacatttttttctttccatcgcatgttgtttcccctacaaccaaatctgaaaaatagaagaatggacatttatctgttttggcaaatccataacttgatttgatcaatggacataggtttcttggcagatctttttctgcatctgggattgtttcatctgatacggaacataatccgacaactgctgcacccatggcatttggaatctctcttggaagataggtacaaaatacaccgacaacaggtatttctttttctttaacctccttgatcgcgagaaaggaattctttctctgttctgcaaattcctcaaaaatctctggtaactctttctttaattcaaccattgtttgaatcctcctgtaagtaaaaattatcgttttattttgcggatgcccaaaacggcagctccaattgctcctgtgtattgacataatgaatccgttgctacttctttcactcctaaatgattggctaatgattgtttgatcacatcgaattgtgctagtccaccagagaaaaatacttttggattcgctggcgccaatttctgtgcaaatgcagcggttcgctgacaaatagattctacacaaccaagaacaatatcaccaggtgcaatatcctgtgccaataatccaacgatttcactttctgcaaatacagcacacatactgttgatcttcgcaggcttggcatcttttacaaaagtgtcgattcttccaatctcactttcgactcgtttcatcgtcatctcaaggaaacgtccagttccagcagcacatttatcattcattaaaaaatctgtgacacatccaagatcgtcaatagtgatcactttgctatcctgcccaccgatatctatgatcgtgtcacaatctggattcataaaaaatgctccagctgcatggcaagtaatctccgtgatcttgaaatctgcctgatctaacagattccttccatatccagttgttacaataacatctatttctttatgttgtttttttatctctctgtaaagagcttctagagatttccttggactgattgatgttgggatcatctttgtatctattatcttcgtatcttctaacaaaacggcttttgtcatagacgaaccagaatctaatcctaaacttatcactgtacattgactccttttggaaagtttttcgggtaaattttatcatgaaaatggtgtggttgcaatataaaaaaacatgcttaaaaaaaagaactatacattttcattcaaatcctttataatagtatgctgtgaaaaatagcagtataaaactgctcatcatgcattaaaaaaaaggagacgaaagaaaaatgaatcaagagaaaaacaaaggtgcggaatacgacttttacgggaaacttccgctgcaaaaagcgattctccttggtctgcagcatgtattcgctatgttcgtaggtaaccttactccagtccttatcattacaggggcttgtggtattgcttctggaaccgaatttgcagacgttcagattgcgcttttacaaaatgcaatgttaattgccggaattgttacactgatccagttgtatgcgatcggaccaatcggtgggaaagttccaatcatcatgggaacgagttcaggatttatcggtgtctgcagcagtgttgcatctgttatgggtggtggaatccttggatatggtgcgatcatgggtgcttccattatcggtgggttatttgaatctgtattaggatttatgttaaaaccacttcgaagatttttcccagctgtcgtaacgggtacggttgtactttccatcggattatcactgatcggtgttggtgtgaattcttttggtggaggaaattctgctaatgatttcggttcaatcgagaatttgttacttggaacaattgttcttgtgatcatcattgcattaaaacatggaacgaaaggtatcacaagtgcttcttctgtactgatcggaattatcgcaggatacattatcgcaggaatcatgggtgttgtacttcctacaactgctgtcaatgcagatggtgtagaatatacaaaagcatgggtgttaaactgggataaagttgctcaggctggatggtttgccattccaaaatttatgcctgtaaaaatcatttttgatgcaagagcgatcgtccctgtacttatcatgtttatcgtaactgctgtagaaacagtcggagatatttctggagttatcgaaggtggtatggatcgtgaagctacagattctgagctttctggtggtgttgtttgtgatggtatcggatctacgatcgcagcattctttggtgttttaccaaatacatcattcagccagaatgttggtcttgttactatgacaaagatcgtaaaccgttttgcacttgcaacaggagcaatcttcttaatcctgtgtggattatttccaaaacttgctgcattgatctctatcatgccacagagcgtattaggtggagcagctgttatgatgttctcttctatcgtgatcagtggtattcagctgatcacaaaagaaccactaacaatgagaaatattactgtcgtatctgtagctctcggacttggatatggaatcggtgcaaacagcacagttctttctggactacctgaaggaattcagttgatcttcggaggatctggtattgtacctgcggcacttgttgcaattattttaaatattgcattgccaaaagaagattaaataaactaataaaaacagcactgcattgggaattttattcctgtacagtgctgtttttctatatgctttcctgcgtctattatcagctcataacaccaatttcatccggtacgatcacatcagcttctgtgcatgcaaggatatcttctacactatatccttctgcaagttcccttaacacgagaccatcttttgtaacttcaaaatagcagcgttctgttacgatatctgttacacaatgaactcctgtcaaaggaagtgtacatttctttaatatcttagactttccactcttttcacaatggtctgttgctacgatgatcttcttcactccggcacacagatccatggcaccacccattcctggcaccatcttccctggaatcgtccagttagcgatattgccttcttggtctacctgaagtgtaccaagaactgctgcatcaatatgtccgccacgtataaatgcaaaagacatctcatgatcatacacgcttccacctttgatcacagatgcaggctgtccgccggcatcaataacatcaatatctactttatcccagcttggggttggtccacttccgacggttccgatctctgcttccagccacagatccacaccttctgggagataatttacacacatcagcggaactccgataccaagatttacaaaatctccatctttaaaaaactttgcacatcgtgatgcgatcagctttcttcctgtcaatcctgccatatcactgacctccttccgcttttgctttggctcgctgccacattggacacattggtcgtttctcaccggctctttcatagatcatatcgatcacaggtgctggaacatcgatctcttctggtcctagttcacccacttccacgatctcttccacctcaacgatcaccgtatcagcagccatagccatcgtactgtttgttgctctggaattcattcggaatgaaatattacctgcagtatctgctttcgttgctttgatcaaagcaacatctgcacgcaatggtaattccagaagatattctttgccatcgatcgttagtttttgtttaccttcttctacttctgtaccaagtcctgttggtgtcagacagccacctaagcctgctccaccacaacggattctttctgcaaaggttccttgcggactaaattctatcgcaagttctcctgcaaacatctgatccttggcgatcgggttcaacccaatatgtgttgtgatcaaactcttaactctgtgatctttgatcagctttccgactccctgatccgccattccagcagatacagcgatcgcatcaatgtctttgattcctttttctaacattccatcaatgatctcatctgctgcaaattctccatgccagtctccaaacatgatcgtctgtccatcatgaattcttgagagcgcttcctctcttgttacaacttttgacttcaaaggcgtgacctcccttctatgttcatggtttgatcctggctttattctcctttgaattcagcctttctcttctccataaaagctttgactccttctataaaatcagaagatgccgcacattcacgctgtgtcggaatctcacattcatccaggtatttcttataatcagcaagccctgcctgataaatctgtttcttgatattcttataagaaagtaatggtccactagcaaatttcttagcaagtttcataacggtatcatctaattcctccgctggaactacatcatataccattccggcatcttttgcttcctgtgctttcattggtcttcctgtaacacacagttccattgccttctgaattccaagactcttaacaaacaggtacgttccaccggtatctggaactagtccaagattcacaaatgccataataaacttcgcattgtctgcgcatacaacaaagtcccctgaaaatgcaagacttactcctgcacctgctgccgctccacttacacttgagatcacaagcttactcatacgcttcagaccatcggttacattgccaactttactgatcagagaatccatattcacttctccaccttgttggatcaggttatagaagtatccaatgtctcctcctgctgaaaatgcctttggcattccttttaaaacaacaacttttacattcgggtcattctcacaagtatctactacgtacatcaactcgtctgccatctgatcatcaattgcattaagattcttcatatagttcattgtgatgataccaactctatcttctacaacgaactgcaatttctctagcttcataggcatatcctcctttaagttgttttgataaccatattgtatcattttttgtacaatttgtgaagcttttcgacaaaattaaggggttgacgaatctcattttctatagtatcttatagccataaggtcatataactgacggagcacgtggaattaaccacatggaagtatgatcattaatcgccgaccgtctgggcaatctgtctggacgtgcggcgtttttttattctatttttacaacgttttatcgttcagatattgatcctgttaactttttacgtacttgtcctaagtacgtatcatccataaggaggaatactatgacagttggtcatgtccattccatcgaatcgatgggtctggttgatggaccagggatacgaaccgttatctttttacaaggatgtgctctaagatgtcgtttctgccataatcctgatacttgggaattatctggcgggaccgaatacacaccggaagaacttgttgcaaagatccgacgatttaaaccttattttaaagaagatggtggtgttaccttttctggtggagaacctttattacaacctgattttttaaaagagactttaaaactatgcaagaatgaaggcattcacacttgcatcgacactgcaggttatggactttctgattatgatgagattttaaaccatacagatcttgttcttcttgatctgaaacacatccataaaacggattatgaaaaaatgacaggaagatcaatggatcgttttgaagaatttttgaatgctttaaaaaaacatcagactaagatatggattcgccatgtcgttgttccaggaattactgacagcgaagatcatatggttcagttaaaagcttatattcaaaagattcctaatgtagagaaagttgagctgcttccctatcatttacttggtaccaacaaatataaagttatggatattccttattctttagaaggtgtacctgccatggataaaaagaaaacagagatgttacaacaaacctattttgatcatgtttattttatggaggaaaaatcatgttaaacgaatggaatggattcaacgatggtgtctggacaaaagaaatcaatgtaagaaattttatacagaaaaactacactctctatgaaggagatgactctttcttagctgatgtatctcagaaaacaaaaaaagtctggaataaatgtgaagaactgcttgctgaagaattgaaaaaaggaggcgttttagatgttgagacagatatcatttctggtatcacgaacttcgcacctggatatattgataaagaaaatgaggtgatcgttggacttcagacagatgcacccctaaaacgtattgtcaatctatatggcggtaaacgtatggcgcaccagtcactggaacaatatggttataaactaaatgaagagatcgaccgccattttaatgaatacagaaaaacacacaatgaaggggtttttgatgcctatccaaaacgtacccgtcttgcaagaactgctggacttctaacaggacttcctgatgcttatggacgtggacgtattattggagactaccgtcgtgttgctctttatggaatcgaccacttgatcgaagaaaaacaaaaagatctagactttgaagatggacctatgacagaagaccgcattcgtctgcgtgaagaaatttctgagcagatccgtgccctttctaaaatgaaagaaatggctgcatcctatgatgttgatatttcaaaacctgcaaaaaatgcgaaagaagctgttcaggcggtttatatgggatatcttgcgggaacaaaagaaaataatggagctgcaacttcccttggacgtacttctacattccttgatatttatattgaacgagatcttaaaaatggagtgatcacagaaacagaagctcaggaattgatcgatcaatttatcatcaaacttcggctgacaagacatttaagaactcctgaatatgacgaattatttggtggggatcctacgtggatcacggagtctatcggtggagttggtattaatggaaaacctctggttactaagaactctttccgttatcttcatactttatataacattggaactgctccagagcctaacttaactgttttatggtctgaaaaactgccagacaactttaaacatttttgctctaaagtttctattgatacggattctatccaatatgaaaatgatgatgttatgcgcccagtctatggggatgattatgcgatcgcttgttgtgtatctgcaatgaaggttggaaaacagacacagctgttcggagcccgctgcaatctggcaaaatcactgctttatgcgatcaatggaggaattgacgagaaaaaaggaatccaggttgttcctggaatcgaatcgatcacagatgacgttcttgattttgacaaagtatgggaaaactataagaaagttatgacttatgttgctgaattatatgttgatacagtaaatatcattcattttatgcatgataaatacgcatatgaagccagccagtttgctcttcatgatacaaacttagagcgaatcgcagcttatggaatcgctggtctgtctattgccgcagactctctatcagcgatcaaatatgcaactgtaaaaccaatccgcaatgaaaatggtgtagcaattgactttgaaaccattggggatttccctaagtatggaaatgatgacgaccgcgcagatgatcttgcagttaacacagtaacattcttctctgacgaactaaagaaacatccaatttatagaaatgcgatccatactttatctgctttaacgatcacatccaatgttatgtatggtaagaaaaccggatccacaccagatggaagaaaactcggagaacctttagctccaggtgcaaacccaatgcatggacgagacgaaaatggtgctcttgcatccttaaactctgtcgctaaaattccatatcgcgatgtatgtcaggatggtgtatccaataccttttccatcgtaccagatgctcttggaaaagatcaggaacaacgagtaaaaaaccttacaacaatcttagacggatactttgttcaaggtgcacatcatttgaatgtaaatgttatgcatagagaaactttgatcgatgctatggaacatccagaaaaatatccaacacttacgatccgtgtttctggatatgccgtgaactttaatcgattatcacgcgaacagcaggaagaagtgattcgtcgtacattccatcagagtatgtagatttttatgaaacagcaatggtgcctgattttttgatcgaatcaggcaccattactattcttcaaacatttctccctctatattacttatctgttcaatagggatgatcgtctgatctgtcataacaactgtgtgtttatatttatcaattttctttacacaaccagaacaggtaatatatgctcccccatttttcttagcatctggtacaaaatacgtgatctcaaccatttgctgtgtaccgatcgtttcagcgatcagatataactttttatttaattctgctataacttcttcactcaacacctgttttgcatctgtttgtcttacagtttctttaatagctgcttcgtgtccggtaagtgccgcaaaaggcgaaaactgtgctgccctggtataaagtgacatacgagggtgcttctttgaagttggatgcggcagattgataatatcatcgtatttatgattgtactgatccttcataatcttcctccattgacactgaatacttactttctatgctttatgtccgccgatctgctcattacggtcttttgctgttgctccctcctgaaggttcattcctttcaagatagcgttcttcccaaacttctttttgattgtgagcattgtctgttgcatccgtttctcacgctctaaaacagcctcttcttcggcttgttcctgtttctttaccgtatagtctgtaaaaagatcaagctgctcatacgtttcgtcttcctttgaaaaactttcatccacgagcttgttcgctgtgatattgattcttctgatcagcagatttttatccacgatccgatcatataattccatcactgcatctgtgatcagcatggtagacgatgtttttcttttcaggtttgttgttccatgagcgtgttttggaactttccttccatatcggtcgatcgtaacagatcccttgtacttcctatatctgtctggatccgttagattttctatatcataacctacggtcaatacgatctggtcagtaacaagtctcttatctaccagatcaagtgtcataagatcagtcatttcttttacaactaactttgccttatcaaagtcatatgggcagtgaagtacttgcccggagcatacactgttggtttccggtttgtacgctttgacttgctccatcgtacaaggctcatagccccaggcatgatcgatcagcagttccgcattgatcccaaacatcttatagagcaattcttcattatggaattcattgggctttccgatagaacatcttgcaatatctcccattgagaaaagaccgtgttcttccaacttcttcgcatagcctttgcctactctccagaaatccgtaagcggtctgtgattccatagcttcctacggtaagacatttcgtctaattcggcgatccttacgccatccttatccggtttaatatgctttgctacgatatccatcgcaatcttgcacagatacatattcgttccgattccggcggttgctgtaattcccgttgtttttaaaacgtctcgtatcatagtcatggcaagttcccttgcagtcatctgataagtattcagataatctgttgcatctataaatacttcatcaattgagtacggaaaaatatcttctggcgcaatatacttcagataaatattataaatcttggaactatattccaaatagtattccatacgtggtggtgcaacaatataatcaaccttcaatgccggatcctcatttaattctgtgctgtcatccgacgaacctgtaaatgttctgtttaaagctttccacctgcgggtattattgacttctttaatcttttgcacgacttcaaacaaacgtggtctgcctggtattccatagcttttcagcgatggagataccgcaaggcagatcgtcttctccgtccggctttgatctgcaaccacaagatttgtcgttaaaggatcgcgatttcgctccttacattccacagaagcatagaatgatttgaggtcgatcgcaatataagcctttgtctttgtcatcgttctatgctcctctatttgcataatgaatcaaccatcatagcgaaccacatcatacaaaacataaataaaaaacacaatagtacagaaccacacccaacatttgatttcccatcatcggatgattcttccttctctcggttatgcttcgatgcatcatcttctttcaatttgttataaagataatattctctggcattgtctttccaatcttttttcccattccgatcataatcaaaaaaggccatattgatcactccccattccttagcctattcatatttttctctatttactagagcttggaaaatatgggcttaatactccagctacattactgatcggcattgtttgcagccatactttcccaggacctgtaagtattgtgttaaacactccttctccgccaaataacatattctttacacccggaacacttttgatctccatcgtacaacttgctgtcatcgcggccaaatgtccagtgtctacaacaatctgctctccagcctctaattcatattccacgacatgaccatcaaattctgcaaacatgataccatggccagatgctttctgcataataaaaccttctccgccaaataatccagctccgatctttttattaaagaatgcagataactcaactccattctcaccggcaagataagcacttttttgtaatatcctttcctgtccaggtgcaatttcaaatgccttgatggatcccgggaagcatgaagcaaaggcgatcatcccttttccgccttgtgctgtataaacattctggaacatcttttctcctgaaaacgctcttccaaagatctttcctattcccccattcgaagttgtttccattttcatatttggagacatccaagacattcctccaccttctgtgaccattttttctccagattccagataacagataactactggaagtgtttcacctaaaatttcatatctcataatgttttcctccttactcaacatttgatttgttattcttctttgcatttacaatataaattccaacacatacaagtgcgagtgcaatcagacttccgatattaaatgcctgtttgacttctcccaataccaatgccgacaagattacacggcataatggattcacaaatccaaagattgctacctttgacacatcattatatgcaagtaatacagaccaaagtgtataggcaactgcagataccaatgcaagatacaacacgaccgtaattccaccaactgttacatgatctaaatgtccacccattgcgtttccgattaaaaataatacaattccaccaataaaaaactgagttccacttaatataactggtgatactttttttgaatagtaattgatcaatatcgtggatgttgcataggctaactgtgaaatcaaaacgaatccttctcccatcatcgtaaagccgaaatccaaagaatttccaagaagattgatcacgacaactcctgcaaatcctaagatgcatcctgttaattttcttcccgttagtttttcatttcgtacgatcaaacatgacattaggattgcgataaaatttcctaaacctgtaatgattccacctttcactccagatgtatgtgccacgccaatataaaagaaaaaatactgtccaacagtctgcgcaaggcagacaggaactgcatattttagaatctttccatcgggcaatgtcactttcttttcctgtatagaagcaaaaatcaagacgaaaagtcctgctaacgcaaatcttattcctgcaaatacgatctgactggctgtgtttgtcgtatctacttgtaacagtcgatatcctgtcttgatcatcggaatagcacttccccgtgaattacccctcccatgcggtacagtagttcctatggaagtggcttctaacagtcgtgacagttaccc

SEQ ID NO: 675 - DNA, 5714 bp, Unknown
  gut microbiota DNA sequence
aggggagttgaagtgtcgaagacacttttttacattttagaaatgaaaataagatcagagaggagagatagtatatgttaagtaagatcatatccgatgtggatgcctttgtatggggaccagtgatgctggtgcttctcgtgggaacaggaatccttttaacaattcgatgcaatttcctaacctggagaaaccttcattgggcgattaaaaagacattaagtaaagaatccagaacaaaaaacagaggagagggtgatgtatcaccattttcagcattgacaacagcactggcggcaacgatcggaactggaaatatcgtaggagtagcgacagcaatggtttcaggaggtgctggagcattggtgtggatgtggatttctgcatgttttggattatcatctaaattttcagaatgtatgttggcgatcaaatacagagaagtcaatgaaaagggcgagatgtccggtggaccaatgtatacaatgaaaaaggcactcaagaacaaaaagcttggagccgtacttggatggctgtttgctttatttgccgtgatcgcatcctttggaattggaaatatgacacagggaaattcaatttcaacagcagttcatgagacatttggagtatcggttagtactgttggagcagtgatcactattttagccttactgatcgtcatcggtggaataaaaacgatatcaaaagtatcttctgtcgtagttccagtgatggcaatcttttatgtgatcgcaggagtcatcgtcattcttgggaatatcagtaatcttccagcaggactttctatgatctttcatatggcatttagtgtgaaagcggttggtggggctctttgtggaaatatcgtcgcatctatgatgaatgcagcacgttacggagttgccagaggatgtttttcaaatgaagctggaatgggatctgcagcgatcacagcggcagcagcaacaacagatcatccggttcggcaggcatatatcaatatgacaggaactttctgggatacgatcgttgtctgtacgatcacaggtcttgcgatcgcaagctccggagtgctcggacagatcgatccggcaacaggagagatgtacataggttctgcattaacgattgcggcattttccacagttcttggcaaagttggaggatatctggtaacgatcggaattgcactttttgcattttccacaattcttggatgggagtatcatggagaaaaggcgtttgagtatctgatgggaactcataagttcaacatgatctaccgaattatcttttctctggtagcttatgtcggggcaacacagacattggagcttgtatggaacttctcagatattgcaaatgcattgatggcaatcccaaatctgatctgtatgctgttattaagcggtgagatcgcaaaagatgtgaaagaatttcagaagaccatagaagaagagaaagcgagaaaatagatataagataacttagaaaaagagatcatccaagcaaaatctcttttattcagagtgaaaatagattatgataagattaagtacttgatcaaagaaagtaattggaggatgtaaaatgtcatatgaaatgaagctggaacaaggcttgtcacagcaattaaatcagtttcaggtacaatcattaaagatcttatcgtttgataattatgaacttgagaagtttttgcaggatgaatatgcagagaatccattgatggaacataaggaatctggaaaggaattctttacattgcatggaaatgcaggcggatatcaggatattgagcaaagtgatattgaagataagaaaatcgaagatcccgaagccttctttatggaacagttaaatgcaaaagattatacaaagaaagagtggaatgttatgaaatacatggcacaatgcctagaggaatccgggcttttgcttgtttctacaaaagagatcagtcacaagcttggaattgaagaaaaagattgtgaaaggcttttagatcatctcaagcaattagaaccagcaggtgtatttgcagaaagtgtatcggaatgtctccttcttcagcttgaaagagaaggaatattaaatgatgacctgcgatatatcgtagaaaatcacctggaagatatcgcaatgggacatttatcgactgtttcaagagcacttgatattaagacatcacaggtaagaaagtatatttttaaaattcaagaattaaatccaagaccgttaagtggatatacagggggaaccgatcagtatatcgtcccagacattttaatggaaaaagatggagaagaactaaagattcgtttaaatgatgactggatcggtgattattcaatcaatgattattatgtcaaaatgatggaacaggcagaagattctgagctaaaagaatatttcagaaagaaatatgagagatgtcgttttatcattacaagtattgaacaaagaagagagacgatgcttaagatttcaaatgcaatcctagattgtcagagagaatattttatgaaccataagcagttgaaaccaatgactatgcaaaatatagcagatgatattgaaatgcatgtatcaacggtaagtcgcgcagtcaaaggaaagtatattcaatatccaggtggaacgatcggaatgagagacatttttaataatacacagacatttggagaccaagattcgacgacagaagagattaaggaagaaatcagacggcttgtgaaagaagaagataagaaaaaaccattaagtgacagtaagatcgtaagtttgttagaacaaaagaatatgaagatttcaagaagaaccgtagcaaaatatcgtgcacagcttggaattgcaggaacgacacagcgaaaaattcatgaataaatgcagcgacatttatcatcttttggcaaaaaaatgaaaaaatgtaaatgagatttaataaaaatttaacaattgaaacacttgattaacaaactaccctctgttataattaataactgatgtattatgtcaaaagcagaagttatctggagggtactatgagattgaacaagatgactggcagagtgatcgcaacgatggggatcgcagcaatgatgatgacacagacagcaggggttatggctgcagagcagacagagaacaagcaattaaaagttgtttattataatcaggcagattatccgggaaagaagatcggcggaagtacgattcaggcagcaggatgcggaccaaccgcagttgctgtatgctacagttctttaactggaaagaaagctgatgttccaaagatgtgcaaacaggcatataaacatggatggtattacacaggacagggatgttctcacagcgtagttccaggattatccaaattatacggaatggagtgtaaaggtctcggaatggataaagatgctgtagagaaagcattaagagcaggacatccagtcgtggcactgatggggcctggagatttcacaaagaatggacattttgttgtattaacaagaatggtcggcaaagataaagtaaagattgccgatgtaggaagcagagccagaacagctgagacgtggtcgcttaagaaagtgatccgacaaggcaaagaaggtgctaatgcagggggaccattctgggagatcagtgtgaaagaagagaagcaggaagaaccagattataaacaaaagatgttagatggtcacaaaaacatagatgctgtgacaaatgcgatcgataagattgcggattagaattaaaaataaaaaagaacatttcataaatgagatattttgtggaatgttcttttttggtgtgccttgcggcgcacgtcactaatggatgaaagttcctaatccgccctagtagtgggaaggatacagctaagaccaagggtgtccatcgtgaggtggaatctgaaggaaggtggaggcaaatctctggtctgacgaacagaaatcacatcaggctatagttaaggataaggttgccaaacaaaccaaagtccaataactactcggaattaactgtagtaaatgtggcagatatatggagagaaagtgacgtgtggtaccaagggaggtctcgtcagcggacgaaaacagagtatgaagtccgtgagtaacaacgaatggcgagaagtcagcagaagccatagtaaaccgatggttgcaaacatcggcgaagggctgaactttaggagacacaagcaatgaaagtaactgaaagtagatataagaacagacaacttcatatagaggactatctgcaaatggtatctgcggaacagaaagagtatgcagaagtgttcgactactctaagattactgaaaagagcagtgtcatcacagactattggacgaacaatcttttggaattgatcttgcgaaaagataatcttaataaggcttataagcaagtcaaaagaaacaagggaaaaggtggaattgatggaatgcaggtggatgaacttctgcccttccttagagaaaaccagagaagcctgatacaaaagataagggaaggtaaatataaaccgaacccagttcgaagggtagaaataccaaaggaaacaaaaggcgaatatcgacaactggggatacctacagtagtcgacagagttattcaacaggcaatcgcacaggaattaacgccaatctatgaggagcaattctcagagaacagttttggattcagaccaggaagaggagcgcacgacgctctgagacaatgccaaaagaatgtagacgagggctatgtatatgtaatagatatggacttggaaaagttctttgatacagtaagccagagtaaactgatagaggtattgtcaagaaccataaaagatggcagagtcatatcgctgatacataaatatctgaatgcgggagttatagcagacggaatatttgaacgtacagaggtagggatgccgcaaggaggaccattaagtccactgcttagtaatgtgatgctaaatgaattagataaagaactggagcacagaggacacagatttgtccgatatgcagatgattgcatgatattgtgtaagagcaaaaagagtgcagagagaaccttgagaaatatcattccatttattgaaggaaaacttttcctgaaggtaaacaggaagaaaacagaggtagcacatatcagcaaagtcaaatatctaggctacaccttttacagatataaagggaaatgcagactcagagtacatgcaaagtcagtggttaagatgaaaaataaaatccgggaattgacagaccggaacaaaggaataagcaataaaaaacgagaaaaggagtatcaggagtacgtgcgaggatgggtgcaatactacagacttgcagatatgaaaggacttctaaaaagaacagatgaatgggcaagacggagaatccgagcagtctattggaaacaatggaagaaaataaaaacaagataccgaatgctaaaagcattgggtatggaacactggatggcgaaagaactagcatgtagtagaaaaggttactggagaatggcacaaatgctgaaccaaattttttcgaaaaaaataatagccagattgggatacacgtccatgtctgactattatctaacagtatgtgaaaactaaagaaccgccgtgtaccgaacggtatgcacggtggtgtgagaggtcggctaatcaattaatgattagcctcctactcgatttgttatgg

SEQ ID NO: 676 - DNA, 722 bp, Unknown
  gut microbiota DNA sequence
tatctgacaatcttgtcttattgctttatccttcaacttatctgcatttcctgtaagaaatgatccatatgctcttccagtagttttatcacatggctcttgtcttctgctccatcatatatgctgtaaagcaaaaaaataggtccataaaaatcaagtgctgtctgtctaacttttcctgcgtcgcctagcattcctgaaaacaaaactttcatatatgttaatggtccgcttgcaagataattctgatatagctgtgccatctgtggttccctatactgttccaatgtcaacatcttacgaaaacagcttgaaaactcttcctctgtccaatgaagaaactgcacctttgtgaactgcttgatcttatcaaatgccatttctttatactcagctgtaaccttttccagatcaccctccggcatttcatactgctttgctctctcaatatccaattccttcattttttcaataatactgtctaatatctcctgcttgcttttataatgcttatacaatgcagccttggtcactccaagttttgaagcaatatcattcatggatgttcccatatatccactctgtgcaaataacttcagggcttcttccaatattttttcctttgtgttcttttctttactttccatatatatctcctaatttaaatccgttatcaagttaccttttggttactttaattatagttacctatccgatgacac

SEQ ID NO: 677 - DNA, 3591 bp, Unknown
  gut microbiota DNA sequence
aaagaattaggaaaaatgtttaataagagatttatctaatcggaaaggaatgattatatgccatttacaacgacaaaaacagaagaattaattcatgaaaagaaacaaaaagataaagtgtttgcaaaacaatgggatgagagcaggaacgaatataagctgattcaggaaatgatcaaaattagaaaagagcaacatattacacaaacacaattagcaaaaatgacaggaaataaacaacaatcaatatcaagaatagaaaagaaattgctaaaaccgtctttggcaacattctgtaagattataaatacgttaggatatgacttaaagattgttaagagataataaaaaagagaacttacatacaagcgggtaagttctctttttgattgtacattcatcaaaaatttataatggggagtaagattttactgtctataatactccaagaaatccctcagcttcacagaagcatcctcaagcacttccacacgaggcagataaactactctgaaatgatccggatccttccagttaaatccacttccatgcacgatcaggatctttttctcacgaagcagatccagagcaaactgctcatcatttgtaatgttaaacttcttcgtatcaatctttgggaagatataaaaagcagcttttggtttcactgcactgataccaggaatatcacacaacgcattataaataaactctctctgttcataaatacgtccaccaggaatgatgtaatcattgacactctgatggccgccaagtgctgtctggacaactgcctgtgcaggaacattggaacaaagtcgcatatttgataacatatttaaaccttcgatataatccttcgcgatcgccttattaccacttaagatcatccatccgatacggaaaccagcgatcatatgagacttggataaaccagagaatgtcacacagaacagatctggagccagagaagcaatagatacatgttcttctccatccatcaccagacggtcataaatctcatcagagaagatcatcaactgatgttctctcgcgatatcaacgatctgctttaagacttctcttggataaagagctcccgttggattgttaggattgatcagaacaatcgcttttgtacgggaatttacctttcgcttgatatcttccatatcaggataccactcagactgttcatcacagatataatgaactgctttcccgccagcaagcgttgcacaagccgtccataaaggataatccggagaagggatcaagatctcatccccatcatctaataaagcagacattgacagattgatcagctcactgacaccatttccagtataaatgtcgtcgatatcaacatttgggattttcttaagctgtgcatactgcatgatcgcctttcttgcagcaaataatccctgagaagcggaatatccctggcagtcagctaactgatgtctcatatcatagatgacttcatccggggttctgaaaccaaatggagcaggattcccgatatttaatttcaggatatgagttccgttacgttccatgcggttcgcttcatctacgacaggaccacgtacatcgtaaagtacattatctaatttggtagatttgctaaatgttctccttggagaagtttccagattcacagcattccctccatttccagaaagccagtcagcatcgacatcaagagtttcagataagaaatgaagaatctccgcgcgaggaaccgtcttgccactgacatactggctgatatgacttttcccgaccttgactccagcagtctctgctgcatgaataagatcaacctgtttcatatgtttttgttccattgcagactttaagcgatctgcaaaggtaaatgtctgattcataataccctccgataaaagttcaaaataaaattcaaagttcaaatgattttgcttaatatagcacaaaaacaagaaaagttcaatgaaaagttcaaaataaaagccaaaagttcaaagaaacaatatacgaaataagaaaaaaatttaaagttcgacaaaaagtacaaagatttgtattgaaatttagaaaatatatgctatactttggaaagtatagataattaacacaaagtgtaaaaataaatggggatgaaatagaatatgggggtaacaagattacagatgcagaacttcctgatctttttattggatctggtgggagttactgttggttattttgcagcagtatggctgcggtttggaaatattgaaacagggtataccgtgatggggaacgatacatattatcgttggctcattgcgatcgtagtgcttatgatgatctactttctgtttcatccaaatcgtggcttttttaagcgcaaatttatagaagaaatgagaatgaatctgcagacggtcattctgatggcagcaggaatggcgatggtcgcatttctgatccaggatgcagaagattactccagatttatatatatctttacttctggatttggctttgtatggatgcagatcatacatcgagcttatcggaagtattggttatcaagaagaaaggatcattcttatgcaagaaagatgatgatcatcacaacgagtgatcatgcagaagaagtgatcgggaatatcatggaagagaagaactgggatctgtggatcacaagtgttgcagttgtggacaaagacatgacaggatggcttatcaacgagattccggttgtggcacattcatatcgaagtatttttgaatatgcgatgcggtcggttgtggatgaagtattcttatatataccgatggatgacgaatttccaatcgcgatgacagtacagaactttgaggacatgggaattaagacgaatcttaacatttctcagtttcagatcaatgagaatctggaacgatcactggagaaggttggaccttatgagagtgtaagtttctctggtcataatgtatcatttgtcatgctgatgatgaagagagcaatggacattgccgggggattagttggaatgctgatcacagcgatcgcagtgatcattgtcggacccctggtgaagctagaatcaccagggccgctgttcttctcacagaagagagttgggaagaatggaaggatcttcaagatctataagatccgttcgatgtatcaggatgcggaagagcgcaagaaagagcttatggcacagaatgagatggacggcttgatgtttaagatgaaagacgatccgagaattaccaaggttggaaagtttatcaggaagactagtattgatgaacttccacagttttggaatgtactgaagggggatatgagtctggtagggacaagaccgcctacagtggatgagtttgaacagtatagtgcttatcataagaaaagactttgccagaagcctggactgactggagtttggcaggtaagtggaagaagtacgatcacagactttgaggagattgttcagatggatgttgattatatcgatcattggtctatctggagggatattgggatattgtttaagacagtaaaattggttattgttggagatgacggggcgcagtagatagatt

SEQ ID NO: 678 - DNA, 3252 bp, Unknown
  gut microbiota DNA sequence
tataactttttataagttttcagtaacggtatgtatgaatttaaatcaactatactattttcaaaaggtcgcacaattacaacattatcaccaggcagccaaggaattaaatatctctcaacctagtttaagccgctcgatcgctaatcttgaagaagaattaggtgtttctttatttcagaaaaacggacgcaatatcgaacttaccaaatatggttccatctttttagaacatgtaaaccgtattatagaagaaattaaaattgcagagaataagatgaagtctttagctggcagttccagcgggcacattgatatcggatatgtatttcctttggccaaaagttatattccaagacttgtacgaagtttcttaaatcagcaggaaaatcatgagatcacgttttctctaagtcaagagatcacaaaaaatctaattgcggatctgaaaaatgaaaaatatgatgtcgtttttggttctctcgttgccgatgaaccggaaattgagtttgttccggttgttaatcaggaaatggtgatcattaccccgccagagcatcctttaaaatataagaagaaactcgttttagaggatctgctggattatccagtcattggttatgataagacttctggtcttggacgttttactaattctatttacaaacaaaaccatatcaaaccgtctatcgcttttgaatcttcggatgaaaatgccatcgcttcccttgttgcagaagattttgggattggttttgttgcacatgtagaatcattacaggcatatgatgtggaaatcctacatcttagtaatgtaaaaccttaccacactgtttatatggcttatcttaaaaatatgccgatgatccctgctgttcgtaaatttattgaattcacaaaagaaacaatagatattttttattgattcttcaaaaaagatttatttgttaaataattaaccgtgtgttatactaaagccatcataaatcattcacccaatttttatgattctaacaacctcggattatatggaatttaattttttgattttttggatttaattttttggaggttcaattctaatgaaaagcaactataaaaacattttcacaccattaacaattaagaacatgacaatgagaaaccgcatcatgatgacaccaatgggaactaactacggtgaacagacaggagaaatgagtttcttacacattgattactatacagaaagagcaaaaggcggagttggtctgatcatggttgaaaacgcaagtgttgattcaccacttggatctaacggaacaactcagatccgtatcgatcatgacaactatatgcctcgtttcttcaaattatgtgaaacattacacgctcacggagcttgcgttggtgttcagttaaaccacgctggtgcttctgctcagtctaagagaacaaatatgcagccagtatctgcatctgatattccttctaaagcaggtggagagattcctcgtcctctgaaagtagaagaaatttatgaaatcgttaaaaaatatggagaagctgctgctcgtgcacaggcttgtggatttgactgcgttgagatccatgcaggacattcttacttattaagtcagtttatgtctcctacaacaaacaaacgtacagatgaattcggtggatgtccagaaaaccgtgcccgcttcacaaaattagttgttgaagaagttcgtaaacaggttggacctatgttccctatcttcgttcgtatcagtgctgatgaactgatggaaggtggaaacacattagaagatactttagagttactttcttacttccaggaagaagttgatgcatttgacgtatctgctggattaaatggttctcttcagttccagatcgatgccaactacttaaaagatggttggagatcttacatggcaaaagctgtcagagaaaaatacaacaaaccttgtgtaactatgggtaacatccgtgatcctcgtgtcgctgacgatatcttagagcgtggagatgctgatatcatcggtatgggtcgtggactgattgctgatcctcactgggtgaaaaaagttgctacaggacatgaagatgacatcagaaaatgtatttcttgtaacatcggatgtgctggaaaccgtatcggagttaaccgtccaatccgttgtacagtaaaccctactgtaaactctggatttgattataaaaagaaaaaagtaaataaaccttgtaacgttgttgttatcggtggtggtactgctggtcttgaagctgcttgtacagctgctgaagttggatgtactacatttttattcgaaaagaatgatcatcttggtggattagctgttgaaatctctaagattccagataagaaacgtttaagagacttccctgactaccttgtacaccgtgcttctaaattaacaaacctgtttatcttcaaaggacaggaagcaactctgccattaattaaagcactgcatccaaacatcatcgtaaactcaacaggttctaatcctttacttccaccaatcaaaggattacatgaccacatcgacaaagaaggatctaaagtagcttctatcacaggaatgatcaaccacttagctgattatccagaagactgcacaggtaagaaagttgttgtcgttggtggtggagctgtaggtcttgacgttgttgaatactttgctccaaaaggtgcgcaggtaagcatcgtagaaatgatgcctcagattggtaaagacttagatccagtatctaaatgcggaacaaacacattaatgagagaacacaatgtaaaccagatgactgaaacagctctttgcgaagtaaaagctgatgcgttcacagtaaaagctaatggagaagaaaaagatcttcctttcgattatggattcgtatgcttaggaatgagagcaaacgctcctgttcttgatgaaatccgtgaagcattcgctgatactaacgttgaaatcatcaatatcggtgacagcgtacgtgctagaagaatcattgatggtgttcaggaaggacataacatcttaaatgtacttgcagatcatgaatatctgtaagatataacctagcaaaatatataataaataaagcaattttaattttaacttgctatcttctaccttaaaaataaatataaagttgcaaaaatccctgaagaattgatcgtcttcagggatttttgttgtttttgatactctcatcattatattatgatttttttaggaaaat

SEQ ID NO: 679 - DNA, 7374 bp, Unknown
  gut microbiota DNA sequence
ataaaaaatctacagttggccaacttacaaaattacaatttaagatcccccacaatctgctgaaccgtcaaatgattcttcttaagaagttcttcaatatcatatcgatctaacaattccttcttcacgccataattcagcactttcacatcagaatccccatagaatcgtgcaatcttttctccgaatcctccttctaaaaatccatcttctaatgtaataactacatcatgatctttctttagatcttctaataatacttcatcaattccagtaatataatatggatttatcacagttgcttttgttcctgtcttttcttctactgcttttgcaacttcacatcccatattgtagaatgttccaagtccaatgactgcaactttgcttcctttttctgtgacttcatatttgtttaactgactgaaatcttttgttatttttttaccgtcagaggtcatttctccacctggaagcttgatcgcgactggatattgatcctgatcgatactccagtccaacattgccagatattcttcttttgttgttggtgcgaggtatactaagtttggaatattgctcatcattggaatatcctgtaatccaagatgagtaacatcattcattccataaacagatccccagaaagtcacgatcgttgctgcattgctatcgatgcacagatcctgtgtgatctggtcgtaagttctctgtacaaatgttgaatatactccataaaccggttttccaccacctgctgcgattcctgccgccattgccattgctgtttcttccgcgatcccaacatcgataaactgttttccagcttccttacgtttatcttctgtaaatcccataactgttggtgttgcagaagtgatcgctacaaccttcttgtcttctttcattttctttaacaggtattgtgctgttacacttgagaaatcctcaccatcaaaagaatctaaaggctttcctgtttccacatcaaatggcgcacagtaatgccagtcttctttatgttcctcagctaatttatatccttttcctttttgcgtattaatatgaacgacaactgctttttttgtatctttgacctgtttgaatgcttcgatcagatcagcgactttattcccttctttgacataaatgtaatctaatcccatggctttgaatagattgcatttagattctccgtttgtttcacgaagcgcttttagattctcatataatccaccgtggttttctgcgatcgacatatcgttatcattaactacgataatcagatttccacctaattctgcggcataatcaagaccttctaatgcttcccctccacttaaagatccatctccgatcactgcgatcacatttccattttcttcttttaggtctcttgctttggcaagtccaagtgcaagacttatagaagttgatgtatgcccaattgtgaaatgatcatgctcactttctcctggattactgtatcctgatacatcatcataatgttcttcatataagaatgcatccttacgtccagtcaacattttgtgtggataagattgatgggaaacatcatatacgatcttgtcttttggcgattcaaatacataatgcatggcgatcgttgcttctaccataccgaaattcggtccaaaatgacctccatgcttacttaatttttttaataatgcatcacgaatttcttctgcaagtacatttaactgatcctcggataatttcttgacatcttctggaccattaatattttcaatatacatctatttttctccttgtctggtttcttgtaaatacactagcaatagtgtatgatatttatatcatacaacctaaagttaactttaggtcaagaatatttttgaaagaaggtttttctatgtacacgatcggtcaagtctctacaatgtttgatcttcctgtttctaccttaaggtattatgacaaggaaggatttttccctaatctggaacgtaaaggaaacatccgttattttagtgataatgaattggaagcgcttcgtattattgaatgtctgaagaaatccggtcttgagatcaaagatataaagcaattttttctctgggtatctgaaggcagcgcaagctatgaaaaaaggaaagaattatttgaaaccagaaaatcagctgttgaaactgaaatccaagaacttcaaaaaactctttctctcttaaaattcaagtgctggtattatgaaacagcaatgaaagacggtaatgaagatgctataaatgccatgttgcctgataaacttcctgaaaacatacaaaaactatataacgaaggtcataaataattttttattgccctaaaactattcgaaataacaatttaatgttaaaataaagataaggaaaggtaaaaaatgagaggtgatattttgaaaaagaaacttatggtactttgtgctgtcgcaattatgatcagtacatgcttgactgggtgtaagatgaattctggaaaaatccgctttggttctgctggaatcggtggtacttaccagatttttggtgatacttttgccaaccttatctcatctaagagtaaaaaatataacattgaagtaaaaacaactgcaggttccgctgcaaatcttcgtctgttatctaaagattacattcagatggctgttgcccaaatggatttgatcaatgatgcttataaccgcactggtatttttgaaaatgataagaaatatcagggatatcgtgctgttgcttccctttatacagaagcctgtcagattgtggttcctgcggattcagacattcagtctgtggatgatctagaagggaaaaaggtctgcattggtgaagaagaatctggaactgaacagaatgcgttgcagattttaaatgcttatggattaaacgaaagacttgttgatactgtaaatctgaattatacagatgccgccaagaaattaaaatctggcgatattgatgcatttttctgtaccgcaggtgttcagacgactgtgatcaatgagctgtcaaaacagtgtaagattcgtctggtcagtcttgatcaaaaaggggtttctcgtctgaagaaatcttataaattttacacagaatatacaatacctgcaggtacatatgtaaatcagactaaagaaattaaaactgttggtgtcaaagctgttcttcttgcaagtgataaactttccgaagatactgtcaaagacattacacagattctatttaagaatcaacagcagattcagtatgcactacctgtagatatttctcttgatgagacaactgccgttgatggtatcacgattccattccatgacggtgctgctgcctattataaacaacatggaatcacagtaaatacagagaaaggaagcaattaaccgctgcggtgtaaataaatgacaatacaactagatatgtatcagacgatcgcggttgccgtagtcgttttgatgttaggaaactttttaaaacacaggattgcgatcttagaacgattttgtattcctgcacctgtgatcggcggtgtgatctttgcaatctttacctgtgtatgttatgtaactggatttgccgaattttcctttgatgatattctaaaagaagtctgtatggtattcttctttacatctgttggatttcaggcaaacttaaaagtcttaaaaagtggtggaaaatctttgatcattttcctgatccttgtgatcatgttgatcatatgccagaactttcttgcagtcggtctgtccaaagcactgcaaatcagtcctttggttggactctgtacaggttctatccctatgatcggtggtcatggtaccgctggtgcatttggacctgttcttgaagactttggtgttaaaggtgccagcactttatgtacagctgctgctacatttggattgatcgctggaagtatcatgggcggtcccgttggaaaacgtctgattgagaagaaagatcttttaaagactgcaattcctgaagatgacagcctgttagtggaagaagaaaaaaagcatgaacgtcacacaagtatgtatccagctgccgtgttccagctgatcatcgccatggggatcggaacgatcatttccaaattgctttccatgacaggtatgacattcccaatctatatcggtgccatgattgctgctgcatttatgcgtaacatcggcgaatattctggacaatttacaatttatatgggtgagatcaatgatattggtggtatcagcctatctttattcttaggaatcgccatgatcactttaaaattatggcagcttgcagaccttgcacttccactgatcacattacttgcaggacaaactattttaatgttcttatttacttattttgtagtatttaatatcatgggaagagactatgatgccgctgtattatcttctggcgtatgtggtttcggaatgggtgccacgccaaacgccatggcgaatatgcaggcaatctgtgaacgttatgtcccatccgtcaaagcttaccttctggtacctttgattggtagtttatttgcagacttcttaaatagtctggtgatcacgttctttatcaattttctataatctagagggagacgatgaaaaatgtttggaaaaagaaaaaaaagacgcgaagcaatccgaaataagctccgtgagaaatcagaatataaaatgaaaagcgaaaatgttgcaatacccgagatccatacaaaagattttgatgagattgaggaacatattgatgaaatagaacaggaaaaagaagaaaaacattctattctctatgataatgtagcaattcctgaggttcatattcataaaaagaaaaaatagaattccgatatgcaggatttcaacaaaaaatggcagtacattcttccagttctggttaatgtactgcctgtttgttattatgcttctgctctcatttttgcatataattgttttctcacaaagtaataacagatcacctgtaatacgattgttatgatccaggatgctggatatgatataaataaaatatccaaagatctatgattcgggaagatccagaaaatccatacgattcttgttcctactgtcccaatgatcgaaaggatcattggcacaccagaacgccccattccacgaagtgctccaggaaacagatccataaatccacagaggaaatacgtaaccgttgtatataacaagatttccattccacattgaattacttttgaattacttgtatagatcgtcaagagtttaggaccaaagaaataagcgctgtttcccaagatcatcattgcgacaaatgataagatcagacagtcgatcaagacacgatccattcgtttccattttccaacaccatagttctgactggtaaaactcatgcaagcctgtgtcactgcattcactgtaacatacaaaaatccaaaaatattatttgctgccgtatatcctgccattgcgatcgatccaaaagaattcactgatgactgcaataatacattagagaaattaataacagtgctttgaattcctgctggaattccaacctgaaaaatctgttttaaatattccttttgaatctttaattttgaaaaacgcagttggtaacttgtttctgatcgatacagacatcgaagcacaagtatacttgaaatcagctgtgaaattaccgttccgatcgcaactcctgcaacgccaagatgaaaaatgataaccagacacatgttaagacctgcatttgcaattccagcaacgatcaaataaaacagcggacgttttgtatctccgaccgctcttaaaatggatgctccataattataaagcataaaaaacggcatccccataaaataaattctcatgtaaagagtggaaagattgatcacatcatctggtgtatccattaattctaatactggttttgcaaagatcaatcctacaaagaccataataattccgctgatcagcgccagtgtgattgccgtatgaacggtttcagacatttctttatctttgcccgccgcataaaatcttgcggataaaacattcgctccaagggatattccaataaataaattggtaaacatattgatcagggcagtggttgatccaaccgctgcaagcgactggctcccactaaatcttccaataactataatatccactgcattaaacatcagctgcaaaattccggataacatcaatggtaacgaaaatgagatcagtttatccataatcgttccattgcacatatcaatttcatatttattacgttttattgttgaactcattgccttactcaaataccttttttatactgtcatagtgcaggaaaatcccttcctgtgcaaatactttgatctcatctattgaggcaaacatatagccgtcaatctctgcttcctgaaagtttacatcactgtcatcgatatctaatgtaaaacgataaacatctacaaaatagttatctccttctcctggattctctctcttgtatgtaaacatatatccgccttcagcatctttaacatccagtcctgtttcttctttcacttcacgaagaactgcatcataagatgcttcccctgcctgtgcagcaccaccagacacttcccaccatcctggtgcccatgcctttgtcataactctctttgtgatcaaaaatttgccatctgatcttctaatgactccaagaactgtcagatgatattcatcatcttttaatgtccagtcatttctcttcattgtacggcctgtcagttgtttattcttatcgtaaatgtcccatctttcttccatttttgcatttctccttgggtgtgtttctttattaatcttaacattttacgaaatttattgcaaattgtgatttgtagtttgaagacggaaattattggtggaatattataaaaagaaatcatgtgtctgcaacccactcgcgttcggactcccacgtagctgtactaagctcctgaatggtctaacgaccatccactcgctaagtgcagacgtgtccgtacggttgccgacacatgatctctttttataatattcaaataatttacgtaattcaaaccactatacagtgtgtatgttaaacggtattgactgataagttttggattcgttgacagaagatgaaagagcttaaacagcaccgatttgttgggatgtttatgaagcataataacattactttctgtctgaaagttccctattttacaaccaatgctgtcctccatacacacccacttaaatttttcaatcttgtaattgtccacactttagactttaggtatatgataaaaaataaataaacgatcggaagagcaacattagaattttgccacgttttt

SEQ ID NO: 680 - DNA, 8644 bp, Unknown
  gut microbiota DNA sequence
ttttttcttgtgcataaatagatatattcccattcaccccataagcaatcgcacagacaataacaaacagcaccatatcagctcctccaaacacttctaatccaatcatgatcggtgcgatcagtgtatttgttgcgcttccaaagactgctgcatatcctagtgctgcacataacattggtggtagtccaagtatacctccaaggatcactccaagagatgttccaatcgaaaacagtggtgtaacttctccaccctgaaatccaattgccagtgtaaaaatcgtaaataataactttaggagccaatcataactatagattgtctgtcctgcgaatcctgctgagattatatttgttccaagtccactatatcttgatccgtgaataataaacaataatgctgctaatggaattgccataactccgattcttaaatactgattcatgatcgtttctcccatgaatacttttaacttacttaatgaaaaagaaaacaatcttccagtcagtccaaataaaattccaagtatgattactgatatgatcgttttcgtaccagttaaatttatggtatttttaatcacaactgaaaatttttctaaccccaggctatgagatgtaaatgctgctatatatgcagacgccaatgctggcagtagtgcttcataatccattttcccgattacgattacctcgattgcaaagaatgttgcacttaatggtgtctgaaataaccctccaaatcctgctgccataccgatgactaacattattcttccattctctggaaagtttaattttcttccgagtgcatgagacagggttgctccgatctgaactgcaactccttctctgccagcacttcctccgaatagatgcgttaaccatgttccgatcattactaatggaattagtagtaatgggatggcatctgttttttgctggccaacttcgaaaatgagtttcattccttttagacttaatttactgaatacgtaatacattgctgtgatcaccagcccagcaattggcaggaatggcagtaaatattgataatgtatggtcctgaactctgagattgcgatcaacactcttccaaacaaggcatcgatcgcacctacaataattcctacaacgattgccatgatgatatattttagcagttgtataatatagtctttcttttgcattttcctaaaatcctttcttttttatataatccaaacatcaaaaaagctgataacccctgtgttcattacacagaagtcatcagcttaataagcggtttcgaatctcttcgagggagaacttcattccctttttcttttgttaagatagcatattttttattttgtgtcaattttgtaatttattctaatatttcttttacttctgattcttcagtattgtatttttctgcttcatccgcttaatcaccttaagcctcgtaaattcctccctctccttctcttccaactcattcgaaatcttataaaccaacccggtataagtcggaatcgtaatattcttcaacgcatttgccctcttctgcgttttcttaatactagttgctaaacgatacgccgcgttttcaaccattgacaatttaattgtcagatccttcacctgccgaaacgcttccctggcaacatcaattgattcaaatgtcccatccatcgcatatgtcaactgattctcatgtgcatcatatttcacatgtggaatctctgttcccatgatacttcttgtctgaatctgtatcgagtcctcgatcggaactgtataggcaagttcttctaccttactgatcccatgctggatattcgccctctgaaggcatgcatacgctcttgtaaatgttgtatcaatctcttcctgaatatctttcgcctcatcgattagatccatcagctcacgaatcaggatatttctttttttatccatcagatcgtaaccctgttttgccaatgtaagagagttcttggctgcgatcagatttcctttggtcgggaattctcgtgggtccataatctcaccacctttagctttcctgctcttttggcaggtatttatcgatgatcttcgtgtcgattcgatccaattcttctcttggcaggatctttaataattcccatccaagatccaatgtttcgatcatggaacggttttcttccggcccctgaccgatatatcgttcctcaaatgcctttccaaattccagatattttttatcaattggggataactcatcttctccgataacagatgctaagtttcttgcttctcccactttcgcataagcggaaaataactggtttgcaagatcctgatgatcttctcttgtgtatccttctccgattccatctttcatcagacgagaaagcgatggcaaaacactgattggtggataaatggtctgtccgtttaagttacgatccagtacgatctgcccttctgtaatataaccggttaagtcaggaattggatgagtgatatcatcatttggcatagttaagattggtaactgtgtgaccgaaccttctgctccttcgatgattcctgcacgttcgtataatgttgcaagttcactgtacaaatatcctggatatccttttctggatggaatttctcctttcgatgaagatacctcacgcatcgcttccgcaaacgatgtcatatctgtcaggataactaagatatgcatattacagtcaaatgcaagatattctgctgcagttaaggctacttttggtgtgatcaatcgttctacaactgggtcatttgcaagatttaagaacatacatacatgatctgcaacaccactttcctcaaatgtcttctgaaagaaatccgcaacatcatgtttgacacccattgctccaaagactaccgcaaatggctcatctgaaccatcaccaagagatgcctgttttacgatctgggctgccagctgatcgtgtggaagtccgtttcctgagaagatgggaagtttctgtccacggatcagtgttgttaatccgtcaattgctgaaatacctgtacggatatagtttcttggatattttctgcggaccggatttaatggaagaccgttgacatctcgtttgacatcggtgatcagtggtcctaatccatcgattggttttccgattccgttaaatgttctccctagcatatctggtgcaagagagacttccatcgggtgtccagttaattttgttcttgtattatcaagggacatattttccgttccctcaaatacctgaatcaccgctttatcttcgtataattcaatgatccttccgatttttttcgtttttccatcaaccgtaaattcgacgatctcatcaaaaaatgcgtcctgtactccttccagaatgacaagcggaccattgatgctgcttagtcctaaatattcaattcccataaaatgaccgcctccttatgcattcttttccagtactgcgtcatagaaatcatcaatctgtttacggtaaagatccagtaattgcagattgtcattcggaacatcgtatttgatcgcaatgactttctcaaagatcccttctgcttttagcacgctcattggcattcctctcgctacaagttccctgctcttttgatacagatataaaataacttccatcattttaaattgcttctccatggacacgcaagtgtcatctttatggaaagcattttgctgcagaaatcctaatcggatcacccttgcgatctctaacgttaatttctgatcatctggaagaacatccccaccgatcagttttacgatctccatcaaactactttcctgatttaagatcgccatcagacgatttcgatagtccacaaaattgggggatacatgatctctgtaccagccgccgagatctgtcagatattcactgtaactcgttaaccagtgaatcgctggaaaatgtcttgcgtaagccaaagatttatcaagtccccagaagcaacggacaaatcgtttggtattctgtgtaactggctctgagaaatctcctccctgtggagatactgcaccgatgatcgttacagaaccatccgttccatttaggttgtgcatcattccagctctctcataaaaggcagataatctggaagctaaatatgccggaaatccttcttctgctggcatctcttccagacgaccggacaattctcttaacgcttctgcccatcttgaagtagaatccgccatgatcgcgacatcatatcccatatcacggtaatattctgccaacgtaagtcctgtataaatagatgcttcacgtgctgctaccggcatattggatgtgttggcgatcagtgttgttcggtccatcaatggattaccactctttggatcaactaattctgaaaattcttccaatacctgtgtcatctcatttccacgttccccgcatccgatataaatgataatatccgcatcggaccatttcgcaatctgatgctgtgtcattgtctttccagtaccaaaaccacctggaattgccgcagttccacctttggcaatcggaaacattgtatccagtatcctctggcctgttaccagtggcacacatgccggaatcctgtcgtgaacaggtcttggaaccctgattggccatctctggatcattgttaactgtttttccgttccatcgtccaatcttaacgtgatcatatgatccttgatcgcatgttctccatcagatgccacaaaggtaaccgttcctgtaagatctggcggcaccatgcatttgtgtacgatggctcttgtttcctgcacttgggcatagatatcaccgccatgaagaacatctccttcattgacaactaattttgtgtcccacaatttctccatatcaagcgaatctacgctgatacctcttgtgataaatgcacctgcattttctgcgatcctctctaagggacgttcaattccatcaaaaatgttatcaaggattccgggagctaatgtgacggatactgcctccccgcttgcttccacgatctcacccgattttaatcctgatgtttcttcatatacttgaatcgtcgtacggtctttatccagagaaatgacttctccaactaatttttctttgccgacataaaccatttctgacatcttaaatccagtatttccagccagataaatgacaggtccgttaattccataaattgttccagtcttactcacctgtcacaccccctttaaaggtaaattcttcgtattctttctccaaagcacctgaaaatgaatgatcgatcaagatatttcttcccggaataatcgaacggattcctccaagaaaatcttcttcgctgactgttactgtcattccagttcgtttttcgaggaattcttttttgtcctcatccgaactgttaatatagattgtcaatggattcccatctgcgaatctcgccgcttttgcaatataggatacaagtaattctttatacgcttcggttttcatgtattcttctgccatttcccggacttcctcaaacaatttattttttaattcattctgcactcggcttaattgtcttcgaagttttagctgccctttggatgttactgtatttaactgctgccttgccgatgctgtttcggtcttgatcctcgtatctgcctgcatcacagcttcttgtttatgtgttttgaacacgccttccaatgccttctgatgctgatctatgatttcatttcctctggctcttgcttcttccatggcagcttctctgatatgtgaaatcttttcttctactgtcaatgttgtcaccttccttctacagccggcttacaatttcaatccaatcgcctcattgacataagacgtgataaaatctttcttccgtccagttccgtgcctgtcaggaatctcgatcagaagcggcattttccgctccagcttgatctcgtcgatcaattctggaaattctcttccaaatttctctgtcaaaagcacgatcccaatctctggatcactcatagctttctcgatcgtttcttttaattcatccctttcatgaactacgatcccatcaaccccagctaaccgcattcctgtcaatgtatctaagttatcgctgatcaaatacatcttcataactatcacttcctgatctatccaagtttaccaatgatcataaatgaaatgatcaatccatacagacatacaccttctgccagacctacgaagatcagtgatttacctaaggcacttggatcttcactgatcgctcctaaagctgcgcttgcggcactcgctacggcgataccaccaccaacacaagaaagtcctgttgataatgctgctgccagatatccaagtcctgtagccattcctgcatcagaacctgcttgtgctgcctgtaccggatctgtgacaaacatcatcactccggcgatcacaatgatcccgaagaagaaaaaagcgttaaatgcaatacttcgtttataacgtttctttgttctctctccatgaagaaaataaccaaatggaataaatatacttaagattaatgctgcgatgatcgctaatttgattgctaatgtcataaccgatacctcctaattttccttgcctgcatgattgtcatacggatggaattctcttcctgatcccgtatagaaacgactgaacatttcataatattccagacgcaatacctgaattccgacaaccagaccttctagtccacacacgataatatttccaagaacaatgatgatccagtttggatttcctgctccatctgtgatccctccgagcatcagaacaacttccatcatagccgcatggctcactgcaaatgccccgatacgcacaaatgagatcgtgttagagaagaaacttaacatcgtctcgaacaattcaaaaaatccctgcaccagaaacattccaacgccgccttctgcttttggtttctttccttccacgagctgtcctaatggttcttttaataagaacatgatcactggaattccaaggaaaatgatcatcatgatatttcctggtgttttatgacctgtcatataaagcacgatcgttaagacaaggaatccataaaatacaagtcctgcaactccatttgggctgaagaataaattttctttatccccacgtttctttgcattgatgatctgaaataccatcgcaagcaggatcagtgccataccaaatgcaactgccacaataaatacagtatttaactgcccaacaaacggtaatttcatcatcgcatgcattggcgataaccacattggtttaatgatcgttccttcaaatccaaagaagcttccaaacataaagccaaagaatgtagaaaaaattccggcaacagaaatgattcctgctagattccatttcttgatcttatatagtaatcccccgccgataaacaaacacaatccctgaccaacatccccaaacatcgctccaaagataaaggtataagtcagtgccacgaaaatggttggatccatctcatcatgggatggcagtccatacattctgataaacatttcaaatggtttgaagaatttgggattctgtaatttcgttggtggatcaccgaagaatttttctcttccttcttcaacaatgatcgtgatcctatcatcatcttttgtctcctcaataaatgcctgtgtatctttttcactcatccatccacagagaatgtagtaatcttcctgttcttcattttccatacaggctgccattttacgcacatcgaagttattggataattcttctaacttatatctcgctcctcgaatcttctttgccttgactgataagaaatctttcatctgtttctggacattttcgatttctttttcaatctcatcgatctgatttcttaaatttctgcaaatctctgccggcattccttcgtaatcgtctggaagtgcgatattttcaaaatgcagagatttaaaggtagaatcaatctttcccatctccttatgtgccgcaaaataacatccatacacataattttcatttcggattccttctaaaaaaattgcattgagatcatcgaataaatatttttcaagtttctgataatactctacgtttactcgtccgaatctgactttcatatattgatagccataaacttcttttaaatttaactctaaaggctgaaacggttcaagttcatgaagtttttctaataattcttctttctgcttctttaaccggtcttcccttgccttaaggtccagataatcatgattgagatccctgatcattgtcaggatctcatctgccgtaagagatgtatccatctctccttttggctgtgcaagcatcaatacatactgttccgctttagaaagcggttctttgtaaggattcacatccataaacggcatgaggttatctgtcgttttcaattctgtgatcgcattttccagctgcatttcgtatttggaaaggtaagatgcacttaccctgtcaatatcagttctcggtccggaaatgcttaagaatttcatctttacgatcatgatgcattacctccttgacgtcgttgcttttgcaccagatactgtaatgtctcccgttgcgataatccatagcgaatacattccagtgccgtggtgatcttat

SEQ ID NO: 681 - DNA, 43313 bp, Unknown
  gut microbiota DNA sequence
ccatcgcacagcgattttgttcatttccgcatttttttattgggcattttggcatgtttccgcattttttatttctttatttttccctatttccgcattttttatccaggttgtcatacaaataattttatgattttaatgtgctgctatcatctcactaatttccagaatcttcttcgtatcctccaaacaatgtttctcactctgtacctttccattttccacatcttccataaaattctgtatctgcattgtcatatcatttcctttaaatggataacttttcgtctctgttgtaccgtcattccaatggattatataatcaatgatcctgttataatttggaatcatgatttctcccttggttccgacgatttttgcatatctttccatctcacggtcaatggcgccttctgctgttgcgatgcatccatctttaaaataaatctttgatctaaaataataattgataccttcgatatcttttctctcagtttctatcttatcaatttcttcttcatggattcctaaaataaatccaagaatatagcttccaatatcattcaatgccccaccttgttctttatcaaataaaaatgatgtcttaggcaatcctaatgaatctgagcagaaatttgcataaattgtttggatgtttccaattttcttcagatcttcttttagatgatcataccctgtgttaaattttgtttttaatgcttccgtacataatgtatttgttttctttactttttcctgaatctcatatacatcagtggatgttaacactaacggcttctcacttaatactgggatatggtgttccaatgatcttaaaatccattctttatgaaatttatgtgtgagtgcgatataaactgcatctacctgcggatcatttaacagttcttcataatctttatatactttgacttctggatgctcctttatgtatggatcatccatggaaactgaacgtgagctgatcgcataaatctttccttcatctgttgcctcgattgcctgtacaaactttctggcaattttgccaaatcctataattccaaaattcatatcattttcctctcgtgatgtgtaattttatttctggaaatcaattctttcttcagttataattataatgtaagtggcgtaaaacacaacaggaaaggagacttcaatcatgcaattaccaatttcgctcggcaatcaaggttttgcttctcttcgtgaaaaccattgtttttatattgacaaaactgattttatcagagagtggtgggaagaacaggatgttgtaaccttgatcactcgtcctcgccgttttggaaaaacattaaatttaaatatgatggaatgcttcttttctactcaatacaaagaccgctcggatctatttgatagcctttctatctggaataatcagaaatatcagaaattgcaaggaacttatcctgtaatctcacttagttttgcaaatattaaaggccgtacttttgaagaaacgaaacgtggaatcttacagattcttgtaaaattattcagcattcattcttatatcaaagatgataaaatcctgaattctgaagattgggaatttataaattctgtaaatatggatatgcctgatgatgttgcgagtctgactttgatgtacctgtctgattacctcagccgtttttatcaaaagaaagttctaatctttttagatgaatacgacactcctttacaagaagcttatattcatggttattgggatgagctgacagggttcttacgcagtttattaaatgcttcatttaaaacgaatccataccttgaacgtggattaatgactggaatcaccaggatcagcaaagaatctatcttttctgatcttaataatctctccatcattacaaccacctccgaaaaatacagccagcaatttggattcactgaaaatgaagtgtttaaagctttaaaaagttatcatttatctgacaaagaatctcttgtaaagtcatggtatgatgggtttacttttggatcacagaaagatatttataatccatggtctattacttgtttcttaaaagagaagctgttgaaaccttattgggttcattcaagttctaatgctctgatcagtaaattattgcagataagcaatcctgaaaccaaaatgatcatggaagatattttaaatggtggatgcttaaaaactgaaattgatgaagaaattatttttgatcagttagagaaaaaacgcggtgctatctggagtttgttacttgccagcggttatttaaaagtgtctgatcgttcctttgatgaaaaaagaggtcgctttgtctattcactggaacttacaaataaagaagtaaaattaatgtttgaagatatgatccgagactggttttctgaagattctactccttataatgatttcttaaaagcttttttatgccaagatatcgattatatgaacgattacatgaaccaggttgccgcttccacattcagctcttttgatactggaaagcaagcctcttcctcatcccagccagaacgattttatcacggatttgttcttggattgatcgttgaactttctgatacttataagataacctccaatcgtgaaagtggatttggacgatatgatgtaatgttagaaccttttgatatatctaaaactgcttatattctggaatttaaggtgcataatccacggacggaagattctttggaggatactgtatctaaggctttattgcaaattgatgagaaaaattatgatgctgaattgattgctgatggatttaggaaagaacagatttgtcattttggatttgcatttgaagggaaacatgttttaattggataaacgttgatcaatgaaaaaagataccaaactagtagtgaatcatttggtatcttttttcgcgttataacattttggtgatctcggagagatcttctaagatcacattcggttttacatcgcttgttgttacatcttctcttgtactctctccacttagcactaagattgatgtcacatcactttgatctgcaactgcgatgtcggtatacagccggtcccctacaatagcgatctcgtccggttcgtatcccgtttcctggatgatatagtccagtgtatgtttcgacggttttccaaagaattctggaaatcttcccgttgaagcctctataagttttgctattgatccacagtctggaataaatgctccgccttccattgggcagttccagtctggattgattccaaaatatatacagccattccgaatataatgacatgctttggaaagcttttcataagttaaagtggtatcaaatcccaggactacgatatctggatcttcttctgtcagattcatatcaaaatattgaaattcctggatcagagatgttgtccctactacataaatgctctttccatcataatgttctttaagatatttgatgatcacatgacttgagatcatcatctgatctttcttgattggtatcccaagcttcccaagtttctcaatataagcccgctggctttttgatgaattattggtaaagaagtaatattcccttccggtctcctcaactttctttaaaaagtctttggtaaatgggaatagttcattcccaagataaatcgttccatccatatcaagaataaaacatttgattttttcaaacatatgattcccctgcaaatcccttcattctttatttctctcctcgatcatgtcgagcttttagagccaatgcacatgcagcactgatcagcgctacaactgtagaatagatacctacataaatcgtatcaccttttccatagttaatcagcaatgtacagattgttggtaccatcccagctactaagaaacttggcacatgatatacaaaagaaattcctgaataacgtacttctgtttcaaagtaagaagaccataaagaactgataacagcccagatcaggttatacgcaatactccagccaagaacgattccaataattgtgatcgcaaggtttcctttgcttaattcaataactttcagcgtaggaatactcaaaacagctgatgctaaagctccaattacaaatgttcttgtatttcccagtttttgtgcacaccatccaccaaacagtgtaaatggaatcttaaaaatacatgctatgatcgtaataatataagtctggatcagtggcattccaagccagttaatgcaataggacaagatccatacgataaaaatattataaaatgttccatccacccatcttgtaccgcatccaagaagtaatgttttccagtatccttttaccattggaataaatccgactttatgtttctttccttctgcttcttctgcttctaattttgcctgtgccttcttgtaatcttctgtttccatcatttcacctttttgacggataacgatcaatgtcaagataattgctgctaaaaaaggaattctccatccccatgtaaagaaaatatcttctggtaataataatgttggtactgcgatcaaaatagaagataatccgaatccaatcggaagaccgatttgtggaatcgctgcatagaaagatctcttattctctggcacattttcgtatgccattaagattcctccaccccatgttcctccacggccaaagcattgtgccagacgcattaactgaagaacgataactactccaactcctgcgcttgctgctggtggcaggattccaatgattgatgtcgaaattcccatcatcaataaagatgcatacatcgtaacttttcgaccttttctatcaccaatatgtccaaagaaaatcgcaccaaatggacctgcaatatatccaatcgcaaatgacatataagaaaggattagcgctgttgttccatttcccgtctgtgaaaaaaacactttattaaacacagttcctgctgctgttccatataataagaaacaataccattgcaccgcactttcaaacaatgtgatcgttgcaatttttcgaaaattatttttttccatatattttatcctccttcttgttaatcttcttccccttcatagtatttaaatggccatggtcctgaataatcagcacccgttggaattgtctgataatgtgtattaatgcgatctccttgaagatcatgaatcaaatatcctggatttccaaggaagaagcgatctcctccacctttaaattcctcttttttctcttcctctgtaagatttatatcatttttccccctaaaatcaacttccatctgcattgcgatcggtggacatgtcacacatggaattttatgccatgatgtaaaaatagcagtatgcatatgaccacaacataacgtaacattttcatgtttatttaagatctgtgcaagtctgtctgcctgatcaaatccctcatccattgctggcaatcctgttacaaatggtggatgatgtgtaaatactaatgttggtttctcaggatattctgtaattctttcttccagccactctgctacccgatcgcttaatccacccgaatgacaagatggtttgcttgtatcaattacgatcactcgaactggatattcatcgattgtatagcagatataaggtttgatatcctcttttaccggagtttcctctgtaaacatttctaaaaagaagtctcttttatcatggttcccaggaacaatgtagactggtcttggaagttttctaagtccctctctcataaactcatatccttcccttgttccaccctcagacaaatccccagtcactacaaaaaattctggtaattcataatccttcattgaacaaaaataatcaatcgtctgatgcaaggctttcattgtatctgctttctggaaagataatttcccatcacctcttaaatggaaatctgaaatctgaataactttcataaatgcaacctcctttttcatatcacgctctcgagaatacatttttattgttccggaataataaatgtgttaaaattaattaaacttttaatttttgtatctctgtttctttaattgaattttaactttttcaattgttttattcaattatttttaattgttttaataaaaatacagattattgactaataattcttatcaatttttgtctattttgcatagtttctttctgttttttattaaacttttaatgttattcaggagggatttatgtcatattataaaaaagttacattaaaagacattgcaaatgattcaggtgtttccgtaagttctgtttccatgatcttaaataaacgcgaaggcgtttctttttccaatgaaacggttgaaaaggttctgtcctctgcgaaaaaattgggatatgagatttcttcttccccaaaaaagaatggtacacctgcttacaatactcaaagatccgcaaagtatattgctattttttgccctaacatatcaaactcttattactctacgatcgcacaatccattgaacaggctgcttatcaaaaaggatttaaaactttgatcatcacgactttccgtgatgaagccttggaaaaagagttccttcaggatatgatcaaactgcatgtcagtggtattgtttttactatgatgccccaatgcccacagtttttagaaaaggttgctaagaaatatcccgtgatcgttatcggagataaaacaacagatattgatctgaatgtcatcgagacaagtaactatactgctggagttttgatggctgaacatttatatgaacttggacaccgtaatatcgcatttttaacaaccacgattggtaaaagcctgtctcttgccatgcgttatcaacgtttaaaagcaattcagaacacctataagaaactttgtatgaatgaaccttataatatcattgtaaaagaagccaaaatcgatccagaacttgaacgtaaaaatattttcttagaacacggcgttggttatcaattatgcaatgaatgtcttgatgacagaaatctcgcaaatcttactgcattcatcggtaacaacgatatggtttcttatgggatcatggatgcgatccttaaaaaaggctatcaaattcccgatgattttagtgtatgtggatttgacaatgactttgcttccagtctgcttccaatctcattgacgactgtggagcattacatggaagacaaaggaaagaaagcatttgatatgatctatgaaaagattcaggaaaaggatgacttcttcgttcaagatgataaatgtgtgatccgtattgaatacaaatcaaaacttatttctcgtgattctacgaatgttgctcgtacacgaaaaaatatcaatttataacttttgttattaaaattttaataatgttttttaagataaaattggacacggaactagtagtgatcattccgtgtcctttttgcgttataacattttggtaatctcagagagatcttctaagatcacatcaggttttacatcacttgtttttacatcttctcttgtgctctctccacttagcactaagattgatgtcacatcactttgatctgcaactgcgatgtcggtatacagccggtcccctacaatagcgatctcgtccggttcgtatcccgtttcctggatgatatagtccagtgtatgtttcgacggttttccaaagaattctggaaatcttcccgttgaagcctcaattaattttgccatggaaccacagtctggaataaatgttccaccttccatcgggcagttccagtctggattgattccaaagtatgtacagccatttcggatataatgacatgctttggaaagcttttcataagttaaggttgtatcgaatcctaagactacgatatctggatcttcgtctgtcaggttcatatcaaaatattgaaattcctggatcagggatggggtccctagcacataaatactctttccatcgtaatgttctttaagatatttgatgatcacatgacttgagatcatcatctgatctttcttgatcggtatcccaagcttcccaagtttctcaatataagcccgctggctttttgatgaattattggtaaagaaataatattctcttccagttttctcgactttctttaaaaaatctttggtgaatgggaatagttcattcccaagatagatcgttccatccatatcaaggataaaacatttgattttttcaaacatgagctgccctcctatttgatcacatcatcataaaaatcatagaatttcagaattctcataaatgtgatacggtcacggatatatggtgcaactcttgctgttttttctttcatatccggtgtaaatccgatgtcttctaagctttttactccatgtactttctctaacattgcaacaatctcatctgcttttggaatctcttctatgatcctgatgatctcttctgttttttctcttaatacttttggatcgatcagatctaacagatttggatcatttgtctttttaatgctttcgcataattctttattggtaaatgtcttttcgatcaggtctgtctcaatatccacatgatcttttaccttgaagttgccctcttttaaatattttactgcttcatggtagatgtcacttacctggatcagtccgactcctactttctctccatggtatgcatcgatctcatcattgatcacggccatctcccagaaatgtgccatatgatgctctgctccggatgcgggacgggaatgtcctgtcatctgcatggcaagtcctgataataataatccatacatcaattcttcatatgcgttgatatctctgttacttaatccgtctaaggattcttttaatttatccagtgcatcatattccatctcacagatacggtcacagatatattctccatccagaatatttgtgatcttccagtctgcaagggccgtgtattttcctaacagatctccgactccggatgctgtcagtctcattggtgcatctgtaatgatacggctgtctgcaacgactaaaataggcgattctgcgatcatgctcttcttaaatccataccatgacatagctgcaactgtagatacataaccatctacactggctgcggttggaactgagataaatggaatctttctttcatatgcattatatcttgtcagatcatgaactgttcctgatccgactgcgatcatacagtctacttctttgatcggatctaattgttctttgacttttgctactccgatctcgtttgcatgaagattttctgggtctaatttgatcacagaaattccatttaataatttttctacttctttccctgctgcttcgtaggtattgtcatcacataccataacaagatgtttgtattggttatatggttctttgcttaggatctctgggagtttttttaatgctccttcttctaagatcacatcatctacaactaattggtggtctctgccacaactgcattttcctgtgaattctttgatattgatcttcatatacttttatctcctttcacattccatactaaatattggatctaaaaattttgctaaaaaaattttttgcagatgattacatttacaaagaaataaataataaatatttaatcctgatccagataacgtttcgtaattaccctgtcctttagaaattatcatatctgccttataaaatttctttttcaattcatctgataacaaatgtaagcttgttcctgcaattgtagttccatttccctcaaaggctgcaacctcttgcatacttatattttctgcatcctctatcgatgcatcatttcctatctcttcccctcggacaattacttgtatctctaattgtggatagtacagtgttaagtattttatcagcaacttatccaatacaatttccccacaattatccgtacaataaattactttccttgagtttgccaaatcatttgtaaataatttataaattttatcatccaattttatttctctatactgcatcaataagcgatttaatactttatcgtcaattgtaggcattgctatacaatcaatataatttcctacaattgctaattgaattgccaattttaatggattttctgattgattaatttcttcttcaaattctttaactttttgttgcattttaatattatattttttttttaattttttataagattgtacttcttgtccactatttttataaattttcaaaaaacaatcaatatattctggtggtgaatcaaagctaaagtgttctaatgcatactcaacttctttaatatactgttttctttccaaaagattttttatattctctgctctttttatttctttttcataaaggcactttttacattcttttgcaagttccattttccacctcttttataataataagaggggaaattaaacaatttcccctcaactgatagtgtaaaaaagtagttatatatgatataatagtgttgcattttatttaggaggaatactcagcagattcttcattgcccgacaaagtttttctgagtgtttctttttttcactatttttatcatcttattctcctacatattttcagcaaaaaattcattcattttatcactaacttctttttctgactgaatcgattccagtgctttcattgtatcttcatctgaaatcagttttactaaagtacttaacacttccacctgtttttgagggtctttgattcctaaaacaaatgcaaattttgcatttaattttattccaggttctcccatatgagcgtatggaataggtgttttaaatcgaacaactgcgataaatacttcctccacatattcaacatctgtatgcggaatcgcaatttcaaatgtttctgtttttaatcctgttggaaatactgcttcacgatcgatcaacgcctgtccaaaagtttctttcactaacccttttttatataatctgtctgcaatttctctataaaacgattcctgagactcaaattcctgatccagccagactatgtcttctcgaaaaatctggtccataatgtcctccttgattactcactaactattttttgtatttcatcgtaaattggttcagtccccatataaggatacaacaatccaagtccttgtacaactttcaggtttgtatctattttccctgttcctgcatgtaccactaagtcgcatttatcttcatattgagataaatctgcagaatcaaacaggttcgcatagataacatctgcctgtatttcacgtttctttaattcttctgttaaagttactatgactttttctgctttttcctgtttcatccctccaacaagaagcaaggaaacctttttcatatgatcacactcctattaaaattctgctgcaatcgcctgtgttctactaactccaacacgatctgctcctgctgctactaatgcttcaacatcttctttactatggattccgcctgctgcttttacatgaactttttctgatacagattctctcatcaatttaatatcttcaactgttgccccaccttctgcaaatccagtagaagttttcacaaaatctgctcctgctttttcacataactggcatccctttacgatctgttcttttgtaagataacaattttctaaaataactttgactacagcaggagttgcatctacaactgctttgatgtcattatatacatcatcgtattcaccatttcttaaagctccgatatcaattaccatatcaagctctactgcacctcttgcatatgcatcaattgcttctgctactttagaaaatgttgtatgtgctcctgatggaaatccaataactgttcctatttttacatcacttccttcaagaacttcgcgtgcaatatctaaattgcaaggattgatacaaacagatgcacaatggttatcttttgcatattgaagtccttccatgatttctttttttgttaaatgtggttttaatagtgaatggtcgttcattgataaaaattcctgttttgtcatagttaaaatctccttttatatattggctaattatatgctatcaaatcattgtctacccaaatattgtagaaagtttaataaataaccatgttatgatattagctctgtctaagtttccaattaatgttgctccttttggaattgtaacaccagcagagattgctaatggtgtttctaatccagctaaagtggaggccattaataatactaatcccataacaactgttccaacgatcaatgcacggaaaatatttcctttacacattgctgtaaacaagcatacaatatatggaataactgctaaatctgcgaatggaagaattctgtttcctggaagaataattgctaatgcaatcgtaattggtacaagcaccaatcctactgcgataacagctggttctccaagcgatactgcagcatctaatccaataaatacttcacgtcctgcaaatttcttactcattaattcctgtgcagcctgagaaattggcattaacccttccataaggcatgctaccatctttggcattaaatacataacagctgccaatccgatacctgtctgaagaattacctgaggtttcgctcctgctaatgctccaagtacaataccgatgattaatcccatcatcattggttctccgaaaataccaaatttctttctaagactatctgcattaatattaattttatttaatcctggaatcctatctaaaatccatactaatggatatacaaccggcaagcatcctaatgccgttaaatgaggaaatgaaattcctggcatattaaaatacttttcaatatatggttgtgttaaatctgctaaaacaagtgctaatgctgaacttactgctccaaatgccagaccaatcggaatactgtttgttgctacagaaacagctgctccgataaatgcaaactgccaataattccaaacatcgacattcattgttttcgtaagttttaatgctagcataaggatattaacacctaagcagataggaatcattaatcctgctgctgaccacgcccatgtgattgaagacattgctggccatccaatatcaatgatatccatatgcaatcctagccgctctgtcatttgctgagctaccggtcctaactcatcagataataatcctgttactaaactgattcctgtaaatccgataccaatcgtaatacctgatttaaaagatttggaaacccctgcacccataatgataccaagtatgaatataatgatcggtaacattactgatgctccacaatctaagataaaattaataataaacatatttttctctcctttcttggaggttttatggcactttatgtcccttcacagctgtccaaaccataaaccattgttctggcgtcagacgatattttaaagcttttactggtcgctctgccaatttaatctctcctgatcctgtgattggaattaatcctgctggatgagagaataaccatgcaaatgcaacttcatcaatatcttccgctccaatttcttcacgaatcacttctaaaacttctcgtaatcgtacttcttcctcaccttcacctgtgaaaatacgtccacctgctaacggagaccataacattggatgaattctttcttccatacattgattgattactccattttccatatttcccatacgtagtggagacaattcaacctgatttgtgatcaatggaactgttaaataagatttcagcaaacgaaattcatctggaagaaaattggaaacaccaaaagttcttactttaccttcttgtttcaactcttcgaaagctcgactgatctctgctggatccataaatggacttgggcgatgtaataataatgtgtcaatatgatcaacacccatatatttcagcgatttttcaacctgtcccttaatatgttctttgctataatcataatatttaactctggctgtttcagatttataaataattccgcattttgtaatgatctgcatcttatttcttagatcaggacgtttttttatagcttctccaaatttttcttctacagtataatttccataaatatcagcatgatccatagttgtaattccgatatcaaggcattcttctaaatatttaatcaattcatctgtagttaaattccagtctaaaagtctccaaaatcctaatactactctagaaaactctaagtcatctgccatctttacatattccatttttcatacctccaaagttactgtgcatccagttctttaacaatttttaaaatttctgcatctgtcgcttctttgttcataccagttaaatagttgattgcaaatactgctggtgttttcactgtgtctggcactcttgtacttgatacaataatgtcataatctggtgcaagtccttctacttctgtgatctttctttgttccactttgcaggaatatccattgtcttccaagagttctcttactcttgttgcaataactgtacttgttgcaattccgctcccacaagctactaaaacacgatattctttcataataaaactcctttcttttgtttattcttcaaaatcttaacgatttttaaagtcttagttatctaacaaatattcttttattttttcgatattattagatattttttattttttcttccttacagctattatgttatcatgcaaaattaacaaaaaacagtgaaacatatttctgtttattggaaactttttaaaccaatcgaatttgtttcctttattggaaataaaatagatcagtcgaatttatttccaataaaggaaacaaattcgactgatctattttttgttatttatacgatattatactcatattgttcaatgattcttgcaatttcttcagaatcctttgcttcatgcaaatgctgtctatattcgtcatctcttagcatatttattaaattgaaaaaagcttttaggtaacttttatgatctatcacactcaaacaacaaacaaattcgataggatcagcatcttttattccaaatatgacaggttccttcaatcgaataaaatgcattcctaaacgaatacttccttcttcaacttctgcatgtggcatagcaaatccttttgccaatacaatatacggaccatatttcttaatacttcctaccattgcttctacataactctgttcaatatatcctttttctacaagtggattccctgatttacggaccgcatcttcccaatctgtacattccacatctacttcaatatctgatgctctcaataaatgatgtaacgatggtgatatgatatctgcatcattttcaattgattgcttgaaataatgccttatcacacttcgtaactcccgcatgactccatttgctttttcttttggttctatcaaatcatatattactggtgttatcttatcaatcaatcctcttgctgaaattccatcatcttctaatctatctcgaagagctctactatttcttaacgcatcaattctatttcctacacgaatataatctgtatcattaaacgctacggatactactacatattccaaagagcaattttctaacggcactgttgaaattacaaaatctgcagaatcttctttaatattcattgcttcatgcgctgaaatgacatcgactactctaaatttaaaatgcctctttaacttttcaagtaacaaaattgaagttcctataccagcatgacaaaccaaaattactcgaaacggaacttccttatttttcttacgttcaattgctgcgcatacatgaactgctatatatttaatctcaatatctgtaagttttctatgctgaaatttataaattgtaggtagctgattaatcacaacctctaacacatcttgattatcttctaatacctcattcacaatatctacttctgggtaatccatcggtggagctgaaaatatagattctaagtgatttgacaaattttcaaagaaatcataatcctcattcaaattaattccaagttcagtagaaatattggtaatatattcgcgtgtgatcatctgtatgatcattgcatttttattaaatgcttcgttatttacatatcgaatctcatccaaaaacgcacaaaaataatatatatcattttccgtaatcgtaacatcacagtattgtgcaattactttcaatatatctaacgcaaacaaatagttatcactgtttttctcaatttggttttctaaaaattcacctatttgatttctattaatcaaaattcgtaaaaataatacaatttctcgaaatgaactatctgaaagacttcttttatatcgacattcttgttcacttaagattttctgaatgacactttgatcccctgcttgaacattaacatgccatgataccacatttttagaattttcataatcctgaactgttggctttagcaaatcataaagaaacttcctgcgtttactctctattccttctatccttaaccctttatttgcatgagaaacaactgttaatcctttttctttgataaataatttaatatcctttaaatcattaattacagttgctctacttacctgtaatcgatcggcaatggatgcaagtgttatgtaatctgctgaatttacgatcaaggcagctgcaacttttttccgttcttcttttgataatctataattattaaagttttcttctaatagcaatgacaaactttccctaaaatcctcaggtatgctaatcataccccctcccgaactaatatccaacaattgtcgtttattagattttaatatatgatttatttcttttaaatcatttcgaattgttttttgtgatacatcaaaatattctgcaaatcctgccactgtaatctcgtctttttctctacttaacaactgtacaatctttgtactacgctgattcatcctttatgcctcctgtcataatctatcatgtcaaaagtttatgctaagtagtttatatgacttttctcgataattcaagtttaatttatataaattttttattatagcttaatacatatttcaaaaatttttgtgcaattttactcaattctctgtcttttcgcattgcaagatatgtgtttctttttagctttaattcaggcatttcaaggatttttaacccctccatcatcggtactccattctgtgcgatcaatgcccatcctaatccacaagaaacaaaattttgaatttcctccgatgaggtcctgtaatgaatatctggcgttatttcttgttctttgaaaaatttctgaatttcttgatccattgacgacccttctgtatatgaaattccaggagcagtcattaaatccttcacgtgcaattgttgaattttacacaacggatctttttcatttacaactaatttaattggatactctattagccgaatcaacttaatctcatcatcttgcacttcactatctgaacaaaatccaaaatctattttatcattttttaagtcattgataatgactgctgttgctgctgaataagattctatatttatctttttattttcattttttaaaaagaatccacgaatcagatttggaatataatttggtgacatcggccttgtatatgcaaatctaatattccctgtatatcttttataaataagatcttgcatctgttctgctttatgtaatgattcaaccactgttattgcatacggcaaaaactcttttccctctttcgtaagaaataaaactcttcctttcttctcaaacaaagaaaatccaagttcttcttccagtttctttattgcttgtgtaaggcttggctgtgcgatcaacagttcttttgccgtttgcgttaaatgcccattttgtgctacttttacgaaatattttaattgtgctaatgtcatatatcctcccgattcataggtaaaacctttattttcttcttatattccatattatacattatcgtttcctcaatgtacaatacaagtatcagctgatttctaaataacttatctgcacatgaaaaggagtcttatatgttcgataaaaatactgaattaaaaaaagaaatcgtatactatgcaaaacttttagatgaaaaaggattggtcaatactctagaaggcaatctttccatcttggatcgtgaaactggaaaaatgtatattacaccatctggcacaagaaaacgcttcctaaacgaagataaaattgctgttgtaaaagatgcggaacaaattgagggtactgtaaaaaaatccagtgagatcttattacatgaggcagccctaaaagcccgccctgactgcaatgcagcggcccatatccatgccccttatctaaccgcttacgcttactgcggaaaggatatcaaattaaaatgttctactacattttcactagtatttgaagaaatcccatgtcttccttatggattgcctgggacaattcatatcgcagatggaattgaagatgcaatcaaagaccacgatttaatcttgcttggaaatcatggttgtatcgctgttggaaaaactttggaagatgcagttaaaattattgaagctgcagaagaagttttaaaaatctatcatttaacaaaagaaatcggtcctgttcacaatatttctgatgatgatttagaagaattatataataatcatccaggaagccgcagaaaccgttatgggaagtaagaaggaggaataaattatgaaagctgctttaatgtatggtcccaatgatatcagaatcgaagaaattgaaaaacctaaatgccctgaaggtggatttgtcctgaaagtcatggcagttggtctgtgtggatctgatattcgtaacctgacaactgattctaaatctggtaaataccctcatatttatggtcatgagattactggtatcatcgatgagatttctccttcctgcacagaatataaagttggtgaccgtctgtatatttatcctgctgatcattgtatgcaatgtgaaccatgtagaactggccatagtgaaatgtgtgaaaatcttggaaataatttagatcgtcctggtggttttgcgcagtactatactgttctcccacgacagattgcacgtgatgttatctaccgcattcctgacggaatcagctatgaccgtgcttctcttggtgaacctttatcatctgtctatgcctgtcaagaaaatatcaatgttggatttggagacataatcgtcatcatcggtgctggaccaatcggatgtttccacgcaaaacttgcaaaactacgtggtgctaaaaaagttattatgattgaaattaacgataaccgtttagaaactgcgaaacaattcggtgtcgatcacacgatcaacagtttaaatgaagatccaattgacgctgtaaggaaacttactaatggcaaaggtgctgataaagtcatatccgctaatccatccacgcaagcacaagcacaggcaatctttatggctaaaagaactggtattgttgttttcttcggtggcgttgctaaaggagctttaacagaacttgatactaattatatccattataatggtctttggatttatgggcattatggttctaatagcatgcaagtgcaaaaatcttttgaacttgcaatttctgacgaatttgaagccgaaaaatttatcactcatattttaccacttagtgaaattaataaaggaattgcccttactaaatctggggaagcaataaaagttgtattacatccaaatgatcaataatttaatctcgtacatatatgaaaaaggtaccgaatctaaaactttttagattcgatacctttttatttcacatctaccccaaataccccaactccttagatatctgcccagcagtcctattaagttcatccagtacaaattccttcttcttatcatccacgcgaaataccggaatacttgcactgaccgctgccacgatctttcctgtgtaattccttacaggtactgccatacaatacatccctatccagtattcttcgtcattaactccgtatccctgtttcttcactttctctgcctcatggatcaactcactgacagttaagatcgtatgtggtgtatatgctggaagttcttctttatcttcgaataacttataaatctcttcctcgctcatctcactgatcatcacttttccaagtgctgttgcatgaatggattcatactcgcctgggcttacactgttgttcatgccattgctcgtatattccatcttggaaataatgatcgtttcttttcctttgatcgttccataatcaatcgtttcgtttaatttctttccaagttctaataaatgtgtgcggtcaatattaaataactggttctgtgctggaactgacagccctactttatataattcccaaccaagacgatatctgtttgtttcttcactcttttcaatgtaaccatagtactgcagcgtatctaataaacgatggactgtactctttccaattcctagtgcatcgcttaattcactgactcctgctccaagattccctgtattcttcgcaagatgatttaacaattccagtgctttcattactgtctgcactggatattttggttcctgtgccatgactttcctcccgtttatctgtttttatatcctcttttgatcactatcattatatcaaaccccgtcttcactatgcaaaatatttttcttctatctcgaacttttttccaaattttgaaacacttcatatataatcgaaaaaagagacggtattttgactaaatccgtctcttgatcttttttctttcttctatatatatctcgatctaagatcttatgcacgatgtttcaagtctttaaatgattcttcctgcggtcctctctgatctttcttcgcaatatataaacttcctgttcctgttgcgcaaagaattggtggttcacatgctgttgcagctgtatgctcgattccttccatatccgcatctgtacgatcaagcattgttgctaccttccatgcttcaaacttgcatttgtaagactggtttcctacttcttcgatccatcctacatattccataaagtcacctacgtagactggtgctgtaaattcgattttctcatatcctaagaacaaactaatatctccgtccgcatataccatcagttctgttcctacatcgccccactgaacaacgattcttgctccattaacgagtccacctacatagtgagcatctttctcactcatcatcatgtgatgtacaactttctttccgatcatatctcttacctccattttctgtgttctattattcagaatcattttctaaatgttactttgtactgtgatggtaacattggattgtatttttgtcaatacatttttgtattttttctattatttattatctctttctattatatagaaaatttaattgatatttttctaatgaatcaagaaatactttcccctaactggagagttgtttctgtctattttttataagtaatgcacaatttttctgcaagttattaaacatattgtctaaatatcgttgtttttttgtcaatctttttccaattattgtatttataaacaatctgttacgtgtaaacttttttctttttcttgatattttttctcatttttagaaaataagctctttacattccatctcatgtatcccttaaaatacaatcatagtcattcgtggagaaaaataaagaaaggagtttcatatgagtgtagttatggcaaatgcacttggcactggaattttctgcggactctggcaaggtatcggttcagtacttggacttgctacctggatgggattcgtcggctgtacttcttatttctcagccggatgtggaaaaaccggttttattaaatccatgtgcagtaactatgttggtcttctctggggtatgtgtattatcatgtcaggaaatatcaacagtggcattttgtttggtgcgattgtaactggagctttctcctggctgatctgctatcaatcaaagatcgatctattatccttagttcctaacactttcatgggcggtttttctgcttttgccagtggcggagattggaaaatgctttgcatctgccttgtcttaggaaatattctcggtgtgtgctgcgattattctggaagatttctggcagcaaaatttggtaaagataattaatcaagaaataagagtgaaacaaattttcaaaggagcgtgaaataaagatgagtaaagtaattaaaaaagcttacgcagaagaaatgaaacagggctacaatttaagaacagccatggaagaagcatccagatgtcttctctgccatgatgccccttgcagcaagagctgcccagcaaaaacggatccagcaaaattcatccgttccctgcgttttagaaatattaaaggtgctgctgaaacaatccgtgaaaacaatccattagctggttgttgcgcagaagtctgtccttatggtcaactgtgtgaacaggcttgcagccgtactggaattgataaaccaatcgaaatcggaaaacttcagaaattcttagttgaaatggaaaaacgcgagggtatggaattccttcatgtagaagaaaaacgtgatggaaagatcgcttgtgttggagctggtcctgcttctttagcttgtgcaagagagttagcgttatttggatatgatgtaacaatctatgaagcaaatgaaaaagctggtggtgtcttaacatacggaatcgttccttccagattacctcaggaagttgttgatttcgatattgcaacaatcgaaaaacttggtgtaacatttaagtttaatgaaacgatcgatgctgcacgcttagaagaattaaaagctgagtatgatgcagtcttcgttggaacaggattatggaaatctaaagtcattgatatcccaggaaaagatcttgatggtgttgtaagtgcgatcgatttcttaaaagatgctcgcttaaataaagaaaacatgactcttggagatactgttttagtgatcggtggtggtgacgttgccatggactgtgtaacaacagcaaaacagctgggtgcaaaagctacaatcgtatatagaagaacaattgaagaagcacctgctgatattgatgaagttatggctgtacagagcatgggaattcctatcattcaggaatttgcaccaggtgagatcatcggtagtgaaggtcatgtaactgcaatgaaatttaatggacgtgacaatgaatccgaacttaccatgaaagctgatcaggttgtatttgctattggacaggctgcttgtgacactacaaaagatatcaaagctggcggaaaagtatttactggtggagatatggtaaatggtggaaagactgttgtacaggctgttgctgaaggtaaagatgctgctgctatgatcgctgcatatctgaacaaatagaaaggaggcattgattatgtcattaaagaaagatttatctattgattttttaggagttaaatgtgaaaacccattcttcctgtcttcttctccagtaggaagtaactatgaaatgtgtgcaaaagcccttgaagccggatggggtggaatttattataaaacaattggtatctttatcccagacgagtgttctcctcgttttgatatcactacaaaagaaggaactccttgggttggtttcaagaatatggagcagatttctgacaaaccattagaagtaaacttagaatatatgcgccgcttaaaacaggattatccaaacaaagtcatcgttgcaagtatcatgggaagtaatgatgaagaatggacaacacttgcaaaagctgttacagaagctggtgttgatatgatcgagtgtaacttctcttgtcctcagatgacatctcatgccatgggatctgacgttggacagaatccagagttagtaaaacattattgtgaagttgttacagctgctacacatcttcctgtcattgctaaaatgactccaaacattggaaatatggaaattcctgcgatcgcttctatggaaggtggtgctgctggtatcgctgccatcaatacagttaaagcgatcacaaatattgatattgaaaacatcactgctatgcctgttgtaaacggtaaatcttctatttccggatactcaggagctgcagttaaacctattgctcttcgtttcattacacagatgaaacagcatccagatctggttgacgtgcctatcactggtgttggtggaatcgaaacttggagagatgccttagagtttatccttgttggtgcttctaaccttcaggtaactacggcagttatgcagtatggataccgcatcgttgaagacatgatcagcggattatctcattatatggaagataatggtattgaaaaactttctgatctggtaggtcttgcccttcctaatattgttcctgccgaagatcttgatcgaagtttcaaactgcttcctaaatttgatgaagatgcttgtgctggatgtggtagatgctatgtatcatgctttgatggtgggcatcaggcaattgactgggatgaggaagctcgtcgtccaagattaaatacagataaatgtgttggatgtcatctatgcctgaatgtctgtcctgttatggattgtatcactcctggtgagatcgttattaaacctggacgtgaagaacacgaaatcaaaatcaaaactaagtacgaataagaaatatcacatcgataaggaggtcttagtaatatgaaagaattcgatttgatcattaaaaacggaaccgtcgtaacctctaccgaaagttttttatgcgatgttgcagtgaaagacggaaagatcgctgccatggcacaaaatattgaagcagatgcgaaagaaatttatgatgccgctggtaaattagttcttcctggtgctttagatgcacatacacatatggctatgccatttggtggaactgtttccgctgacagttacatggcaggtactcgtgctgctgcctgtggtggtgtcacaacgattttcgactaccctgtacagcacaaaggagaaacgatccgcggattagttaactccaagaaagaagttttagagaaagaagcctgcgtagactatgcaatgcactgctgcatcactgatttaaatgaaggtgagatccttgaagaaatggaaaaggctgttgctgaaggtatcacaagtttcaaatgcttccttgtttacaaaaaagaaggaatgatggtagatgacggaatgcttgcaagactgatgcttcgtgcaaaagaacttggagcgatgatcaatatccacgctgaaaaccctgatctgatcgattattatacagagaaattcttaagtgaaggtaaaacaagcgcttggtatcattacatgagccgtcctgaattcgtagaagctgaggccgacaaacgtgctgttcactgggctaagcatttagatgctcctttatatctggttcatatggcagataaagaaggtctggaagcttgtatcgaagccaaagaagaaggtgctgacgtattcgttgaaacatgtccacagtatctggaatttacatgcgacgtatacaaacgcgaagatggaagaaacttcgtctgctctcctcctatgaaaggacaggaaagtcaggatgctttatggaaagcaattaagaatggaatgatcgatacagttgctactgaccactgcccattccagagttatgaaaaagactggggtaaagatgactttacaaagattcctaacggatgccctggtgtagaaaacttatatccatatatgctggatgccgcaaatagcggaaagatcacttttgagagagctgttgaattatgctctacaaacgtagccaagatctttggatgcgacaacaaaggatctatcagtgtaggtaaggatgctgacatcgttatctacgacaaagacaaagacttcacgatcagcgttgataatatgcactctgatctggatcatacaatctgggaaggaaaacagttacacggttatccaatccgtacttaccttcgtggaaatgttgtatatgacaatggagactttgtcggaacacctggactcggtgaatatgtaaaacgaagcccaagaaaacactaaaccctataatacaaacacttaacataattttataaaatcagaggattcttatgaagagaaagaaattacgacttacgccgaaacaagctgaacacatgctctttaatgttctggagattggcagcagaatgctcgtctccggagctgaggtccaacgcgttgaaaattcgatctatcgtatgtgtaccgcatacggatcggaaacgaccgaagtcttctgcatgacttacatgatcgttgttacaatttcctccaagcaatttggcacgatcaccttgtcgagacggattcataacctttccctgaatctatatgaattactctatttaaatgctttatccagaaggatgtgttccactcttccggatatgaaaacggttgatcaaaaaatccggcagatcaaagcgctgccaaagtatggtccaataccctccatgctcatatatgctttgatctcctcttctttcacaattttttttggaggcagccttcctgatgccgcggtttccggtctgatcggaatcggtatacggtgtgtcgaacttctccttcaaccgctgcctctaaaccgttttcttctggttgtattgttatcaacagtatcgggctgtatggccgcatcctgtgtttatacaaacgcaatgttttctctggataagataagcattggaaatatcatgatcttgatccctggactgatgtttaccaattgtatcagggaaatgatctcagaaaacatgttatccggcttaacaaggcttttggaagcactatttatttcttcttccatcgccattggttttgccattgcttattatctgctgtaaaaggaggcttataccgtgaatccatatatacaggtcgttgctgcattttttggatctcttgggtttgcgcttttgtttaatctgcgcggacgatggctgttcttcacagccttaggcggaggcctctcctggtgtatatatctgatcagtggatcctttatatctcactatgaacggcaatattttgcagcagcttttttcctcggaatctattccgaacttatggcacgtaaaacgaaatcaccttccactctttatctggtagtaggcatgatcccattgatcccaggagccgcactttattatatgatgcgaaatgccattcagacgaattttaaaatgtttgccgaacgtggcttagaagcagttattacaggtggagcgatcgcatctggtatcattaccgctatggtatgttggaacgtgatcaaattaaatttattaaaaaagtaaatcaatctttaggaggtaactattatgtacgaatgcagtttagaacgaatgacagacaagatcaaaacaatgagtcagttcggagatgccggacacggcggaatcactcgttattccctttctccagaagcactgcaggcaagaggtgagtttgtacgccgcatggaagcaatcggagctacaattaaatttgatgatatggcgaacttatatgcaacacttcctggaagtgaaccagatcttcctggaatcgtaatggcttctcactgtgattccgtaaagaacggtggaaattatgacggaatcttaggtgttatgggagctatggaagttcttgaaacagttgctgaccagaacatccctcataaacataatttaacagctatgatctggacaaatgaagaaggatccttatatccaccagcaatgatgtcttccggtgttatctgctatgactatcttccagaagatatccgtgtaaacttcaaacatgaagatatgttaaaatctacttctgttcttgatgctacaaagacattcggtgctgcccttgatgcctctggatacaaaggtgacaaagcaaaccgtttaaataacaaagattacaaagcaatgttcgaattacatatcgaacagggacctatccttgaagccgctggaaatgacattggtgttgttacttgcgttcttggaatggttaactacacgatcaaagtttatggacagtctgaccatgcaggaacaactcctatgaaatatcgtcaggatgctttatatggagcttctaaagttcttcagtacctgcacgatgaattagacaaattagatccagaacttgtttatacaacaggtgagatcttctgtcatccaaacgtacatacagtaattcctgattatgtagaattctcattagatgcacgtcatgaaaaaccagaagtgatcgaacaggttgtcaaagtaattgaaaatattcctaaagaagttgtaaaatgcaagactgattatgaaattgcatggacacgtgatactgtttactatgacaaagaacttgtttcgtacgttcaggaatctgttaatgaacttggatattctaaccagaagatcaactccggtgctggacatgatgctcagttcgcagcttatatgcttcctacaacaatggtattcgtaccatccaaagacggacattctcactgtgaacctgaatatacatctccagaacaatgcacacagggtgcttccgtattattaaatgcagtattgaaatgtgatgcaaaataaataacatttcgctaacaatatcttcctcatataagtcaaaaataagagatatatcttctaggatatatctcttattcttctgtgtatcttatacaatttctataagaattgtctttttgtttttatgcattttgaataaaaccatctatgctttatctatcttttatgatataataagcagacaggtaatatttattttatgattcgcattcttattgcttatgaatcggaggtaatttatgtcagctaaaaaagcgcgttactgtatcggcgaattatcgaccctctgtaatataccccagaagactttacgctattacgatgagatcgggttattcacaccagactatcgagacgacagtacgcactaccgttattattcaaaatcacagatcgtcaatctgatgatcattaaaactttaaaacaaatgggctttccattaaaagatatccggcagatcatatccgagaacgatgctcagtcccttgaggcgaatatcaattcacatcttgaagcgatgcgagatgatatcatgaagcggatcgatcagtacaccgaatgtagctatctgctccagaagattcaaaatggaattgatattctggaaacgtcctcatctcttccttccgaagaccttgcaatctctattgaacatattcctaagatcagtttaatgtatgatcgttctgagatggaaggatatgattactctgagatgtccttagacagatggatttctattcttcggaaggcagagcattccaaacataagatcatgggacctgtttatgtaacattttatgaagataatatcatgaacaagttcctctcagcaaactccatggtcgaatttgcagtccatatcgaggatacttcttctaccgatgatattcgtgatttcggggattttgatgccgtaaccatgatccatatcggtaactatgaggatatcccaacttcttatatccagatgatgaaatggatccgccagaatagctatactgttacaggaccagcaacagaagaattcattctttcccctctggatgtcaacgatgaaactcgcagggtgaccaagatcattatccctgtcaagaaagagagtaaataaattaatactttgttatacaaaataagaatgccacaccaaaaaggctgtaaacttctttgcttaccccaaagaatttacagcctttttgccaggtttattatttattaatactatgaatgagctttataagatctaatattcataccagaactgtacaactgttgataatggtggatcttccagaacatcaatagaacttggatatggaggatctgctggtacttcaattatcttaaaagaacggacttcgatcagtactttatttccttcctgttttctgattccagcgatatattccatataatctccggcaaaacatggtgtgtaaagacgaacttttttaacttctacacatcttcctgtatttccaaatgtttttgccatcaaacgttttgctgcatcttccatcagtgtgatacttctggcaccatttacaactccaccaccgtaaaatacgtcacggtctgacattctataacgaaaagtgattgtatctttcatcattctttctcctttcaatctgtcttatgtactttattcatcttctggaaaatcatccagatgacgccatggatcaataactgctccatctggctgttctccacgttgtaagtgtttcttaacaaccagtcttacattaccttctgtacataatacaggctcatcaaaccataccatatctcctggtttgtagtcttctttcccagctctgtatgctggtgtagccagcttaaatacttcaatcctacagtctcttgatgtatttccaatatgcgttaaagtagctttgtactccatcatatctcctacatacacatcctgatagatctttacatcttcatatccaagacagagagattcatctccatctaccaagatcatttcttctgtttcaacatctccgataaagtcaaattgacgtccaactggtacgattccatctggattatttgcatccgctgtcgtcatattgtaacttaaataagatacttttctcatgttgctcctccttatgaaataaaagtaattaaattacgccttcttcttttaactgtgcttcttcttcttcggttaacccaaagatctccctgttatgctctcctagaagtggagaaggagtttctacaactcctggagtttctgacatcttcgtaacacatccctggaaataaagatctcctgccgtaggatgttcgcagtgaaccatcatctctcttgcctgtgtatgtggatgttcgatcgcttcttttacatctaataccggtccacatggaattcctgcttcatccatgatatattcaatctctttctttgtatgttccatacaccatccacggatcagttcctgcagttccggcaggtaattcttacaccttagatcattggtttcgtatcttggatcactaagcagctcttcatgtccgatcgtatgacagaatgtatcaaataatctgtcatttcctaccccgagtgctgtaaatccgtccttgcaagggaaaatatcaaatggagcaatggatgggtctatgtttccatttctctgtgatatctcccctgccattgtataattcactaaggcattttcaagaagactgaatattgtatcaaacatagatacatcaacctgctgcccttctccggtcatatcacgatgatgaagggctgccaatacaccaactgttaaataaatccctgatacatggtctgcgacagatggaccaactttgactggatctgtatctttaaaaccagtcagattcaccattccgcccattgcctgcgccacgatatcatagcaggctctgtgtgttaatggtccatactgtccaaatccggaacaggatgcatagataatggatggattgatcttctttaccgtctcataatcaatccccagcttctttgtaaccccgccacgataattctctacaagaatatctgcatcctttaccagatcataaaacatctgctttcctttttcagatttcaggtttaatgttgcaccctttttatttctgtttacgtaacagtaaaatccgctctctccgctcttttcatcaattggaccccatgttctgcactgatctccgtgtagaggctcgatttttaatacgtccgctccataatcagctaacatcatcgtgcaaaacggtccacttaaagctgaagtaagatcaactaccttaattccttccaatgcttttttcatttcgacacctcctatttgttcttatttacgaaacatatttccgctgatgacaagtttctgaatttcatttgttccttcgtagatctgtgtgatcttagcatcacgcagcattctttctacatgatattctttcatatatccatttccacctagcatctgtacagcttctgtggctacatgcattgctgcatctgtacaaaccatcttcgctttagccgctggtacactgtagcttctgccttcctgcttatctgttgctgctttgtataacatatactgagccatctcgatctctgtttctaactcagccatcttaaatgctaaatactgattcttgtataatggttttccgaactgttctctctcttttaaataattaaatgcgatgtcgtaagctcctttggcgattccaagtccctgagctgcaacaccaatacgtcctccatccaggtctttcattgcaacagcaaatccttttccttcttctccgagcatgttctcttttggaactcttacattatcaaagatgacttcagatacctgtgcacatctgattccgcacttatcttcgatcttaccaatggatacaccttcccattcacgttctacgatgaatgctgttaatccttttgtctttaattctggattcgtaagagcaactaccatatagtaatctgctaatggtccatttgtaatgaagcattttaatccattcaggatatattcttttccattccagatcgctgttgttttacatcctgctgcatcagaacctgcatctggttctgttaaacaaaatgatcccattttctttccagacagaacttctggcagatattttttcttctgttcttcatttccatcattgatcagagcgccagagtataatgaagtacatacagaataagcaattcctacagatgaattgatcttagagatttcttctaatgctaatacataggataaataatctcctccctgaccaccatattcttttggaaatggaagtccgacaaatcccatttctcccattttcttatatgcttcttccgggaaacgtcctgctgcatcatcttcaagaactgtttcctgtaatacagtctgagcaaactgtcttgcactctgctgaactgccttctgctgtggagttaattcaaaattcatagtttcatcctttctgcatattgcacattttattttctacctcgtatatttgtagtgtagtctatcctttcagtgcagagtcaagcaatattcttgatattttttatgcagattgtacaaaaaaaagaccaactttccacttactggatagttgatcttttttctcatttagctatatttgtcttttcgaactctattttttcacatattttgatgtaactttcagtcgtgccatagcacgtgacaatgctgcctgtgtatgatagtactgcaaacggctttgtttctgtttgagtcgttcttctgctcttgttttggcctctcttgcacggatgatgtcgatgtcttctgggcgttccaccgtatctaccacgatgactacgaaatctctggtgacatccgcgaatccttcaccaacaacacaaactttccattccccatcaactttaaaacgaagctctcctgcaacaacggctgttactgtatcttcatggtttgctaatacaccgtaaagtccgtccactgctgggaaaatgacgtgttcacaagctccgctgtagaactttttgtcactggcaatgatctcaaaataaaaggtttctgccatttacatcacctcttttgccttttcctttacatcatcaattgttccgaccatcaagaaggcctgttctggatattcatccatttctccatctaagatcgctttgaatcctcggatcgtttctttgacagaaacgtatttaccagggattcctgtaaatgtttctgctacgttaaatggctgagataagaatttctgaatctttcttgcacggtatactgtgatcttatcttcttcgtctaattcttccataccaaggatcgcgatgatatcctgtaattctttgtatctctgaagtgcttcttctacacgtcttgctacttcatagtgttcttctccaacgatgtctggctctaagatacgagagcttgattccagtgggtctacggctggatagataccctgttcagaaatcgctcttgataatacagttgttgcatccagatgggcaaatgttgttgctggcgctgggtcagttaaatcatcggctggcacataaactgcctgtacagatgtgatagacccgttctttgtagatgtgatacgttcctgtaaggcaccgacttcatttgccagtgttggctggtaacctacggctgatggcatacgtcctaacagggctgatacctctgatcctgcctgtacataacggaaaatgttatcgatgaataataacacgttctgtttttcctgatcacggaaatattcggccattgtaagtcctgtctgggcaactctcatacgagatccaggtggctcattcatctgtccaaagactaaggctgtatttttgataactccggattctgtcatttcattccagaggtcatttccttctcttgaacgttctcctacacctgtgaagatggaatatccaccatgttctgttgcgatattatgaatcagttcctgaattaagactgtcttaccaactccagcaccaccaaacagaccgatcttaccaccttttgcatatggagctaaaaggtcgatgactttaatacctgtctcaaacatttctacaacaggactctggtcttcaaatttaggtggttcacgatggatcgcccatttttcttctgattctacaggttctcctttatcaattgcttctccaagtacgttaaacatacgtcctaatgtctgttttccaactggaactttgattggtccaccagttgctgtgacttccattcctttgtgaagtccttcactggctgctaacaggatacagcgcacagtacgatttcccatatgctgttccacttccataacaacttcttttcctttattaacaacggtcaaggcgtcatgaatcaaagggagctgttcagtttcaaattctacgtcgattactggaccaagaatctgtacgatttttcctttttccattttatttcccttccttcactgttactctttctttaatgatttagctccggcacacacctcagtgatctcctgagtgatcgctgcctgacgagcacggttatacataagtcccagtgatcttatcatttctctcgcactcttgcttgcaccttccatcgccatcattctggcgtttaattcactggaaaatgattctaccatcgcaccatagacaagtcctttgatatagtttggtgccaggcggtcaagcaccgcctttacggatggctgaaattctgtcatatgtgatctctttccttttcctgcaaactcatactgatctgggtttaatggtaacacacggatcatctttggttctgaggtaatggatgtgatcatcttagtataaataatatagacttcgtcaagttctcctgatacatattcctcgatcattttttctgcaattcttcttgctctgtagatcgtaggatcttgtgttgtatagaagaaatcctcgtccatctgggctacatttcttcgtccgaaatagttacgtcccatatatccgatcacgaacagtttatcatcttcattaatattctcttctgccatttttgtaatgttatgattataggccccggcaagtccacggtctgcagtcatcacaagatatcctttttttggatgttctttctttcttttgtttaagaaaatgtgctgaagatctggcgtatgtgccatgatatcaagcagagatgcctgaagcatttcaaagtatggagttgtggcatctaactgctttcttgctttctttaatttggaagatgagatcagatacatcgcatttgtgatctttaatgtatcttcgatactgttcatccttgttttaatttctctgatatttgccatagtgatcacctactttaaataggcttctatcgcctcttggatctcttttgcaatgtcatctgttaagactttgccttcgtcgatcttcttcactgtctctggatatttctgttcaaagaatgctgtcatttcttctgtctctgcctttaattctttgactggaacatcatttaacatcttatgacctgctgcaaacagaagtaaaatctgtttatgtaatgccattggatggtacaatggctgttttaacagttcgatcagatgagatccataatttaatgttgcttttgttccatcgtcaaggtctgaactaaactgtgtaaatacctcaagttctcgatactgagctaagtcaatacgaaggtttccggctactttcttcatgatctttgtctgtgctgctccacctacacgggatacagaaagtccaacattgaccgctggtcttacaccggagaaaaataactcactttcaaggaagatctgtccgtctgtgatagagattacgtttgtaggaatgtacgcggatacgtctcctgcctgtgtttcgataatcggtaatgctgtgatagatccaccaccaagttcatcacttaatcggcaagaacgttctagtaatcttgaatgtaagtagaatacatctccagggtaagcttcacgtccaggtggacgatccagcagtaaggaaattgcacgataagcaacggcgtgcttagacagatcatcatatacgatcaaaacatcttttccctgatgcataaaatgctctgcgatcgctgttcctgcatatggtgcaatgtactgtaaagatgcaaggtcacttgcagatgcggatactacgatagagtaatccatagcaccatgtttacttaatgttgttacgatctgtgatactgttgatgctttctgtccgatcgctacataaatacagataacatcctgtcctttttgatttaagatcgtatcaactgcgattgatgttttacctgtctgacggtcaccgatgatcagctcacgctgtccacgtccgattgggaacatagagtcgatcgctaagatacctgtctgtaatggctggtctacagattttctgtcgataactcctgctgcctcatgttcgattggtcttctctcgtcagttttaatctcaccttttccatcgattggttctccgattgcattaacgacacgtccgatcatagcatctccaaccgggatatctgcctgtacaccggttcttgctactttagatccttccattaatccatgatcggaaccaagtaaaacacaaccgatacagtttctttcaacattcagtacaagtccgtggacacctgtttcaaaaataacaagttctccatacattgcctggtccattccatagactgttgcaataccgtctgcgatctgaatgattcttccttcttctttgacctcagttttctggtcatagttttcaatttgatcttttaatacagaaacgactgtttctggattgatactgctcacctgatcctcacctccatgtaagtttctgctgtaattttctcatttttccactcaggctgttatcataaacatggtctccaactttcagtacaaaaccaccgatcaagtctttctcttcttttaaagtaagctctaccttgtccgcctgatattgtttcataagatactgtttgattcgctcaagctgttcgtcttttggcattgtcacatagtcaaactctgccttaatgatcttatctgtcttgcgttttagttcatcataatactcaactgcctcgtcaaaacaagcgatatcatcattatcacatacaacttttaagaaactttttatatcatcaggaaacaacttttccaccacattttctttttctttctttgtgatcgttggattctctaatgcacttaaaagctcttcattttcatgaagcatgtcctgtgctttttgcaaactttcttttttgattccaagttcaaacaatacctgtccatacgtcatggaaattctcttcatatgctagacacctgcctctttcaggaaatcatccaaaagcttctcgttgcctttgtcgtttgcttctttttccacaactttcgaagctgccataagtgcgatacctgcgatctctgtctgaagacctgcgatcgtcttttgtttctcagcttcaatgtctttacgggcattttctctcataagagcaatctcttcttttgtctgatccatcttattctggtattcattcttggctcttgctcttgcgtcggaaacgatctgtcctgcctcatcctttgcctgtgcaaggtttttctcatattcctgcttgatctcttctgcttcagctttcgtctgtgctgcatcatctaagtcacttgagatcattttttttctttgctccataacctcactgactggaccaaataagaattttctaagcaagagataaaatacgacaatgttgacgatcggccagataatgccccagtctaatttcagaaacatatcttccgcctcctacttctatttcattacgatcaacagaatcgcaacaactaatccataaattgatgtagcttcagctaatgcacaaccaagtaataatgttttattgatatttccagcttcttctggctgtcttgcgattgctccaagtgctccatttgttgcaacaccgataccaatacctgctcctaaacctgttaatactgcaattcctgctccaatagctgctaatcccataattctaatctccttttaaataaaaattaaatttgtgtatctgtcatgatacatcttactcaattgattcactgataaacagtgatgttaacaatacaaatacatatgcctgcaacaacccatcgaaaaagtcgaagtaacaactaaatggtaatggcacgattgctggtgcgatatgtgtgatcaattccatcaaaacgaatgctcctaagacatttccaaaaagtcgcatacacagtgataacggtcttgtaaataattcaaggatgttaatggccgccatcattggcataggttccacataactgtgtatatatcccttcaatcctttctcgtggattccggaatatatgatcaaaaacaaactgatgatcgctaatcctgcggtaacattcagatctttcgttggcggtttcgctctgaaaaatcccgaaatatttgcacagccaagataaatcagaattgttccaagaaacggtatgtaacgtttccctttttcgccgaccagaccaccgatgaagttatagatgaaaccaactaaggcttccacataaacttgcggtccttctggtatgactttcaggttccgtacgaatatgatgcagagcaacactacgattgccatgatcacccatgttgttacggctgactgtgatactggaatacctccgccgatggggatcgtaaagcttgtcttaagtgacaactcttccatcagataatctcccaatgaacccattttctcctcaccttctttaattttaattttttgcagagatccaagggtttaattcctgcaaaagtaaaagagtgcttacacaatacatcgtaaacacccttgttctgaaagctattttatgcctcaaatttttatttgtcaattctttttccgttaagattgtgtttgttttttgtttaatacttacaaataaccacttctaaatttagtaaaaagcaccaaaacataagggttttcagtgtatacaaatgaacgttagtcagttttttgtgttaagatatgataatttttttctgcttcttaactgattcttaactgttttttatcatcttcaaagtgattttgtatacaaaaaaagacatgcaaactgttgatcacttctaaaaaactgtctgcatatcttctttattcatatggcttatatcttatttttatataactttgattttctcttctagtcttcgatcatattgatacgacgaatgtgtctctcatcatttgagaattctgtctcaaggaatgtatcaacgatatcaagtgctaaaccttctccaacaacacgtgctcccatagcaagaatgtttgcatcattatgttctcttgttgcgtgtgcgctgaatgtgtcactgcaaagtgctgcacggattcccttaatcttattcgctgtaatagagattccgattcctgttccacagattaagattccctgttttacttctccgtctttgactgcattcgctactgcttttgcataaactggataatcacaggattcttctgaatagcatccataatctttcactgcatatcctttttcttccagatgtttgataactgcctgttttaatgcatatccaccgtgatcactaccaatacctatcattttgtttcctcctagtctttcttgccatattttcttaactaaacgggcaatctgttcaaaacagcgctcgtagtcgtcatcttccatgccatatgggtcaatgatcgcaccttccactctggcatattcattcaatgtcgcgatctctttgtatccatgatattcttctaagatcttatctttctgctcttctgtcatggttaagatcagatcgctttcttctacttcttcctgcgtaagctgcgccgaccgaaaatcaagactttcaatcccgcacgtctttattaccatgtctgctgctttgacatggacaggttctggaaataatacgaccagccctcttgagatcacttcaacattcttctgatctgcatccaaaagatactggcgaaggatcgactctgcaataaagcttcggcacgtattattcgtactcaccattattatcttcttcaaaatattctcctttttaaatacggaggatttcatgtcctgctgcttttaccatacggttcatgatcgcctcacttaaaggttcaccttcaaatccttcggaatagatcatatcaacatccttatggtcaaattctcttaatacatcatataaatgtgctgttaccgtctcgagatgtgctctctgtcctacagaaacaacttcatctgcctgatagaggtcttttgtctcatccgatgcaatgattcctatcttcttaccctgttccttttgttctttcgcaagctgattgatatggtttacgactttctcctgatcatcgcctaatacaagcaccatctccgcctttggtgcatagtgtttgtacttcattccaggtgctcttggaattccgtgatcgcttgcttttaaagatgtattcatcaatacttcacacccaagaaattcttccatggactcctttgtgatccatcctggtcttaggatcactggaactatttctgtaaaatcaatgatcgttgattctacacctaccataacagctcccccatctaagatcatcggaatctttccatgaagatcttccatgacatgttctgcttttgtcggacttggacgcccagatgtattcgcacttggtgctgcgatcggcactcctgatcttctgatcagctctaatgcaactggatgatccggcatacggatcgctactgtatcaagtccgcctgtcacacaatctggtacctgatccgctttctgcaagatcaccgtcataggtcccggccagaaatgttccatcgcacgtcttgcattgtctggaatctctttgaccagagattctaccatctgcatatcacatacgtgaaggatcaatggattatcagaaggtcttcctttcgctgcatagatcttctttgccgcatcaggaagtaatccattccctccaagaccatagactgtctctgttggaaatgcaacaagttcgcctgctttgatcagctctcctgcttcttccatgtcctttttgcaatcttccatattattaatttttacaagtcttgtttccatattaaactctcctgacttttaatctttcttcaatgattaaatgtagtcatttggatttattataacattaaatatggaaaaaataaagtattgcaccattgagacttcgcaatttatacttttgatacttacatcatataatgattaataaaaagaaaaaggatgttcttcctatgaatcaacaacatcgtttcatcttctggggtgttcttctgatcgtcgttttattatctgtttcttctattacattccctatctttgttgcacagactatcaagaatcaaaatgtgatctgtatcgatgccggacatggcggttctgatcctgggaaggttggaaattcgaatattttagaaaaggatatcaatctttctcttgcattaaagcttcaaaaacttctggaaaagaaaaattataaagtatatatgacaagaaatggggactataatcttgcggattcgaaagaaaatgagaaacgaagtgatctatccaatcgaaagcagctcatttttgagaatgatcctatggcagtgatcagcattcatcagaatagttatccaagcagtgatgtccatggagctcaggttttctatccgcaagggtctgaaaaatcaaagcagttagcggatcatatccagtctgctttgatcaaggggcttgatccgaacaatcacagggaggcaaaggcaaatgctgagtattatctgtttcgagataatccttatccgatcgtgatcgtggaatgtggttttttatctaatcctgaggaattaaggtcacttcaggataataactatcagaaaaaagctgttcaatgtatcttagatggcattgaaagctatctagcagatatataatgataagagtgtcaataagtataaattgcttatttgtgcaagcacacaatttatacttttgacacttacatcatatagttatgaaaagccattgcggttatatcaaccacaatggcttttcattaattttatatctttttcccgcagtacggacaatagtctggtgagaatcctcttaaattcaataatcctctacagtaaggacatctcataaaacaaattgcaataatatttccaaaaataacaattattattccaatagcgatcacaattttttgcatcttctcatctggtaacaaagcaccgaatactacgataacagaagctaacaaccaacaaatccaataaatttttctaacttttcgatgatccataatagttttcctttattttatattttacaaaatcacttgaattaatattatatcatattccagatggactaggtggattggataatatttcatacgctcaagttatcatacctaaaca

SEQ ID NO: 682 - DNA, 13768 bp, Unknown
  gut microbiota DNA sequence
tattttacatccatttagctatacttttacattatattaacttaatctaacataaaatttacaatcatataatttattcaaaaactgtttctcctaattcagtaaaacgtattatatattattatcagaatataataataatgagctgggaaattaatctcccagctctgctatactctttgcatattattctttgattttctgatattctatggcgtagatctctccttcctgatcgttgacatactctttcatgtaagaatcatcttcgttgagtattagatttagatgttccagattcgcatcacttattgtaatgccgtccacacggatcgccagtccttgtgacagataataagataattcatcatgacttgtcatacgtaccctccaatcttattaagcagatgtttcttgttacaatttcctaccatatataatgaaagtttcttccttacatggtcagtgtttcttgtggtatataaaaattccgcactgtttccaaatgtaagtcttgtcgcgacataatgtaattatatacataattggaaattatttcaagctatttatggataaaattgtaaatttcttgaaaaagctttacacaccgcaaaagtaatactataataacatcaaagtagtaaaggagtgatgattatgaaaatagaacgtatcagtgataatcagatccgatgtactttaaataaagaagacttagaaggaaaggaaactctgttaagtgaactggcttttggttctgagaaggcaaagggtctgttccgggaattgatgaataaggcagccacagagcttggatttgaaacaagtgaagataatcctttgatggttgaggcaattcctgtatccaaagaatgtctgatccttgtgatcacaagagtggataacccggaggatttccgtgaacattataaaaaactgccgaaaagtctattggctggacagctcgcgggagctgatgaagacattttatctaatcttccagatctgctttcagattttggaaaatccgcattttcagcagattcaggaaatgatatgaaacgtgtactcgccgatgatggagttggcatctttgcttttacttctctcgatgacgttgcatttgcttcaaagttactgaacaagtacagcctgtccagtactttatataaagattctgaaaaccagtgctactatctttcattgacggatcttgacgattcgccgaacagcacggtcatagatgagattcatcagcttttatcagaatattgcaaacgtctgccaaacacatatgcaacgaaagctttatttaatgaacatctgacgacgattattgaaaaacaggccgttgaagaaatggctgcttattaaaacaaaaataaacttaaaacaagaaaaaggaattcccgtggagattggaattcctttttctttctcaatttatgatacatagtatacctaagaacaatatagtaatatatttgttccgttatttgcacaataacacactcgttgataagagacaatattgaaatcatatttttataaaaatggcatactataatcgttcattttacagtatgccatttctaaattctattctctatctgtataaattgctttgcagattgttaccttatgatcatgaatatcatcaaataattgtttcaaatgatctaaatctgaacggtgtgtaatcaaatctaatacttccagttttccttcatttaacatatcaacagtatatttccattcattaaatggaagatcgctgtaatagttattccatacacctgtaaaacgtaattcttttcgaaggatcatactgtgctggtctaatttgatcgttgtatctctatgtggatttccaagaagtgttaccatcgcaaatggtttgctacactcaatggcctgattcaaagctgctgatgtaccagttccttcaataactacatccgccatttttccttttgtcaacttgctgacttcttccacacaatcctgtttcatggcattaatcactgtaaatccgcgttctcttgcaaattccgctttttcttcatcaatatctacaagaatcactttcgttccaaacatcttacaccatcttccgatcagaataccgattggaccagctccgaatacaacaacagtgtctccacccttgacttctccttttcgaatggcatgaagtgctacagttgcaggttcaacaattgataattcttccattgttgtcttaggattattggaaacaaccaaatgccaatcggatggaagcaggcaatattctgcaaatccaccatcagttcttgaacctagattatgataatcactacactgtgcatactgaccaatctgacagctatcacattgtccacacggaacaactggatatacagctccaaccttaccaatcagatcaggatctgcatcttctccaacagctacaacagttccggcatattcatgtccaagtgtcactgggtatactttagttccaagttcatatactcgcggaatatctgatccacaaattccacaagctccaactttgatcaggatttcttttccccttggctgtggtttttccacttcttctaaacgaaaatcattgattgcatgcaatcgcatcgctttcatggtcctaccttctttcttctactcagttcttttctgtccgatatcttctatctttgtactcggtgtctattataaaatgtctttgacttctacaactttgtctgcaggaattacctgaatcttaacatcaattcctttatctaagaattctttaattgcttctctttctgctggacttgctgcaatatttttatacagtgttgttctgtcgttgttgattcccattccaccaaggttgatcgcttcaagttctactccacgatcgattattcctttgtatgaaactggtgattttgcaagaagaattgttggtttgcttaatcctgcttgtaatacttctgctgctttttcttctgtaaatacttttactttcacgccagttggtgctgccatttcaagtactgtgatcataaattcatctttggctactttattatcaattactatgatttcttttgctggaagtaatttcatccatgctgtcataacctgtccgtgaattaatcgatcgtctactcttgctaataatacattttccatatgtataccctccttacatttctggtttgattaatattttatagaaaaattctgatttatctttcatcagtttcactgcttttaatgtgtcttctaatggtattctgtgagaaatgaacggttctgttttgatcactcctgcatttattgcatcaaggctctgtttccatgcatgatgcgggaattctttgaattcaaaactccatgtacctttgatcgtaatctgaaaacgtaagatcttttcaaatgtctggttttcaatctctaaagaatgtactggtcttcctaccagtcctaaagttccttccattcttaataagctgattgcctgtttaaatgctgcacctgcacctgatgcttcaaatgcccggtcgattcctgttccatttgttttttcttttacgattgcatcaatatcatcttttccgatgcatagtgcatcaactaatcccatggattttgcgatttcaactttcttttcatcaagatcgattgcaaatacatgttttgctccaaatgcttttgcccactgtgctacgaagattccgatggccccgagtccaaagactgctacactgtcaccataattaactctgcagttctgcacaacatgaagtgccacactgatcggctctaagaatgcaactgcctcttcatctacattttctggtacaaataacagattagattctggtacttttacatattctgcaaatccaccatcatttcttgatcctaaaaaatcataatgttcgcactgtgcatactgacctgtttcacaagatttacatgtcttacatggaatcaatggaatcactgcaactctttttccacagagttctttggatactcctgatcctgcttctgcaatcgttcctccaaattcatgtcctggaattgttgggaaatgatatgttcctgtttctaatactcgtggaatatctgatccacaaacaccacatgcggaaacttttactaaaacatctttttctctaagttctggaattggcacctattcacacactaaatctcctacaccgtgtaaaactgctgctttcattgttccttccatttttatgtcagtcccttcctaatctgattctttcttctgtcttacttcatttggtctttgttttaactttaataaaattttgtatttattctaagtttgcatgcatcttccataacgcatgaacatcttcaatctgcttcttctctacgatcatgctcgccacagaatcttctaataataaaaggctctgttcaaacaagctactcataacctgctctgattttacttcatcttccaaacctaatttcgtactgcatggaattcgtacaaataagtcttcatattctttcatggaactgtgttcattggaaccaatatgcacaatctttgcattgtatttctttgcgatcttcatgatctcaagtggtacgacactttctccagaaccagatcctacaactagtacatcatgttctgtgattgctggttcatcgattgctcctacatagtttgctttaattccaagatggtttaaacgttttgcaaatgcctgaagcataagtaacactcttccgacacctacgacaaatacctgttgggcatcacagatcatatcaacaaactgttctacctcttcttctttcacagccccaaggcttttttctaattcatctaatacaatttgtttcttttcctgatatcccataataatattcacctagcctattgcctcatcaaaattatgtttcattatctctactgccttgtgaatatctgaatcaatgctaaataaacctgatccgcctaaaatatagatatctgctcctgcttcttttaagcgtttgaatgtttttggattacaagatccatcaatctgaatcttataatgatatccattttcttcacgaagtttctttgcttctgcaatcttatctaacatttcttcaataaatggctgccctgaaaatcctacatcgactgtcataatcgttaacagatcgactctgtttaaataatgttttacagattccagcgttgtcgctggatttaataccagtcctctcttgcagcctaatctttcaatttcattatagatacggtatgcatctccattgatggtttctgcatgtacagaaatgatatctgctcccgcttctgcgactgtttcaatccagtcatttggttcggttgtcatcaaatgtacatccattggtaatttgctgacttttttaaacgatttgattaaatccggggagagtgtgatattcttacagaaatgtccgtccatgatgtcgatatggtacattcccacagattcatttaatacttctaactgttctttaatctttaaaaaatccatacacattaaagatactgcaatctgatctttgttcatcttattcatcctttccatcttctttactgctgtacattgctttacaaatcgtgatattatgctgataaatatcggtaaacagccgttccatctgatcaagtggtgctttatgtgtaatcaggtcatcgactttgaatttctcctgatccatcatctccactgtatatttccattcatttcttggtgtacttgcataataggaattccatacaccatgaatgttgatttcttttcttaggatctggctgtggtttgccagctggatttctgtatttttgtttggatttccaagcagcgcgatcgttccaaatggttttacatattcaatggattgattaaagcctgctgaacttcctgttccttcaatcaccgcatctacctgtttttttccagttactttttccagataatctccaatatcttctttcagtgaatttacaatatttaaatctctttcttttgcaaattctgttttttgctcatcaatgtctaccagtatgacatgttttgctccaaaaatttctgcccatcttgctgccataattccaattggtccggctccaaagatcaatacgttatctcctgcagtcacctcagcacgtctcactgcgtgctgggcaacggttgcaggttctaccatggcaagtgcttcactcgtgacatctttattttctgaaaagatcaggtgccactttgatggaatgatacaatactgtgcaaatcctccatcacatcttgagccaagatagttatagtttgtacactgggcataatgccctgtctcgcaactttcacattgtctgcaaggaattaacggaaatacacttgccttcttccctatgatgtctttatcttcctgtcttgctgtatcgacgataacccctgagaattcatgtccgatcgtaatcggaaatgtatgagctccaagttcaaatactctcggaatgtcggaaccgcagattccacaggcttccaccttcattaaaatttcatcatctttgatatctcttaattcaacatcttcatacttgaaatcaccaattttatgtaatctcattgctttcatattaaaacgcctacctttttaatgttttgattccttctgttcctgcctgttcacaaaggattgccagttcatccatcgtaatctcatcagatttttgcagtgctgctgtaatcagcattgccatatttaatcctgttacgatatgaacatttaattcttcacttagcatacagatcgtattaaatggtgtaccacccattaagtcaacgaatactacaactccatctccagtatctaatctctgaatcgtttctcttaattcttctttgtatgtatctgggctgactcctggctttaaggaaacactttctgtttgctccattgttcctgctaccatggaaacactatctaaaattccttcacataatcctccatggctgattactgcgattcctaccatttttatttctccttctataacttacaattcattctcctatcattttcttcttatcttatgaagcaacggctaagattcctgttaaggaagcaatgattccgactacaaataagataacgataatataggttgcttttactttcttgttcaataatttccatactaataatgttgctaataatggaagcattcctggtaatagtgaatccaaaatgttctggaagttgattgctacctgaccaatcttaaatgcgattggtgtcttgatcgttacacgggttgctgccatgtttccgactaccatcagacctacgatactaaagatttctgtgatcttatttaatgttcccgcacttaaaatctttaagattgctgatttaccttgtttatatcccatcatgtacattgcatatcccatacctaacattaagatcttatatgcaatttcaaagatgattggtcctgcaatatttcctgctaatgcaaggctacatgcaataccggcaaggattggataagcgattccctgtgaaactgtatcaccgataccagccataggtcccatcagacctgtacgtactgcattgatatcttctgcatcaatatctgcaccattggctgcctgctcttccatagatgctgcaacaccatggataactgttccgatccaagatggctctgtgttgaagaatactgtgtatttctttaatgcttttgcctgttcttcttttgtcttatataaacgacgcacgattggtaccattgcatttgtagttccaagtgcctgaagtcgttcatagttgtagcatgtttcactggaatatcctaacaaccagtgttttaccaaatcttttttctgtaattttacctgttctttcttttcttctgccattgtttattcctcctctccttctttcttcattgtgaataagtagattaagacaccaacgcatgctgcgaagattgtgattgccattgtgtctaatttggcatatacagttgcgaagtatccaatgaagaagaatgcaacgatctttttcttagcaagaaaacttaataacattgcgattcctaatgctggcattaatgcacctacaacgtttaatgcatcgatgatattctgtggaattgctgcaagtgcttttgttgcaaaatctcctccgaaataaactaagcaaaatgctggcactccataaagaattgttgatgtgattcctgatggtacatagttcattaaacgaacacctgtaatatttccctgttccagatatttatctgctttatgtacccaaaaagcgttgatagtcatatatgcctgattgatcaaaatacctaataagctaaatggcactgcaaatgttggtgctaaacttggtgatgctccagaaataattgttaatgctgtaccgaagactccggctaccattaagtttcctggcattgtacctccggctgtgatccatcctaaataagtaagctggatgtaagcggctgctttcataccattgattgggtcccccataacgactgctaccatgaatcctgcccagattggatacagccatgttcttgtgattacatggctgaaccaccattggcttccgatcgcaataagggcaactaagattgctgaaattaacatatacatatcctcctttgcgttaatttttgctgatttattttatgtttatattgtatcgttactcgtacactgctgccataccaattgatttcatcaatgtggcaacttctatcaggaaatgtgtaccagaacttttccgtatcttgaatccttttgtgttctcagctctacttccgcttcttctaactggatttctttgctaataaacatagaagcagagaactgattacttgataataaacgtacggcacgctccattgtatgcggatttacataggatgcacggatcgtcagttcttttctaaatgcttcatatggataaaaatcgatggcttctccttctttaccaaggccaaataaaacaatcgtcgcacattttcctgcaacctcaaatgctgtccgcattgttacctttgcaccaacacattccatgactttatcaacattttgaattccattttgtgcaattaccgtttccacattttccacatttggattgataaataaagttgcgccgtaatctttggcactttctcttttattttcctgtgtttctatgacgatgatatgtgatgcaccagcaatactgcaaagttttaccatcatacttccgatcattcccattccaatcactacaacaacatcgcctaacttcacatccagcagatccattccatgaaggcagcaggataatggctccgccagtgctgcttctctaaggcttaaatgatcaggaatatgatatacatttgactctggagggcaaatatattgtgcaaatccttttaccacaccgtttccgttctcgcacatatgcggcatattatttttacaaaaaaaacatgccccacatccccagtttggatcagcgactacgcggtctccaactttaaaatgtgttacatgttttcctgtttctacaacaactccagacacttcatgacctaaaggaactggcggtttcattggatgtgatccacactgtccatgaaatttgtgtacatctgtcccacagactccgcaatacttcactgcgatctttacaccatcttccttaagctctggttctggaaattctgccactctgaaatcttctacaccgtaataaactcctgctttcattttaaaacctcctactcattttgtgtaagtttattttaaacactgtcaaaaacctttatccagtccaattgatttcctctaatgtggcaatctattctttattcatttatttttgccttgcggctttttattttttcttggtttattctttttattcttctctggtttcattccatactgataccattcttccccttcttcacgatttacaagcatctctggaatcaagatgatgatgataatgataccgatcaagatcgtcagcattccccatggaccaaccctcttgatatactttccaagaatcaatcctacaagtccgatatctggttccggaaatgtaacatgctctgtggcaaactgcccgatatatggaagaaataattccggaagtactgacattatcacacctgccacaaaacctccaagcactgctcctcgtcttccacctgtggaattaccgtatactccggcagttgccccgacaaagaaatgtgccataatccctggaataataactgtgatctggcatgcgatcatcacacccatggatactaatcctccaacaaatgatgcaaggaaccctaccatcagggaattcggtgcataagtaaatacaaccggacaatcaactgctggctttgcatctggaatccatgtgtccgcaatacctttgatcgcaggtacaatctcattgataaaccaacggattcccgttgtgattatcacaaatcctaccgtaaatgtcagtgcctgtaaaacagcataggtcaggtaactctttccatctgataagtttgattccacataagatcttccacttgcacatgctgcaaccacataaaataagatcatagtaaccgatacggtaatagatgaatcacgcaaaaaggccagtttcttcgggaatttcatatcttctgcagattttgaattctctccgtatatctttccaagccatgctgctagaaaatacaccataccaccaaaatgtcccactgctatcttatctgtcttgcatattttttctgtatatgattgtaatactgccggtgaaaataccatagaaattccgagagccagacttcctaacacataaaccatgattccatgaacattcattgaagttaatacgacaacgatcatgctcgccatgtaaagcgtctgctgtcctgtcaggaacacataatggaatctcgtgatccttgccagaaccagatttaccaacattccaaggatcatgatcactgcaatctgtgttccataacgatccaccgcaattcctgaaattccttcgacactcaggatcaatccagtggtatgaaaacctctctgtatcataagtccaaacgacgctactgcttctgatatgatattcccgccgatactgatgatcataaatccgatcatcgcttttaacgttccttttacaacgacttcaaatccttttcgctgtaaaaccagaccgataaatacgatgacaccaatcaagattaccggttctaataagaagtcacggactatatcgatcattcaaacgtctcctctatatctgcttttaatttgtcatataacttatgttccagctcatccatatccacaatggaatccaatacgatcagattcggaagataactcagcgtatcttccagatcttttgctgtaatgaaataatctgcatcttcttctgacacctcaaatactgctccatgcgttgtcttatacttatcctgaagtccccatttttgaagcagtgttccaatattgatttctacaaaaaaacttgatccgagtcctgttccacatactgtcattatagtcttcatatcattctcctatcaattccaagagttctttctcatccttgatttcttctaatcttttcattttctcttcatcgttgcaaaaattagcaattcgatgaagattcttaaaatgttccatctcaccctttgctgcgattgtgatgaaaactcttacctgattattgaaaaatctgactttattttttaccatcaatacgcacattcctgattttattgccccgtcctctgtcctggcatgtggcatgcagattcctttgccaaggtaaaaatatccgccgtatttctcgatattatctaaaattgcctgataataagtatggttgaccgcccccttctcttccagaatatcacaagtcatcttaattgcactctgataatctttaacctcctctatcactcgtgtacaaatcatatccagtctcctatctaatttccctgatgtcatcataatttgttacgttcttaagctttgctacattgtcttctttcattaaaatctgcataagttccacaagattcttgttctcttctttgcttgcgatcacaatgatcactttcacatccaccttgctttttgtaccgaattcaattggtttggcaagtttcagcaatgacatatgatcttcattcacatgctctggtggtgcatgcacaaatgcgatctctggaataaataccatgtagtttcctatcgtctgaatgatctttatgatgtcatcaacatactctttctgaatataattatattgtatcaatggatctgccgcaacctgtacagcctctttccaatctgaaattttgagattaaacttacaacaatctttttggaataactcttccattggcatcttatgaattgcctccatctgctttgccagatgctcatttcttcgattataagataaattggtaaggttccttcggatcacattgacatcttctgcatttagaagtggatttacctcgattactttatattgattcattttcaatggtactgtactgatgataaaatccggattgatattttctgcctcttttatcacatcactgactctgcaggtagaaataacattcagttccggaacgatcatatgtaaccgctgttttaacagcactgccgttgataatccgctgttgcatacaacaatgacatttactgtaaagttcatattataattttcctgaaacaatgtctcaaaatacatcgtagtatatgcgatctctgtttctggaaatactacgtcaaacatggcttcgtattctcttaagatcttctttgtgatttcatacacaaataaagaagaatatttaatatcttccatcagaggattttcaatctcaatgtgattcttcagacgataaatagctacttttagatgcatcatgatctgagtactgatatcctgtcctattttcatatcaatcttcgtaatcctgcaaaattcctgaatcagactctgcgttgccatcatgatctttcggtcctcgattgtgtcttccagagatattcctttaatcttctttgatgcattgagcagcatgatcatatatagaatatcaccttctgttacttgtatttcttctcttttaaggatctcttctatgatctgaaaattatctggcttttctcttcctctaagatatcctgtatctgctcccatataaaatccgtcaaaagccctgtttaacgttatcagaatcatgttctttaactcttttacagaatcatccgaatacttaatcctctcattatcctcaatcttatagataatctcttctggaatctcttctttgatcactgtatattctttaataatctcatccagattgatcgtcttttgttttgtgatctttaaatagatattaaataccatatttcggattttttcttcatctccgctgatcgttaatccataatacgactttctttccaatgtaattccataatattcaaataatgcttcgacactgtttaaatcttccaccagtgtattcttgctcacttccatctgatctgctaactgttcgatcgttgtcttgtcagttaagatcagcatcattgcaatcacgaccgcacgctcatctctggaatattctttcatgtcattcgtatac

SEQ ID NO: 683 - DNA, 14701 bp, Unknown
  gut microbiota DNA sequence
attaacgcctatggagagtacaggaacttgtgagtagtacatgaattgattcgttacaaaagcatactcgctgaagtaggaatgaaacataaaggtttataactttttataagttttcagtaacggaaaaagaatgtacgaattaccggcatacctgatatggggatttttagaaagtggaaaatcaacactgatcaaagaaacattaaaccaggattattttaatgacggcgagaaaacaatgatccttacgtttgaagaaggagaagtcgaatacgataaagaaatgctagagaagacaaattcattcgtggtgaatattgaaaatatggaagatttcacaaaagaatttgtcagaggatgtcagagaaattattatccagatcgtgtcatgatcgaatacaatggaatgtactctattgacgatctgatggatgtagtagatgagacagatcttgagttatatcaggtgatcgtaacagttgatgcatctacagcagatttgtatttgaaaaatatgaaatctatgtttatggaaatgtttaagatggcagatcttgtcatttttaaccgctgtgatgacaatacgaatatgggaagttttcgaagaagcatcaaagcagtcaatccaagagcacaggtaggtttcgaacgtgccgatggaaaagagatggcacaggatgaactgctgccatatgatgtgaatgcagatgtgatcaaagttgaagatgaagattatggaatctggtatatcgatgcgatggaacgtccagaggtttacgaaggaaagactgtggaaatgcgtgttcaggtccagcgcagtccaaagatgccaccgggaatgatcattcctggacgtaaagcaatgacatgttgtgaagatgatatgacatttattggatatctgtgcagattaaaccagacgaaatccaagacattaaagagaattctcaataacgaatgggtaacattaacagcacagatccattcagaatacaatgaagcatatgataagacaatgccaatcttaacagcgatcagaatcgaaaaatcagaaccgccaaaagagcaattggtatatttctagattttaaggacatagcaaccctgccccaagcatacactgtaaaaacaacatttacagggggcttttccattgaagaaatacatggaagaaagagtcattgaaagtgcgatctacatcattgaacataatgctacagtacgccagacagccaagcagttcggcgtcagcaaaagcacagtacataaagatgtgacagaacggttagaaacgatcaacaaaacacttgccagacaagcaagaaaggtattagacatcaataaatctgaacgtcacatcaggggtgggcttgcaacgaaagagaaatatcttcatagatagaatcaaagggaaattatgaaatgccaggttacacatgcaaaattgtaatagaagatacacatccaccggtatggagaagagtcatcataccagatcagattactttttttgaattacacaagatcatacagatattatttgattgggacgacgttcatcttcatggattccatataccatcggatgatattgtgatagatgatgaaggaggatttgatctgtggggaaatcattataatgatttcgatacgaatattgatttcttctttaaaaattacaaatggatccgctacatctatgattttggagatgaatggcgtcacaagatcaatatagaaaaatatgagctggattataaagaacgatatcctaaactggtcaaatataaaggggataacttcatggaagacagcggaggggtctggaactgggaaatgaatgaagaagtttatccttttgacagagaatttgtggaaagccagttccgtcagatggtatttccaaagcataaacaaaaagataaggttaaagtattcaacgaacaggataagatagatatattaaaaggtttttttgacgaaataagtaagatgccagaagatgatctggaagatatgttgaaaaatgcatggcaggatatgtatttggaagaaacaaagtgtaatttagatgatagatcaaaagagtgggaagatcatataaagaaaaacggtaaggtcaagttttgtgtttcatcaaaaacacaaaaagaattactggaaaatctaagcgaagatcaatccagtgattattgtaaatatttaaggattccaaaaaacagatcaagatcacatatggaaaggatcagcagtatttcggatacattaagagaacatccagaatatatattatatgttatgaaccaagatgaatatgatagtttgaaacaatggatgaatcacttaaatgatagcataataaatatatcacaagatgaagctgatatttgtgccaaagcatttgttttaggatttggggaatatgaaattaaagatgatatagcagaagtgtatcttgcctccgatctgaaagagtatgtagatgttttgaatcagaaaacagaagacgaaatctatacaaagatagaaacatttgatgacagagtaggaagattgatgcagctatactgtgtgatcgaattagaagaattatacaaaatatacaaaaaaacgtatgatccgaaacaaggaaaaagggaattctttcgatatgtttactggcgaggaagaatgaatgatctattaaatacataccaagaaccagatggaacagcatatgttgcgatgcatggaatggatgtccacaagatcatagaaaagagagagatttatgcaaaagatcttccattgaatgaatttccagaatgggagattaacgaactaacagataatattgcaaatagagcagaatcaatcaatattctgtatatgatgttgcaagagcaatttcgtatgccagaacaggaaacatcagaaatattatttaatacgataagttcggtcatgagtggagatacgctgggtgtgattatagaaaatataaaaaccagagtgaataaaacatggactccagacatttatgcagaaatgtggaatatgatcagtgatctcatgatagaattggaattgccgatattaaaggcaagaaatcgtgatgaatatgcaatggaacaagaaatgtctccatggagtataggaatgctgtctgacaaagaaaatttcaaaaacacaaaacaacagcatttatacgaatttccacgcagcatacaggagcgtttatacaacatcgaaagtacgggaatgaaagaagatatagacaagctttttgcatacaaagaagaaaatcgtatttgctccgaagaattcctttatatgttgtcaagtagttgtatcgtttatggatatataaaagaagcaagatctttgatcaaagaattaaagaatagttctacagccggaaagaagatagcaaaactactagaaatagaaattgatcaatatgataatgtaatggatatgggggattattaatatctgtgatgttaaaaagaaaattccgataacaatcatctaaagttgaaatccagtacagtttaacatacacactctgtaatggtttgaatcacgtaaattatttgaatattataaaaagaaatcatgtgtctgcaaccgtacgaacacgtctgcagacacatgatttctttttataatattccaccaataatttctgtcattccaccatatttacattagagaattctgataattcaacaattcactcataggcttcgacatattcagatactgtctggtatttcgtcgtaatccattattattaccacccttaagtatcgtctcatgcgtagcgaagaaatcctgatcttcttcaaaaggtgttctcacgatatgaatatccacgatctcatctaagaaacgattctgatgaaagatctttctcgtacattcttttcgatacaaaggatgcaactgatttaccgtaaactggaaataaagagaattaagtaacggttcatcactgtctaataaaaactgataatcgccatccaaaatcttctgtccctgttcctttgtcagaggaatttttgtcttatcaaccacagatccgttccgctttctctgcatcagatagagatcttcatcattctccatatagaaataatatgtaaatggagaactgtcctttgctccttcaaacattaataccttgaccggaagactgatcatatatttatcaggagatttggacaggatatattcttcctgtgtctggttatattcagcttgactgatatttttcgtaacttcggtataagaaagtttttcaattgctgtatttttcatgataactcctaacccgtgctttgttattaacttctttcattatagcaaaggaatatgataaattcatgtcttatttataaaaaatgtatgaataattcatagattttctcaataccctgtgctaagataaaatctggaggaaaactatggatttatttgaatatgcaagagaattaaataaagataaagagtcgccattagcagggagaatgagacctgcaaccctcgatgaagtggtgggtcaggaacatattattggaaaagataaattactatatagagcgattaaagcggataagatcagctcgatcattttctatggtccaccaggaacaggaaagacaaccttagcaaaagtcattgccaatacgaccaaagcaaattttgtacagatgaatgcaacaacatctgggaagaaagatatgcaggaagcagtggcagatgcgaaagaatctcttggaatgtatcagaagaagacgatcttgtttatcgatgagatccacagattcaataaagcacaacaagattacctgctgccatttgtagaggatggaacgatcattttgatcggagcaacgacagagaatccgtattttgaagtaaatcaggcgttgatctcaagatccaatgtatttgaactacattcattagataaagaagatattaagaaattgatcgtaagagctattacagatgacgaaaaaggaatggggatctatggagcaacgattaccgatgatgcactggattttctctcagatatggcagaaggagatgcaagaagtgctttaaatgcgatcgaacttggaatattaacaacagaacctgctgaagatggaaagattcatatcgatatcgatgtagcacaggaatgtatccaaagaagagtgacaaaatacgacaaagatggggataatcactatgatgtgatttctgcatttatcaaaagtatgcgaggatcagatccagatgcagctatttattatctggcaagaatgatcgatgccggagaaagtgttacatttattgcaagaagaatcatgatctgtgcatccgaagatgttggaaatgctgatccgcaggcattacaggtagcagttgcagcgtcacaggcagtggaacggatcggaatgccagaagcaaggatcatactggcacaggcagtcacttatgtagccagtgcaccaaagagcaatgcagcatatatggcagttgatcaggcattagaatctgtcagaaatcataagatcggagcagttcctaatcatttaagagatgctcattacaaaggcgcagcgaaactaggacatggaatcggatataaatatgcgcatgattatccagatcattatgtaaaacaacagtatcttccagatgagcttcttggaacaacgttttatgaaccaacggaaaatggatatgagaaaaatatcaaagaatatttggaaaaaatcagaaagtaaaatgaaaatgagcactgaaaatgaaacatcagtgctcgttcttatttttactccatttatacaaaaatgacattgcccataaaaagatcggaaagaaaaacatcaaaaacagtgacatccagaataactggcttccgctcactgcaaaatagatagtagatccgatgatggcaagcaatatcacgatcagcaggatcgctgtgatctgcttcatacgcttttgttttttcatcataacatcctttcgtaaatatgtatacctatgaggtatcctagcatagattattgtgttttgaaagagtaaaatattttataaaagaaaatgaataagaagcaaaagagaggacataataagaatatccagttaataaaagaactggatagagaaatacttatcctccccttaagtattcccccactctgcgaagccgtggaatgggggatttttatgtaaaattgctgtcgattgttgaaaaagagccagagatttgttatagtatcaaaggaaaataacatttttaaaagaaaaggatggaatgaacatggctttattacaggaatggcgtgattacgcatataaatttgacgatagaacagcagaaggacagcagttctggttaaattacttcaacattgaaaaaggaatctacgaacaattattagctgacaaagatacagttgtatctggaacagtgaaagaattagcagacaaatacgagacagaattacagatgtttgtaggattcttagatgggatcaacgacagcttaaaagaagcaaacccaatcgaagagatggatgaaaatacacaggtaagcttagacatcgacttcgagaaattatattacaacatggttggatgtcgtgcagaatggctttacaacttaaaagaatgggatgacattcttacagaagaaagaagaaaagagttatacaaagaatccagaaattcaacaacagttgtaaaaggaaagaagatcggaagaaacgatccatgcccatgcggaagcggtaaaaaatacaaaaaatgctgcggaaaaaacgcttaattcgttaaaagaaatagtcgaatatgtaaatgaaacaaggaagaaccttttggcttatgtgatagctgaagggttcttttattttagaaaattttgataaaatcccatatgagataaaaatacagaaattattgacattttgtatacatgatgttagaatttcaattagtcgtctaatgattagttatctaattaaaatactcaaagtaaagaaaggagcatacatgaagaagtgtgaaggaatttacagtttgatcggcaaagtgaatcataagagtgcgatttatggatttgagcttttgaaagaagaaaatatacatccgagacagatgcctctgatcattcatttaaaaaaatgcgaaggctgtacacaaaaagagttagccgagaagatgcaggtcaagccgtctacgctaaacgtaatgattggacgaatggaaaagaatggatatatagagaaaaaacaagacgaaaaagattcaagaaaaagcagaatttattttactgagaagggaagaagtatctgtgaagacggtcataaaaaatttgtcatgatacaagaaaaacttcaagagtattttacaaaagaggagcaggaagaactcaagagactgttaaataaattttgtgattgtctggatgaacagacagagatactaaaaaaagaaagaaaggaaaaatcagatgcttaaattatttcgatatttgaaaaaagcatatgtgcctatcattgcgatcgtgttattgctgatcctacaggcgagttgtgacctgacattaccaacatttacatccaatatcgtcaatgtaggtattcagcaaaagggtattgaagacgcagttcctgatgtaatgagagaagaaacatttctggcattgaaatctcttatgaaacaagatgatgcagatgatatggaagatgcttataaactttatacaaaagatcaggtaaaagattcaaaatataaagattataaagacggacgtttatatgtcagaagatatatctccaaaaaagacagagaacatcttgatacgagtatgtcaaaggcaatgcttaagttgtcagcgcagatggcaaaacagattcaggccaatcctcaggcagcagcttctttaagcaagagccagaaaaaaatgatggcgcagatgaagaacatggatacaaaagacatgccagatacgatcatcagtcaggcagcgatttcttttgtgacttcagaatacaaagcaatcggacttgatattgaccagatgcagacacattatctgttagtgacaggagcaaagatgatcgggcttgcgttcttgatcatggcagcagcagtgagtgttactttattgtcagcacgtttagctgcgaaattaagtcgtattctgagagagaaagtatttgagaaagttatgtcgtttacaaactctgagtttgataaattctcaacagcctcattgatcacaagaagtacgaatgatatccagcagattcagatgtttatgacgatgctattccgtatcgtcgtatacgcaccattaatgggaatcggaggtattttcaaagtattaacaaccaatgcgaagatgacatggacgatcgctatcggtgtgatcgcgatcatgttagtgatctttgtattatttaaggtagcgatgccaaaatttaagatcttacagaaactgatcgaccgattaaacttagtaacaagggaaattcttactggactttccgtaatccgtgcattcagtacagaaaaacatgaagaagaacgttttgataaagccaatatggatctgatgaagacaaatttatttgtaaacagagctatgacatttatgatgccaacaatgatgctgatcatgaatggtttaactgttctgatcgtatatgttggagcatccaatattgatgcaggaaagatgcaggttggagatctgatggcatttatccagtatgcaatgcagatcattatggcattcttatttatctccatggtatctattatgatgcctcgtgcacaggttgcagcagaacgtgtcaatgagatcttagatatggaagtcatgatcaaagatccagaagaaccaaaagaatttttaccagagaaaaaaggtgaagttgaatttaaaaatgtatatttctgctatcctgatgcagatgaagcagtgcttcataatatcagctttacagcaccagctggtaaaacaaccgcatttattggaagtacaggtagtggtaaatcaacattgatcaacctgattcctagattctttgatgtcagccgtggaagtattttggttgatggggtggatatccgtgatgtaaaacagcatgatttatgtgaaaagatcggatacgtaccacagaaaggagtattgttctcaggaacgatcgaatccaacttaaaatatggaaaagaagatgcaacgatcgatgaagtgaaacgtgcagcaagaatcgcacaggcaacagatttcattgaggagaaagaggaaaagtatgattcaccgatcgcacagggcggttccaacgtatctggtggacagaaacagagattatcaattgcaagagctattgcaaaagatcctgaaatctatatttttgatgacagtttctcagcactcgattataagacagatgtgaaacttcgttctgaacttcagaaagaaacgaatggaagtacaacactgatcgtagcacagaggatcagtacgatccttcatgcagaccagatcatcgtcttagatgaaggaaatatcgtaggaaaaggaactcatgaagagttattaaatacttgtccggtttatcagcagattgccaaatcgcaattatcagaagatgaccttaagaaagcaagggaggtgtctgaccatgagtaataatcgaagaagaggtccgatgggtggaccaggcagaggaatggcaccaggcgagaaagccaaagatttaaaaggaacaatggtcaaactgatcaaatatatgagacgtttctatgttccgatcgttatggtaatcatttttgctattgcaagtaccgtgtttaacattgttggaccaacgatcttaggagatgcaacaactgagatcttcaaaggactggttcgcaaagtatctggtggaagtggaattgattttgataaagttaaacatattttattgatgttgttaagcttatatgtagcaagtgcgattttctcatttattcagggactgatcatgacacatgtatcaaataatgtcagttaccagatgagaaaagatatttcagagaagattcatcgtatgccaatgaaatattttgaaagcagaacctatggtgaagtattgtcaagagttacaaatgatgttgatacattagggcagagcttaaaccagagtatgacacagatcatcacatcaacgacacagatcgtcggtgtatttattatgatgatccgtatcagtattccgatgacgatcgcagttttattgacacttccattatctatgggattgatcggattgatcatgtcaaaatctcagccatatttcaaggcacagcagaaacatcttggagagttaaatggacaggtagaagaaatctatagtggacataacattgtcaaagcatttaacaaagaagaaagcgtgatcgaagaatttaaagaagtaaatggaaaactttacaattctgcatggagatcacaattcttctcaggagcaatgatgccgctgatgcagtttgttggaaatttaggttatgtagcagtaacaatattaggtggatatttagcaatcaagaagacaatcgaggtaggtcagatccagtcattcttacagtatgtaagaaacttcagccaaccgatcacacagttagcacaggtaggtaacatgatgcagacgaccgcagcatctgcagaacgtgtctttgaattcctggaagaagaggaggagatcgaagttgaaaaagacgcagtacctgttgatacacttgctggaaatgtaacatttgaacatgtaaacttcggatacaacaaagatcaaacgatcatcaatgacttctccgtcgatgtcaaagaaggacaaaaagttgcgatcgtaggaccaactggagctggaaagacaacgttgatcaaacttctgatgcgtttctatgatgtgaatggaggctgcattaaagtagatggccatgatatcagagaattcaagagaagtgacctaagagaaatgtttggtatggtgcttcaggatacatggctttacaatgcaagtatccgtgacaatatccgctatggtaaattagatgcaagcgaagaagaaatccaaggagcagcaagagctgcatacgcacatcatttcattgaaacacagccaggtggatatgatatggagatcaacgaagaaagcaataatatctcccaaggacagaaacagttattaacgatcgcaagagcaatcttagcagatccaaagattttgatccttgatgaagcaacaagttcggtcgatacaagaacagaagaacgaattcagatggcaatggataatctgatgcaaggaagaacaagttttgtgatcgcccaccgcttatcaacgatcaaagatgccgatgtgatcttggttatgaatcacggagacattgtagaacagggaaatcatgaagaactgctggctaagggtggattctatgcggatctttataatagccagtttgaaaacgcttaagaataataaaacattgtgaaaaaagggaaaacgaaagttttctctttttttattctaatatagaaaagattttcacaggattaaatagacggatatagcaaattttggtatagttaaatagaacaaaaatatatacagatatagaatcaaggagaatcaaagttatgaagaagaatcagacacagattaaaaaatatgcggctgtgatcagtatattcttagcggcagtcatcgtaggactttttgttttcttcttttgcataaaacgttctgttgaacaaagatcaaaaaacacgatgaggaacaacgtggtcagacagagtgagcatttaagaacaatattagatattcaatatgattacttaaatggattaacagaagagattggtaagacagaccatctgttagcaaagaagaatatggatttgatcaagtcgatcacaaaacatacagattttggtgggactgcattgatcgagccaaatggggatgctcattatgacaatggattgataaagaatttatcgcatcgaagatattttaaagaagtgatcagtggaaaaagaacattaagtgatccattagatagtagtatttctggatcaacaagagttgtgttaggagttcctatatataacagcaaacacaaagtgatcggagctcttggaggttcttatgacgtaacagctctaagtcgtatgctgtttgaagatctttttaatggacaaggatgcagtatgattattgcgcaaaacggagaaatcattgcatttgaaggagatacatcttactggaatcttgattatagagataatttctataaatgttgttgcaaatggatcatcaaagacaaagtaacagtgaagaaaatcaaacaggattttaaagaaggaaaagaaaatcttgtaacggcagacagcaagaaagaagggacaagaagacattactttgcatatatgccaatgggggccaatggttggatgctctgttatgcattaccagaacaggcagcacaacagtcatataacttcattgaagactacgaaataagctttatgatcgtatttattgttttggtgaccttattgatcctgtatattgtttatgagaatcatacaaggaacaaagaattactgaaatatgcacaaactgacgcattgacaggattatataacaaagaaacaaccgagcagttaacggatgaacttttatcagaagatgagaataagtcccatgcatttttgattttggatgtggactgttttaagcagatcaacgatatctatggacatgcagtcggggatatcgtgttacagaaattcgggaaacttctaaaaggcactttccgtgaaggagatatattaggaaggatcggtggggatgaattcggagtcattatgaagaatatccagacaaaggatatagcaatgaagaaagcaggagaattgctggctaaaacacaagcatacaggatcgacgaattgaaaggaaataatatctccatcagtatcgggatcagcacagccccacaagacggggactgctacatggatctctataaacgcgccgatcaggcactttaccaggcaaaacgaagtggaaaagcaagagtgtgcaactatttctcatgaaaatagtcttttaccaattttactacagttccagatagaaggaacaaagcgatcaagttcggaatcgccatcagaccgttgaatgtttctgcgatactccaaagcattccaaggtctacagtagcaccaaggatcgcaactaacgaatatactaacataaaaggtttaataaccttagaagagaatagaaactcaatacaacgagctccatataatccccatccgataatggttgaaaatgcaaaacaacataacgcaactgcagtaaagatggagatccagttaccataagtagaagtaaatccactgatcgtaagttcagcaccagcatccgcaccaaatccaattggaattccactgcagaggatgaccaaagctgtcaatgtacagattaagatcgtatcagtaaatacttcaaagataccaagaagtccctgctttacaggctctttcgtatcagcacaggcatgagcgatcgaacctgtaccaagtccggcttcatttgagaagatgcctcgtgcgacaccttttttcatactcataaagaaacttccaacaataccaccagtcacagaagcaggatggaaagctccgttaatgatagaaccaaaaacagcaggaagctgatcgatatttaaaacaacaacacctaaggcaaagaagatataaataaatgccataaaaggtactaatctttcagctacctgtccgattcttttgattccgccaagtaagatcaatgccacaagaattgcaacaatgataccaatgatcagattcgtagttccaacagaagactgactgatcacgtggaaattcaacaaagcagaattgattgctgttgtgatcgtatttacctgagtagcatttccagttccgaatactgttaaaactccgaaagcagagaatagtacagcaagaaaatgccagtttttgctaagaccattcttgatatagtacataggaccaccaacataatccccttcttggttacgttctctgaagtgaactgcaagtgttacttcggaaaatttcgtacacattccaagaatagcagaaatccacatccagaaaacagcaccaggaccaccgattgcgatcgcaccggcaactccggcaatatttccagttccgactgtggaagcgagtgcagtacagactgcctgaaatggagtcatagatccgtcggatgcatcttgcttcttaaagacacgaccaagcgtttccttcattgcataaggaaatttacggatctgtaaaaattttgttttgatcgttaacagtaatccgacaccaatgatgcagatcatggctggaacaccccagataaagttgttcacggcactgttaactgattgtataagctctaacataaatcaaacctctttcaaatttcttttattaatttgtatctgtccttatataatagatatttactcattaagatccatgttaccttaaggtgacatggaacatgaacagacacaagtgcaatcatatcatatttacagaaaaaagtacagaatctaatcttgacagagaattaatagatat

SEQ ID NO: 684 - DNA, 19820 bp, Unknown
  gut microbiota DNA sequence
tatatttaggtaatcgatagctgaaaattctcgcaatttaaggtttcgtagaaattaagataagagaaatcatcaaccaataccgtttaacatacacactgtgtagtgatttgaatagtgttctgttttatgagtcagaaagaagataagaagaaatatttataagaaaaaagggtgacaacatgagcactttttgaatgcgaatttgtaaaaaacgctttcaaaaatgcggagtgtcaccctttatttttataaatatttcttcttatcttctttctgacttatacatgcaacatcattacaatcagaatttatttattgttgttcttctcagcttcctgcatcttcatagcacgaacttttaaaggaagtccaaataatgtaataaatccatccgcatcatgatgatcatacatatcaccagttgtgaaagatgctaaagattcgttgtataagctgtatggagaagtagttccagccttgatgatattacctttgtaaagtttgaatttaacttcacctgttacatactgctgagtagatgtaacgaatgcctggattgcttcacgaagtggtgtgaaccattttccttcgtatacaacctgagccatctggcttccaagtttcttcttagcttccattgtttcacggtcaaggattaattcttctaactgatcgtgagctgccattaagattgttccacctggagtttcatatacaccacgggatttcattcctacaacacggttctcaacgatatccacgataccgataccattttcaccaccaagacggtttaattcagtgatgatctcagaaactttcatttcttttccgtttaatgttttaggaacaccagcttcaaatgtcatagtaacttctgtatctttatctggagcgttttctggagctactcctaaaacaagcatgttgtcgtagtttggtgctaaagaaggatcttctaattcaagaccttcgtgactgatatgccataagttacggtcacggctgtagctgtggcttgcgtcaaatggaaggtggattccgtgtgcttcacagaattcgatctcatcttcacgagactgcattgtccatacatctgtcatacgccatggagcaatgatcttgatgtctggagctaatgctttgataccaagttcgaaacggatctggtcatttccttttcctgtagcaccgtggcagattgcaacagcattttcttttctggcgatttcaactaatttcttagcgattgctggacgagccatagatgttccaagaagatactgatgttcgtatacagcaccagcctgtacgcatggcatgatatagttatcgcagaaatcatcaacgatatcttcgatatataatttagatgctccggataattttgctctttcatcaagtccatctaattcgttaccctgtccacagttaacacagcaacagataacttcatagtcaaatgtttccttaagccaaggaatcagagctgtagtatcaagacctccggaatatgctaaaacaactttttctttcatgaaataaatcctcctaagtgtatattgacgggatgttttcctattatatataggatctgatattgaaaatcccgtatgttcatataaatatttgcttgtttactaatatacgttatatttacatcttttgcaaggattattttcgaaaataatgaatatttataatataaaaatgaataaaatgaaaaataattgcatatttatacaaaactattgcatattttaaaattcagttgtatacttatgaacaatgattaaaaaaataacctacattataaagagaaggacaaggagattaacatgatcaaagcaggaatcattggatccacaggttacgcaggacaagaacttgtaagaatccttacacagcataaagatgcagaggttgtatggtatggatccagaagttatatagaccagaaatattatgaagtatttagaaatatgttccagatcgttgatgacaaatgtctggatgataacatggatgagcttgcatctaaagtggatgtgatctttacagcaacaccgcagggactttgtagttctttagtatcagaagaaatcttatctaaagttaagatcattgatctaagtgcggacttccgtattaaagatgtaaatcgatatgaagaatggtatgggattaaacatcagagtccagaatttattgatgaggcagtttatggactttgcgagatcaatcgtgaagatatcaagaaagcacgactgattgctaacccaggatgctatccaacatgttctacattatccatttatccaatggcgaaagaaggactcattgagatgaacagtgtgatcatcgatgctaaatcaggaacatccggagctggacgtggtgcgaaagtcaataacttatattgtgaagtaaatgaaaatatcaaagcatatggagttgcaactcacagacatacgccagagatcgaagatcagttaagctatgcatctggagaagaagtattattaaacttcacaccacacttaattccaatgaaccgtggaattttagtgacagcatatgcaacacttaagaaagatgtaagttacgaagaagtgaaagcaatctacgactcttattataagaatgaaaaattcgtcagagtgttagataaagatgtctgccctgagacaagatgggtagagggaagtaactatgtggatgtcaactttaagatcgataaacgtacaaaccgtattatcatgatgggtgccatggacaaccttgtaaaaggtgcagctggacaggccgtacagaacatgaatcttatgtttggattaaaagaaactgaaggattagaattagtaccaatgttcccatagggctttggtaaggaaggactagaattatgaagatcatcaatgccggagtaacagctccaaaaggttttaaatgtgcaggacttcgtgccggagtgaaatcagggaagacaaacaaagacatggcaatgatcgtaagtgaagtgccagcaaagattgcaggaacatttacaaagaacattgtaaaagccgctccagttttatggggaaagaagatcgtagaagaacaagaagcagtcagagcagtggtaattaatacaggaattgcaaatgcatgtacgggtgcacaaggatatgagaatgttgtaacagaagcaaaagaagtagcgaaattgttagatattaaaccagaggaagttgtcgtaggttccacaggagttatcggacagcagctgccaatggatgtgatcaaagaagggatcaagaagttagttccagaattaaaagcagacagacaaagtgaagaagatgcatcctgggctatccttacaaccgatacaaaaccaaaagaagcggcagtagaagtagagatcaatggaaagacagttacaattgcaggtatgtgcaaaggttctggaatgatccacccaaacatgggaacaatgcttggatttatcactacagatgcagcaatcgataaagctttattattagaactgcagagggaactcattgaagatacattcaatatggtatcagttgatggagatacatctacaaatgatacggtttttgtatttgcaaatggaatggcagaaaataaagaaattacagaaaaagatgcagactatgaagcattcagagaaggattattatatgttaaccagtctcttgcaaaacagatcgcaggggatggagaaggatgtacacgtttatttgaagttcatgtagctggtgcagactccaaagaaaatgcgaagatcttaagcaaatctgtcgtaacatcaagtcttacaaaagcagcaatttacggaaaagatgcaaactggggaagaattctttgtgcacttggttatgctggagttgattttgatccagtcaaggttgatattagtttaaaaagtgcggatggtgtgatcgagatcgtaaaagacggaattgcaacagattattctgaagatgaggcaacgaaagtattatctgcagatgcagtgacagcagatattgatgttcataatggagtgtttgaagcaactgcatggggatgtgatctgacacacgattatgtaacaattaatgcagattaccgatcataagaataagattattatagatagacgacaaaataaaaggcataaaagcagacaactatgaaaggaagaatcaatggaacagatgagaaatgaaattaacgaattgatcgagcagtcaaaacaaaaagcaaaagtattaacagaggcattaccatatatccgtcgtttcaataactgttacgttgttgtaaaatacggtggaagcgctatgaaagacaagaatcttcaaaaaagcgtgatcagagatgttgcactattaaaactagtaggtatgaaaccgatcatcgtacatggtggtggaaaagagatcagtaaatgggttcgtatggcaggaaaagaaccagaattttaccatggacttcgtgtgacagataaagagacaatggaagttgctgaaatggtattatttaaagtcaatcaggaactggtggccatgatggcagaagttggggttaaagccgtaggtctttctggaaaagatgctgaaatgatccgtgtaaagaaaaaagaaatgcctggaaaagatcttggatatgtcggtgaggttaagagtgtcgatacaacacttcttgaagcattaatcgaagatgattttgtaccagttatttccccaattggtttaggagataactatgaaccatataatattaatgcggatgacacagcatgtgcagttgcagaagcattgaatgcagaaaaactggtattcttaactgatatcgaaggggtattcgtagatccagaagataaatcaacattgatctctgagatggatcttaaacaggcaaaagaatttatcgataacggagttgttggaggaggaatgcttccaaaacttaagaactgtattgaagcgatcgaaggtggagtatccagagtccatatcttagacggacgtttaacaaattgtctgttactggaattcttcacagaaaaaggtattggaacagccatcttaaaagaaccattatttgataaaccattattcaacgaagaagatgaggaaggatgttaagatgaaaactcagcaggaatatattgagcagggagaacagtatatcttaaagacatacaatcgttttccagttgtattagaaaaaggggaaggtgtctatttatatgatgctgaccagaagaaatatctggattttggtgcaggaattgctgtatttgcattaggatatggaaatgaagcatacaatcaggcattaaaagaccagattgataaattgatccatacatcaaacttatattacaatattccagcagtagaagctgcaaagaagatcgtcgatgcttcagggcttaaaaaagtcttctttacaaacagtggaacagaagcaatcgaaggtgcgttaaaagttgcaagaaaatatgcatataataaagacgattccaaagattatgaatttatcgcaatgaatcattcattccacggaagaagccagggagctttatcagtgactggtaacagtcattatcaggatggatttgttccaaaagaatttcgtgctgtatttgcagaattcaataacttagaagatgttgtatcaaagatcacagataaaacttgtggaatcatatgtgaagttgttcagggtgaaggtggaattttcccagcggataaagaattcttagagggacttcgtaaagtctgcgatgagaaagatatcttactgatctttgatgagattcagtgtggaatggggcgctgtggatctttgtttgcacatgatctttatggagtaaaaccggatgtcttaacacttgcaaaagcgcttggatgtggtgttcctgttggggcgtttgttgtaggtgaaaaggctgatggggctttagtaccaggtgatcatggaacaacttatggtggaaatccattcgcagcagcggcgatcaatgcagtatttgaccagtttgagaagttacaggttccagaacatgcaaaagaaatcggagcttacctgtgggataaattagaagagttaaaagagagatatgactgtatcacaggacatcgtggaattgcattaatgcaaggacttgaatttgatacagatcatccagttggagatatcgttaagaaagcactggagaaaggattgattataatttctgcaggaaataatgtcattcgttttgtaccgccgcttgtgattgaaaaagaacatgtagatgagatgatttctattttagaagactgtatcgcatagaatgtataaaaaagacctctatggaaaaactatccgtaaaaagatagtttttcatggaggtttttatatgtttggattgatcattgcattgatttcaggagctttaatgagtattcaaggtgtatttaacacagaagtaactaaacaaagcagtacatggacaacgagtacatttgtacaggcaacaggatttctcgcatgtttgttgatctggttgatcgctgagagggagcaaagttttacgatgcttttaaaggtcagcccaagataccttttattaggaggagtgatcggagctgcgatcacatttacagtgatcaaaagtgtggcaagtttaggacctgcacagtcagcaatgctgatcgtcgcatcacaaagtgttgtttcctatctgatcgaggttttcggtctgtttggtgtggaaaaaacagcttttgcatgggtaaagcttttaggagtggttttgtttgtcacaggattgataatatttaaatggaaatcataaatatctcttgtaaagtattataattttcgctaaaatagaagttagatttacatgttccagactctttgtataagaccgggaggtttatgttgtttagaagagttaaagtgataaccattttgctgatggtttttatgatgtccattggatgtagccgcaggaaggaagtatcgatagaaccaaagaaggagacaaagacaacggctgagaagtcttcttctaaggaaactatttatgtctatgtatgtggagaagtaaaacatccaggagtttatcgtttttcgaaaggtgaacgtattgtttctgctgtgaaagcagctggtggactaactaagaaggcttcagcagagagtattaatcaggcagagaagatgaaagacgggcagcagataacgattccgtcaaagaaacagacagcgaagaatgaaggatctgattccaaagcagtgcaatcttcctctggaaagatcaatatcaatactgcaggtgtcaaggagttgatgacgctttcagggataggggaagcgaaggcttctgatattatctcttatcgagaggaacatggccctttttctgatatttcagatattatgaagattcagggaattaaagaggggatatatcataagatcaaagacaagataacaatataattttagaggtggaaaaatgaggaaggtcttagttgttgatgatgaaaaactaattgtgaagggcatcaaattcagtctggaacaagatgagatgcaagtagattgtgcttatgatggagaagaagcattagagaaagccaaagagaatcaatatgatattattctccttgacgtaatgcttccaggactgactgggtttgaggtttgtcaggcaattcgtgaattctctagcgtcccgatcattatgttgacggctaagggagaagatatggataagattcttggccttgaatatggggcagatgattatatcacaaagccatttaatattctggaagtaaaggcaaggatcaaagcaatcttacgtcgaagcgcacatcacgatgtgaaagaagaagaatcagcaaaggttgtagaatgcagaggtttaaagattgactgcgaaagccgcagagtgcatattcatggcaaagaagtgaacctgacagcgaaagaatttgacttgttagagttactggtatttcatccaaacaaagtatacagcagagaggatttgttgaatacagtatggggatatgattatccgggggatgcaagaacggttgacgtgcatatccgaagattgagagagaagatcgaagtgaatccgggagtaccggactatgtacatacaaagtggggggtaggttactattttcagtcctaagaagaacagatttgcctttttacatagtatgcagttctttattttcttgtcagttttccttctgacgacattgatatcagttttatttagtaagttgttaaatgatggatatcgtcagaaaacatatgaccagaaagtggatagtgtggtcagtcagtgtagctggcttggtgatcaggtagttggagtcgattttcatttagatgatggctccaactctctttctaatcagattgatgaacttgcagcaagtatgaatgggcggatcatcgtaattaagaataattataagatcatcaaggatactcatacagattttcagtctagattctttttaaatgataatgtattggatgttatggatggaaagaagacaaggattgtatcagagagtggaaagtatatcgaagtgatggttccgatcgtatcaaaagctggaaagcagaatcatatcctgggagctgtgcaggcgactgtgccatctgaggatatgatgggagcagttacggagatggagcatcgcaggaatatgctgctggtagcatgtatcatctgtggattatcaatggcaatgatcattagttatctgctgacgagagatttaaagaagattcagagagatgttgattttattgcggctggtcatgaagatgaatccattgaagagacaggattcctagaagtacgcagtattgtgcagcgttttaatgagattcttggaagaatgcagacgttggaagattcaagacaggagtttgtatcgaatgtatcgcatgagttaaagacaccaatgacatcgatgaaagttcttgcagattccttaattcagcagggagatcaggttccggctgaattatatcgagaattcatgcaggatatcgttgctgagatcgaccgtgagaacgtgatcatttcagatctgttatctctggtgaaactagacaagaaagcagcgcagcttcagatcacaacagtaagtatcaatgaattgttggagattatcatgaagcgtttaaaaccattggctctgcagcgtaatatcgaattgatctttgaaagtttccgtccggtaacagcagagattgatgaagtgaagttgtctttagggcttacgaatctgatcgagaatggtatcaagtataacaaagatgatgggtggatccgcgtgacactgaatgcagatcataagtatttttatgtgaaagttgcagattctggtgttggaattcctgaggattgccaggatcaggtatttgatcgtttttatcgcgtggataaagcaagatcaagagatactggaggcacaggacttggattagcgatcacaaagagcgttgtttctcttcataatggagagattaagttatacagtaaggttggtgaaggaacaacatttacacttagaattccattaaagtataaaggctaggaggaagagatgaagaaaagaaaattatgcatgatctttttgctttgtctggctttgatgactttagtggcaggatgccggtcaaaaaaagaaaccaatgaccaaggcaatcaaaaaggaacagcaatttactatactaataatgatgttacgaaattgatcatgaagaaagaaaatgtggagcttgaagggaatcagcagcagaaagtgaagattttattaaagaaacttcaacagactccaaagagtgataagatacgctcagtgattccaaagagaattatgatcaatggtgtatcagtgaatacaaatatcgttgagattgatttttcgacagggtataaacgaatttcagagaatagagatttgatctgccgtgctggtattgtatatacactgactcagttaaaagatatcaattatgtatcattttcaatttctggagagccaatgcttgatacagatggtacagcaattggtgctcttggaagagatagttttgtatttggtaagttgccaatgaaataatttatgaaacaaagaccgatggttcttatatttgccggagtgttatccggaacagccgttgtatggaatattatgtccatgacagcggctttttacctattgacaggtatttgtctgttggcgtccttgatttttagtgataggcgttatggatgggttgtagttgggatacttgcaggaattttattatcgttaggttttaagacttccatgaaacttgatctgatccaggtaaaggaaaaggcaacagaatatacaatgggaagagttttagaagtatcgaaaacaaagaagggaaagttagcagtacttttaaaaaataaagatttggaggggaagatccttttatatacacccgaggatgaaaagatcattccaggagatattcttcggtttcaaggagaattagaagaatgggaagatacagctaaccctggccaattttcaagcagacattattatttcagtaaaggaatttactatcatgtatattcgaaaaatattgagatcgaaggacatcaaaatatatattttcaggaaaagatcttgcaatgtagagagtacatgaaacatcagttagaaattcaatacaaaaatgaggtaagtgatttcttaaaggggatgttaataggtgataaaaatggactgagtgatgaggttaaagatgactttaaggaaagtggattaattcatttacttgcggtatcaggacttcatatatcgttggcaggaagaagggtatataaattggttcgcaagtggtgtggaaattttgtagttggttcactggcaggaatgacaggcgcagtgttttattgtattttaacaggtggatcgggatcgtcacttcgtgcagtgatgatgttgggtgtttacttcctgtcagagatattaggagaacactatgatatgatgtctgcaggagcttttgcaggaattgtcttacttataatgtgtccgtacagaatctatgatacgggttttttatattcatttacagcagtttttgtgatcgcaatctatcaacttgttaaaccaaagatgaaaggtaaatattataagttgaaggaatctttatcgttttgtatttttatccagatagggatgctgccattgatcatatattttcaatatgaagctccagctttttcttttcttgcgaatgtagcagcagtaccactggcaacgtgtgcttttactttagcttttcttttgatttttttgccgtataccgtatttcatgaagcaatctcatggatgatccaaggggttttgtggatttccagacagtcttatgggatgttgacgatcggacatgtaccatttttatgggtactcttattttattttatgaccggattgtggatatggaagaaaaatggacaaaatcgacatatcaggatcagtctggcttatgttatcatgatcattttgatatggatcccaatggcaagaagaaagagtctggcatttcttgatgttgggcagggagattgttttgtagcagatacgaagtctggggcgatcatatttgatggtggaagcagcagtgaagatcaggttggaagatatcggattcttccgtatatgaaatatctggggtatcagaagattcagattgcggtgatcagtcatatggatatcgatcattattctgggatcaaggaattacttgagatggggaaaattaagtatcttgggcttccagagattccaaaagatgagacaatgaaaaagatcataggtatagcgaagaaacgaggaacaactattttttatctttcaagaggaaggcagatcactacaaaagatggaagtttgaaagtgttgcatcctcaaaagaacagtcagatggaaaagaatgtggcatcgttggtaatgcagggaaaaatacttggatatcgggtgctgttaacgggagatgtggaaaaagaaggcgaagaagaactattatcagaagaattggaaagagcagatatattaaaagcagcacatcatgggtcaaaaaattccacgagtaatgaatttttacaaaaggttcagccgaaacagacggtcatctcttgtggaaaacaaaatagatatggacacccacatttagaaactatccacagactacagacatatcgcacaaagatttatagaacagatcgaagtggtgcgattatttttttcaaaagaagagatggttgaaaatcttcaaaaaaaaaggtatactatcaaaagctatagaaagagatgcaaagaatatgaagaaaatattagaagatatcaagacaaatacatacgaacgtttttatctattctacggggaagaaaaatatatgatctcccagatgaaaaaccagttaaagaaagcattagtttcagaagatgatacgatgaactattcttattttgaaggaaaaagggctgatgcgatagagattgttgaacttgctaaaacactgccgttttttagtgatcataggtttttgatcttggatgaaacaggacttggaaagaaaagtgatgatacgtttattgaaggattaaaggaagcctcggatacaagtgttgtgctttttatagaagatagtgtagataagcgttcaaagatttataaatttctttcgaaggaaggacatgcggtatgttttgaatctgctggagataaagaattatccagatggctgatctcattgcttaagaaagaaggaaaacagatgtcatctgcaacgatgcgaagttttttatatcgctgtggatctgatatgtatactttaaaaaatgaattagagaaattgatctcctatgttggagagagagaagaaattacgatccgtgatctggaagagttgacatcttctcagacgacaaatcagatctttgtgatgcttgaggcaattgcgagaaagcaaagagaaaaagtattgacactatattatgatctgatcgagttaaaggaatcaccatttggaattctggcattgttagtcagacagtgtaatcagctacttcaggtgaaagatttagattgtcttggaaagagcaatgggatgatcgcaaagcagatgaaagttccagcatttgttgcaggaaagttaaaagatcaagcgaaaatgttttcaatggatacactcagagatatgatcgaagcatgtgcaaaaactgatgaatcaattaaaacaggaaagatcagcgacagagttggggtagaactattgttgatccagttcagtcagaaataaatcaatcaatttaagatagaagaagtctagtataataaaaatgatgaaaaaaaagaagcctgacggtggcttctttttttcgggttaattttattaaaattcgtttcttgatatctgattaagcaatagcgttaacggctttagataaacgagcaatctttctagaagctgtattcttgtggaagattcctttagaagtagctttgctgatttcagaaatgcaagctgttaaagcttcagaagctgctgctttatcgttagctgcgattgctgcttctacttttttgatatatgttttaactttagttttgattgctttatttctttctgtttttgtgttgataactttgattcttttttttgctgatttaatatttgccaaagtgggcacctccaatatgataacttaaatttctttcttttcttgaatcttgtctatagcgagacacggttagctatacacaaaacatactgttatatcttatagaaaatgattgaatttgtcaatatctttggggaaaaaatgtaatatttttttaaaaacaatcacatactagagaaaaaaggaggcaaaatcaatgcaaaatcgtacagatctggcactggaattaaaagaagagaagaatattggctctgcacagtcaggaattatcgtaaagacaagaattgatacaacgaatcatataaaagaaacaaagatcatcatcaaaaacaaaaaaggggaggactctttaggaaaaccaaagggaacctatattacgatcgaagcgaaagatctgtcaacaaacgatggtagttttcataaagaaatgagtgaagcattgtttttaaatttaaaggaaatgttaaacaaaaagaaaaaaatactgatcgcaggacttggaaatgctggtgtgacagcggattcgttagggcctaaagttgtgaacaatctatatattacaagacatttgcaaaaagaggggattggaaattatcaatttgaactaagtgcgatcgcaccgggggttatggcacagacgggaattgagacaagtgagattttagaatcattagcagaccggataaaaccagatgttgttatcgtgatcgatgctctggcggccagaagttatagcagattaaataaaacgattcagatcagcgatacgggaattgcaccgggttcaggtgttggaaaccataggaatgagattacacagcatacgatcggtgttccagttcttgcaattggtgttccaacggtaatttctgttccagcgatcattcatgatgtttttggagaaaaatctctggaaaatgtttctgaaaatattgatgaagaatttatttccatgcatgttacaccaaaaaatattgatgaatctatgaaacggatcagttatacgatatctgaaggaatcaatcatttactgcataattaaaatatgaatgaatacaatgaaagtatggagaaaagaaagagatggatattgagtattacgatcggttgttttctgatcattttttttagtcagaagatcaatgcgcagggaatggttttagaattcatggatcattattatcatggaatcatggcaggattttttccggcagtatctaagaaggaagtgacattttcgggaaatattctatcggacatggtctgtatgtattatcaggaaacagtaccaatcttacaatatcgcacagattataaggataaaaaagaagaagatctagtacagcaagattattattttcaggatgatgaaacaacggatgaggtggtagaggaggtaaaaaaagaagaaaagttgtttcatgcaaaaaaatgggaaaattcaaaatatttaagaaaatatatttatcagatcgacagtacgacaatggcgacagaaaatgagttaaatggaaaagttttattaaacacgaacttaaaattaaggaaatctgatgaaccgcagattttaatttatcatacacatgggagtgaggcataccgtggcagcaggaaaggaagaaaatcagatactgtgatcggtgttggagatattttaacgaagagattggagcaaaaaaatatcaaggttgtacatgatcgtaacatttacgatgtaaaaaacggaaaagaggagcgatccaaggcttataattatgcagcaactgcaattgaaaagaatctaaaaaaatatccatccattcaggttgtgatcgatctgcacagggatggagtcaatgaatcgacaaagcttgtgacgagacaaaatggaaagagaatggcgcagatcatgttttttaatggaatgagccgtacagcaacaaatggaaatatcaaatatttaaagaatccaaataagcagacaaatcttgcgttcagcctacaattgcaagcacaggctgctttgaaataccctggatttacacgaaaaatttacgtaaaaggatatcgttataatctgcactacagaggaagaagcttgttagtggaagttggtgcgcagaataatacgttatcagaagcaaaagcgtctatgagtttacttgctgaattattaaataatgtgttatactaaaatggagtgtctgaaaagacatatgtacttgaaatataattaggaggaacttatggcaatagatcagagtaaaatacgaaatttttgtattatcgcacatatagatcacggaaaatcaacattagcagatcgaatcattcagatgacaggaacattaacggatcgagagatgcaggagcaggttcttgataacatggatcttgaaagagaacgtgggattacgatcaaatcgcaggcagtacgaattgtttataaagctgacgatggggaagaatatatttttaacttgatcgatacaccgggacacgtggactttaattatgaagtatcacgaagtcttgcagcatgtgagggagcaatccttgttgtcgatgctgcacagggaatagaggcacagacattggcaaatgtttatcttgcgattgatcacgacttagaagttatgccggttatcaacaagatcgatcttccaagtgcagatccagagcgtgttaaagcagaaattgaagatgtgatcggaatcgatgcagaagatgcacctcagatttctgcaaaaagcggactaaatgtagaacaggtattaaagcagatcgtagagaagattccatcaccagagggcgataagaatgcaccattacaaggattgatctttgacagtatgtatgatgcatataaaggagttatcatctttacaaggatcaaagaaggaacgatcaaagtcggaacaaagatgaagatgatggcaactggagagagtgcagaagttgtagaagttggtacatttggggcaggaagattcaatccatgtgatgaactgacagcagggatggttggatatgttacagccagccttaaaaatgtacagggaaccagagttggtgatacgatcacagatgcagatgatccatgtgctgaaccacttccaggatacaaaaaagtaaatcctatggtatattgtggactatacccaacagatggagcaaaatatccggatttaagagatgcattagaaaaattacagttaaatgatgcagcactacaatttgaagcagagacatccgttgcgttaggatttggatttagatgtggatttcttggattattgcatttagagatcattcaggaacgtttagagagagaatataacttggatcttgtgacaacagcaccaggcgttatttatcgcgtatataagacggatggaagtatgatcgaattaacgaatccatccaatcttccagatccatctgagatcgaccatatggaagaaccaatcgtaacagcggagatcatggtaacttctgagtttgttggagcgatcatgggattatgccaggaaagacgaggcgtatatcttggaatggagtatatggaagagacaagggcattacttcgttatgaacttccattaaatgaaatcatttatgatttctttgatgcattaaaatcacgttccagaggttatgcatccttagattacgaaatgaaaggatatcagacatcaagacttgtaaaattagacattttgatcaacaaagaagaagttgatgcgctttcttttattgtacatgaagataccgcgtatgagcgaggacgtaagatgtgtacaaaattaaaagaagaaattccaagacatatgtttgaagtaccgattcaggcagcgattggaagtaaagtcattgcaagagaaactgtcaaagcaatgagaaaagacgttcttgccaaatgttacggtggagatatctcccgtaagagaaagctgttagagaaacagaagaaaggaaagaaacgaatgcgtcaggtaggaaatgttgaaattccacaggaagcattcatgagtgttctgaagttagatgaagactaatacgatcgagctttatattcatattccattttgtaaaagtaagtgcagatattgtgatttctgttcctttcgggcagaggaggaaacgatccatgcatacctggggaaactaaaagaagaactgattttctggggaaagaaattagcagcacgagacgttgtaaccgtctttattggaggcggaacgccatcatatcttagaagagaagatattcaaatgatttgtgaaactatatttgaacattttcatatttgtgaggatgctgagattacgattgaagcgaatccaggaacagtagatttaaaaaaactatgtacatatagggaaaatgggatcaacaggattagttttggattgcagtcaacagtgaaagaagagttggagtatctgggaagaattcatacctatgaagaatttttacaaagtttcgactgggcaagacaagctggatttttgaacatcaatgttgacttgatgagtgcggtgccgaaacaaacattaacttcttatgaagagaatttaagaaaaatagctaaactttctccagaacatatttctgcgtatagtctgatcattgaagacggaacacctttttacgaagataacaagttagaggaacttcttccatcagaagaagatgaagttttaatgtatcgaatgacagaaaagattttaaacgaatatggttacgacaaatatgagatttcaaattatgcaaagccaggttttgaaagcagacataatcttgggtattggtcccatattccgtatttgggagtggggcttaatgcctcttcgtatctggatgagaaacgttttgagaatccatccgatatgaaagactatttagagattcaatcgttcggagatgcatatgaaggagcccgttcgttatcagtttatgaacagatggaagaatttatgtttcttggacttcgaaagacgaaaggcatttcgaagaaagagtttatagaacgttttggttgctccatggattctgtctatggaaagcaattgatagaatccatgaaacaaggcatgatgaaagaagaaggagaccgagtttttctgacgcaagatggtatcttagtcagtaatcaggtcttatgtgaatttttatttgacgaggaagtttaaggatacaagtttatcaaagatccattaatttttttagattaatctgcccccagccctgatggtgtctgggggtttttaatttgtcgcagttttttcgcagtttcatttttatatccttattggtgtaaaaaggatatttttcgagcaggagagcaaaagaaccagagacgacaggggttgccatggaagtaccacttttgatagtatagcggttatttaaggaacacgaaaaaatattcgttccaggggcaacaacatccggcttcataacgcaggatgttgtgggaccgcgtccggaatatcctgaagagaagtgttttcttccgatcatttgaaaattatcgtcgctggaaccaacagtgatgatttttggactatttccaggaattgaaatactgtatggttttggaccatggtttccgccggcaatacaaacaacaagaccatcatcccatagggcgttgacatgttttaatagttctttggaggctgaactatcctcggaaccaggacttcctattgagatgttaacgatacggatctgataggagcgatgatactcatgaatccagtcaagaccctgtaagaaggcgctttgaacaccgtttcctgaggcatccagtacttttaaagaaacgatatgggattttggagcaattcccaaataatcggaaccaaatgttgcagaggaagcagcgatgccggtaatatgagtcccatgtccattatcgtcatagctgaaagatttggaatgaacaaaatctacaaatttggcgacccgtgtggaatgcggagagaaatctttatgtgggaaaaggccagtatcaagataggcaatgccgataccttctccaagaaaaccatgctgat

SEQ ID NO: 685 - DNA, 3131 bp, Unknown
  gut microbiota DNA sequence
gtgttacttcacattgacgtgaatggcggtttgcttcctacggggagttctagccccgattacatagatccatctctttcatagagaaatctgacggaaaggggacttgaaattatgctaaccattacagacctaatcgcagtaatctcactgtgtgcgactttttatagtcttggctatgtgcgtggaaagcatgatgccaagacagaaaaagaccgccctaccctgagaaagtaagcggtctataaaacttatattaatcaggcaaaccgtcatcggtagcacctttttatattgttatattaacatctataattttttatgtcaattctattatctaatttatatttaactttctagtcaaaataaactcaatcaccaaatgacacaacacaatttccagaagaaaggcaataagacacggaagataaaaccaactgtaatatctattatgttgcaacaataccacttgcatttcatagccaaccaagaataaaaaagctcctacaatgatcattgtcgcaaatctgtttttacttctcatctgtccaatgcatattgctgtatatgcctgatagatcagatgcatcgtccatatgattccatatatgatcatataaagaatggttaaaacaacttttgtttttgtaaaatcctgaaaatgtcgaatcggtattccttgaagtgaagcttctccgtgatatacaatactttgtatataaatcaatatataattttctgcaaagaagataaaaactgttgtaaaactgatgatgatcgcactgaagacctttgacaagatcaactttctctcagtcactggaagtgtatgtgtaaggtagctttcctttccatacatgcttttccagaacctttgtatcacaagaataatattcacgcagaatataaaataaataccggtcacaacaacaatagcctgtgcctttattgggatatgatcataaaatgtttcataattgaacacagtattgattccatggacaattccataaatgatcaaaacagcccatagtggcagcatgatcttacggtaatattttagatcatatttcatcaatttccttaacataatttttcctcctctccttatcccttctatttttcctactccagattcaatttctttgttaatatcacttctgtaacaatatgataaatgataatgatcacaatattctctacaagatagatccacagatcactatcaaatccaaatgtgttctgcagacttgatcccatattatctaagtttgtcatacttggaattccgatcagtgatacaatgatcgataacactgcatatgccacaaatgcaaacaagaatcgattgccattactcaactgtccgatcaccattgctgcatatatatggtagattccacttagcaaacctaccactgcgatcaccgctccatatccaatccatggtcctgcatgtactttgatgacccagtttccaaaatatgttacggtgtccataagttttaccgggcttatcgcaatgatctctactcccaataaagagattacgagtgctgtcccacagctgatgatcaatgcactgatcactttggataagatcaggcttcttgtagtaactggaagcgtgaacattaaatatccttcttcctgcaataacccattccagaaacgctgaatcacaatgatcacattcattacaaagattgcaacgatcactgcaataatgaccacaagactaaatacgatcatcgtatttccaattccgtcaagattcgaccgaatactgattccaaagatcagtcccatcactaagagtacaccccataacggtgctaaaatcttcgctaatgctttcagatcatactttattaattttcctagcatacttcgtcccctcctctgtatacatctgtatgaaatatctcacggaacagggcatcgatggatttgccgctttcttctcttaagtcatcagctgacttgtatgttacaatatttccttctttgataaaaataacctcatccatgatcttctcgatatctgcgatcagatgtgttgaaatgatcacggttccttcctcattataattgtttaagatcgtatctaagataaaatcccttgctgcgggatcgactcctgcgatcggttcgtctagcagatagagttgtgcttttcggcacattaccaaaactaactggactttctctttatttcctttggataagcttttgatcttcgcttcggtgttgatctttaatgtctcacacatgccctctgcttttttacgatcaaagtcttcgtaaaaatcttcaaaaaaatccatcaaatctgcaatcttcatccaatctgcaaaatacatcttatctggcagatagctgatgatcttcttgctgtcaacaccaggtgctttaccattgactttaatctcacctgatgttggctgcaacagaccgtttaataacttgatcaatgttgtctttccagaaccattgggtcctaaaagcccgatgatctttcctctccctattgttaagttgattcccgttaaagcttccttctttccataccgtttctctaaatcagttaattctattaaattcaaatccttcattcttcctcttcctttccgatcaatgcgactgcatcttccttattgtatccaagttcctctaaatccctgatgtattgttttacaatcttgtgtgctatatctttccgacattcttctatcttcgtcacatcttctgtgacacagcgcccgcttgttcggttggtgatcgttaatccatcctgatcaagtgctgataacgctctctgcatcgtattcggattcacccctgcttctcctgcaagatccctgacacttggtagtttctctccgcttgaataggttcctgacacaatcctcttgatcatctgttccttcagttgtgtccagattggtcttccatcatctatcttccaccccatagttctccttccttcttattgtattattgtattacttccttaatacaataatattgtatgctactttttataaaatgtcaatccttatttcatttatacttttgacactctcatcataaattgatagaaatcaaaaccaccggcttagccggtggtt

SEQ ID NO: 686 - DNA, 15264 bp, Unknown
  gut microbiota DNA sequence
gttcttgtgttggctcaccattttcccaaaaatttttgtaacgaataaaaaaatctttatattctgattcttcctttttttctttaaaatcattaaaatatgttgaacttcttgaaatatgatttaccataaagtcaaacatcaaataatagttcttacttaattctttaatatcctcaaaacttccaaagcgtgcatctacctgatcatatcgcatcggagcaaatcctcgatccgctgaagacgggaaaaatggaagaatatgaattcctccaacagcttttgcataatatttatctataacagatttcaattcattcaaatcattgcctaaactatctgcataagtgatcaacatgattttgttatttaatttcataaatttctcctatcttatcaatactttttgtttttcatattgtatcattataggaacaatcatgtacataactacatatttgttaaaatataccattatgctatatttccattaaataatagtacataactagcattaagataatttcttttttgtgacagaattaatcatatgtgtcattgctgacttgtttatcagaaatcattattccaattttcagtaataaacataaaacataggtcctgtcgtacaaacagtgatcgtatctgcgatcggttccgccagataaacgcccattgctgcatctgaaataaaatgtggtaaaagaaagatcaatggaatcaatatgatgatctttcgccagatcgtaaggaaaatggctttcggcgcctgatctaatgccacaaagctatactggcacgcaacctgtattccataaattaaaagcattgccaagtaaactcgcatacttttattggtataagcaatcaaatccatatcatttgtaaaaatcgatgaaactgctgccggagaaatcatacaaataagccagatcaaaaaggaaccgctgacacaactgatcaataataaacgaaatgaattgtataggatattaataagctgtgctgctatggcgggaagtgcgagttttaaaaatgcttttggcactggcatcacagctaacagcttatctcctgatttctttttatatttttccacaaaaaccaccttcaaactattcttttgtcttattatagcttgaagatgtttgcttttgaagttactatgaaatttattagtgactcttttgcctagatttctttcttgttatctgcccctggtgttgtgacgatgactttctcaggtgtgatgatcaatgctccttttgcagttgctgcgccatgaaacatttcttctaccattgccttaaatgtatcgacaattgctccttctgttacgtattcagctgttcctttaatctgatatccttcaaggttctgagcattgtatacagaaattgcaatttttccatcgtttgctttaatgttgtttaatgttgtctcaaggaaaacatctcctacaactaattttccatcctctgtcacatctttaaaagcaactggaactacattgggttcttcatttgcacatgttgcaagatcccacataccttcttttaataatttcactactgattcgtttaacattttgtatacctccgttgttgtttgatcaattattttgtatactcatgttatcgaatttacttttattttggaagatattagggaatttatgagttgctattaaatttcttatctcctcgttaatatattttctcatctaacacttcaatgtaaaaacttaccggtctgaaaccgtcattgcaactgatcatcgctgaatttttatttttcatccagccttcataaatatcactgcctccatatgctaatgtcataacaaatggtgaaatactctcccatgcactttcacaaaatccttctggtcgtttccatccttctgtaataaacacttgtccttcttctatatcgcaggcatgctggattggattttcatacttttccattagatctttgtattctgttttccgtactgcggtaattttacatcgtttcattgatttcttcctttctttcattttctccatatacaacaaaaaccccacgtaaaaacgtgaggtttaagaatggactaggcgggaatcgaacccgcgtccaaaagccaattcacatgaggctctcccattacagtcagtcttctttcattccctctaccgtgctccgactaacaggatcacagattcagtagcttcatcaatactttaaccggcacaaagcttgaccggtcaagggtcctgcatgtttgaagccaggattccagactacaggtgatctagagctgactgctgcaaactaggcagcgtacgctaatttattatctgcgtttatatttaagtttgtaccgtaaggtggtccctcccaatggctcctcaagcttcataacccctgtcgaaacctttactagcccggaattaataagcttggttcgagactgagagccttcccagtctcgaaattatattatatagtctcttatataggatgtcaagtctttttgtataacttcttatacaatctttaatcttccttgaaattatccaaagtttcttactttgaagtctctctgtgcttctcttaactgatctctctttgagatatcttgtcgtttgtcgtagagtttcttacctttgcataatccgatctgaactttcaccaaacttccactaaagtatacttttaatggaatcaatgtatatcccttctgattgatctgtccgatcatcttggaaatctccgatttatgcaataatagttttcttgtacgaagtggatctttgttgaagatatttcctttttcataagggctgatatgcatctgatgaatgaacacttccccattatcaatatcaacaaaggattctttgatgctgcagtgtccttgtcttaaagattttacttcagttccatgaagtacgatccctgcttcaaaactgtcttctacaaaataatcatgtcttgcttttttattatttgctatgagtttaattccatccgtcttcgctttgctcataatcatcatcctccactaactcaaaatcaatattcttaagcatcatatccacatctttgacacggattttcgccttctctcctaatttaaatgttcttccagttctttctcctaccatggaataggtcttctcatcatagtaataatagtctcccggaagaatggatacatgaaccattccttcgatcgtatttggaagttccacatagattccccagtttgtcacaccggaaatgattccttcatgtacttctccgattcttcttctcatgtattccgctttcttaagcttacatacttctctctcgacttcttctgcacggcgttccatcttagatgactgttctgctacttttggcaaaattgcatcgtaatgactgaatcgtcttgttgtaaatttattatgcaaagtttccttgatgatcctgtggatctgaagatctggatatcttcggatcggtgatgtaaaatggcagtaatattttgtggacaatccaaaatgcatagagctgtatgcagaatattttgcctgtttcatagatcttaatgtcaaacggctgatcaatggttcttctggtgttccttcgatctttgtcagtaacttctgtacttcctttggatgaatctcatcatgactgctctttaagtaaattccaaagttttgtaaaaatacctgtaacttatcaatcttctcatggtctggaatctcatggattcgatacaaaaatggaatctctctccagtaaaattcttccgcgatcgtttcattggcacacagcataaaatcttctataatctttgttgctgcatttctcacctgtggataaacatcaactggacggcctttttcatctaagatgatcttagattctggaaagtcaaagtcaatacttcctctttcatgacgacgatgtcttaaaatgtcggataattccttcattaactcaaacatttctacaaaatcttcgtatttgttacgttcttccatatccccatccaagattttagctacggatgtatatgtcatacgatgatcgacgttgatcaatgtctctgcgatctgatgatcgacaacctttccacttggatcaacttccatgatacaacttaatgccagtctgtcgcatccctgatttaaggaacagattccattcgataattgatgtggaagcatcggaatcacacggtctacaagatatacacttgttcctcgttttaacgcttctttatctaatggagagtactctgttacatattcggatacatccgcgatatgtactccaagtaaataattctttccttttcttgataatgtgatcgcatcatctaagtccttcgcatcttctccatcgatcgttaccattggccagtctctgatatccatacggtctttgtagtcaaatgctttgatctgtgatggaatcgtatcaacctgctgtttgacatcatcttcaaactgggttgggattccataagctttgacaattgataaaatatcaactcttggatcatctttatgtcctaaaacttcaatgatttttccttctggacttcttctggcatctccataatctgtgatctctaccatcactttaaatccgctggtaagattcttgcactgagatttggatacaaaaatatcactgtcaaatcttaaattatctggaatcacgaacccaaagttctggtttttctgaagagttccgaccactgtcttgattcctctctctaaaatcttgatgatctttccttcttttcttcttccagaagttggatgatcgtccaatacctgcattaagaccgtatcttcatggaaagctccattcatgttcttctcatgaatgtaataatcgtcatcttccccttctacagtcacaaacccaaaacctttgcttgtacaactgaatgttcctttgaccgtcttcacacttggcggcatgtattttccacgtttacttacttcaatcgatccttcttctaccagttcattcaaaatctcaacaaactcgtcacgatcttctggagctacctgcatcaggtatccgatctctctttgtttcattggctgataatacggatcgttgatcaacgctttaattttcttctttctgttaaatcgtttatctgtcattacgttctcctgtatatttaaatcttcttaatctttttatggaaattctcttcgacataaaaagcacctcttaaaacaagtttaagaagtgcttatcttttctctaaataaatcttgagcaaaggattgctgctgttacgaaaaatacgatcgtaaagaatgttgtcactttgatcagtgttccttccttagaacgacctttgttcttgctccagtatgttccgctatctgctgcaccggttaaagaacctaatcccgcctcttttccttcttgcattaatactaatatgattaataaaattgatgctataataaaaattacagttaatgctgttttcacgatatgcctcctaatatatttccattcactgtggttcattctaacatatacatatcaaacttgcaaggaaaacaacaatactttgcatagtttttacatttttatccttttaccagccatattttgataagcttccaagctcttcttcaatacgtaataaacgattgtattttgcagtacgatcagatctgcatggtgctcctgttttgatcagtcctgcattcgttgcaactgcaatatctgcgatcgtcgtatcttcgctttcccctgatctatgagaaatgattgttttgtagtctgattttgcagctgtctcaatggcatctaatgtctctgtcaatgttccaatctgatttggcttgatcaaaatactgtttgcaatattttccttaattccttctcttagccgtgcaacatttgttacaaataaatcatctccaactagcaggatcttctctccaagacggtaggtcaatactttccaacctggcatatcttcttcatttaatccatcttcaatggaaaagatcggataatcttcgacaagcttttcataatactgcaccatttcttcagaatttcttcttacttccttgcctgccatcctgctttctcccataaaatgataaactttctcatcttcattatagatttctgatgcagcacaatccatagcgattgctatttcttcttttgttttatatcctgcctgttcaattgcctgcaccaaaagatctaatgcctgttctgagctttccagattcggggcgaaacctccttcatctccaacacctgtatttaaatgatttctcctcaaaatgtattttaatgtatgataaacatcagttcccatcatcaaagcatctttgaaagagtctgcaccaactggtgcaatcataaattcctgaaaatcaacggtattatctgcgtgttttcctccatttaatatgttcatcattggtatcggaagtttggatgcaaagctgcctccgagatactggtataacggtaaacctagtccacaagcggctgccttagcagttgcaagtgatgctccaaggattgcgtttgccccaaatctttctttgtttggggttccatctgcttctaacatgatctgatcgatctcaatctgattgagtgcatttttgccagtcaagcggtctgcaatcttgtgattcacatgattaacagctgtttcaacacctaatccacggtatcttttttcgcggtctcttaactctaacgcctcatatttacctgtggacgcaccagaagggacaattgctcttcccaaggctccattttctaaaagtacatcgacttctaccgttggatttcctctggaatctaaaacttcccttccgataacattttcaatgcataaacgatttttcaatttttgtcacatccttctttatgaaaataatagtggtattatttccttggttggatgtttttatacatatcactaatatcgatcaaatatatttcttttccatgttgcaccagcatcttcttctcttttcctgccagatacatttgcgtatcatctctaaatttctttggcaatataaatttcttatatgtcttatttcttagattacacaaataatcattgccttgatcatcatcaaataaaacataatctccagcatcatcaataatatgtactgttttgacatctggaatatcaatggatgtttcatatgccagatgttttaaatgtaactttcctttcttttctttgtatacataccattcgttatttgaatattgttcttctttggagcggtcatcccattgttttgtcgctttggctgtttttagattaattttattccagacgttgtattcagaattttttgtcatgacaggatttcccattgctacaatcttgtcttttccaataaaacaaatttcttcattgtgtgcatatccactgatttctggctgtttggtttcttttcttgttttaagattcaatgcactccaatatcctttgcttctgtaatttaacaaaatccattccccatctggtgtcatctccatattgcagattttggtgtcatctgtaatctttgttacttttcctgttttaagatttaattttgcaatacattctttttgtatgatatcatcttttttattcatatgatataaagaaacataaatcgtatcttcatcccatactttccagaaaatatcactgatatttcctttcacattgtatacataaatttctccacgaatcactgcatactgaaatgaaaatttccttccattataaattccatggaaccattttttctctggttttaattcttttaaatgattcccttcaattgtatatactttgtctgtcacttcgacatcgtattttccttcgtaatgatactgacagataaagctttggttgtgtccttgtttgatttccatgttatcttttagcacaatcttttgggttttcttatgatcgctgacatctttggtttgtgttactttatatatcgtctgtgacataaatgtcttttgaatccactgccgaaatgttttcgatgtcgctgctgccacgctaacacttattcctaaggtcagaaaacagatcaatgcaatcgttgctgctttaaccattggtgtcatttgcttaaattttaattgctgtttgtggttttgattctttctcttttccatatctttcaatgtttccatcaaaaatttatcatccactgcatcgattgcctgaaataatgttttttcctcatccttattgtctttcatatttcaaatccctcctctttcagatattcttttaactcttttctgatccttaacagtttgactgacatattctttggagttatttcataatctctcgccatttctgagaccgattgcaaaaaccagtatcttcttaaaaataaaattcttttttcttttggcagttcctctatgaactttgcaatgatccattttaattcccgtaattcaatctgattttctacattttgttctttgctgatgcactcttctaattcttccagtgaaagatcatactggctgtttctcttttttgcatgatgatattcatagcgttttaatgatagattttttatgatcctgcagatatacgctttgaatggattcggtttcttgggcggtatctgattccacaaggtaagccatgtatcactgacacattcttcactgtctctgatatcgtttaagattcccatggaaatgcttgtacataatcgtccgtattttttatctgtttcgtgaattgctctttcttcacggtttgtatatagatctatgatcttttgatcttccatatccttgcccttcctttgtttattttgatgatcatctggttatatatacggaattattatatgatactacatagaaattttaatttgctggtttgatgacggaaattattgatggaatattataaaaagggttatctgtctgcgacgtgctctcgctcgactcacacgcagctgtactaagctcctgaatggtctaacgaccatccactcactaagtgcaggcgtgttcctacggtctcagacagataaccctttttataatattcaaataatttacgtaatcgaaaccactaccgaatgtgcatggagaatgatattggatgtaaattaattttttcaagacagaagataagtgtttattatattcccaaacatctcgataaatcggtgcttatgcatctctttaaattcccgtttacgaatacaaaaattgttaatcaatatcatataacatacacactgtatagtgatttgaatcacgtaaattatttgaatattataaaaagagatcatgtgtcagcaaccgtacggacacgtctgcacttagcgagtggatggtcgttagaccattcaggagcttagtacagttacgtgggagtccgaacgcgagtgggttgcaggcacatgatctctttttataatattccaccaataatttctgtcttcaaactacaatttactattcaactacaactttgcatattttcttaaaacaagcaattccatatttgatgaaatttttcataccatcctgttttagttttgccacataatctttctcttcaatctgttttaatgccttttcacatgctgcatccagatctccgtcctctgcatactttatttcaatcacaattcctgttctattggtcggaacctccactaatatatcactgtaaccaattcctgattctgcatttgacttgattagccagtttgatttatatcctagaagtccaagcaaaataccatgataaaaattttccttcttttcttttgcaactgctgtatcacgtatactgatggtattccagagatagtctccaaaaatctgttctatcttttcggaatctttatctacaaatgcactgcaaaactcttccaatgtttttccatcatttcttgatacatcagaaaaccactctctgattttttttacgaaaagatttctaacctctttattcggaattaccagacggtattttccactttctgtacaacctttatgtgtcagatatcctgtcgtaaaaagcacactccataaattttcaatgcttttatcaatctcatcataagtgagttctgatacaacatccttttcaatactctctcctgctattaaacgttctatctcgtttctagtcgatatatcagccttgtctataaatctacgaacgatagcattaccacttgagttggaccagaaatcctgtggcttagcagaaacatctaaatataagcttttacaatattgaattacatcccatggacaatatatatcaatgtttccaaaatgataaccgtcataccactctttgacttctaaataatgatctttaagattgtaatcattcaatatttttttgacctcagcatctgtaaatccaaaactctcatcatactgatcattcaagattgataaaacctcaaaattattaagacctgtaaagatgctttccttagaaatccgcatacaacctgtcaaaaccgcaaactgtaaactatcattggtcttcaacgccattccgaaaagacctctgatcaatgacaccatctctctgtaaaagccattctgaaaagccttatccaaagggacatcatactcatcaatcaaaatgatcaccttttttccaaaatgcttgtacaataattgcgacaaaacctgaaggcttgatatcagcattttttcattcattgtattcataccattatttaatgaaataatagctttgtatcgttttttctcattttctgacagatgttcactatcttccaaaaatccaaaccgctctgcttctagacctatcaactctgtcatgcgatacttggcatcctcaaaagttaatccatccacactttttaatgaaaggaaaataaccggatattttcccatatactcttcacaaagttctttattttttgtaatatataatccatcaaacaatgattcgtctgcatctatttcaaaaaaagagcgtaacatactcatattcaaggtcttaccaaaacgacgtggacgtgtaaaaagagtaacctcgccacctgtttccaccaactgttctataagctttgtcttatcaatataataaaaccgattctttctgattttttcaaaactatcgattcctactggcagttttaaagtatttaccatataaacctccacgaaatgttcaaaatccgctatactttgtcttaagtatagcggatttttatttttaattcaaatacacttttatgcttctgatattagatacctttacccttaatcacagattccaaaaaatcaacatattcttcaaactgttgaattcccatctctgtgatttcatattgtgttaccgctttcccattcattagtttcttttcagatttaacatattcccagctttctaatttcttcagctgtatactaagattaccgtccgatgcatttgttaatttctttagttctgtaaaaagcaatttttttgtgatcagatgactgatgatcagtagtctgagttttgaacaaaatgcttcctgtatttgatattctttcaccctgtaacatatcctctttcatttataatcattcttttcttatacattttgctaatatcatatagccaataataagcataacataataatacaaatcttgatagtgtatcacgatatttccaattgataattcctgatctatcgcaaacgcaatcaggtaaacgactaaattacctatcgcacatacagcatatattttgttatcacgtacaaaactgacgattaaaaatgatacacttaataagataattgctgaaaacacctgtaaattcatcaacatttctaacatttttcctgcctgagaagcttcattatttaatgtaaatgatccgataattcctgcaatccataaaatgactgggatcacaactacaacgcttccataaatataaagcatcgcctgataataatgattagtattgcttttttcctctttgtacattcggaaaatataatacgccaaataaacaaaacatatcattctcccaatatacatttccctcacgaatccttgatataaactgacgattaaatacaacacaacggttatcatattaataattgcatagcttttaaaaaatccacctaattgattcattggattctttgctccatcgattgctgatcgaatcattttaaaatcttcttcgtatgttttattgtccatcttctctatctccttttgtttttaaagttcctttattttataaagtttatattattatattttatttatatttttttgtcaatatattttattttctctttatttatgttatacttacctcgcacaacaaacgtacgttcgataaagtgagctgcggctatggctaaattaaataaaatcaaaccagatactatattaaaaaacttctggaaaaataatgaccgatttgctgatctttttaatgctttctatatttggctggtgtcacgcccatcacgcttttaaatgcggatgaaaattttcctggattttcgtatcccattttcaatgcaatttcttgaatctctactttggaatcttccattaacagattggctgcaacattcatacggtatctcttctggtaagaataaatggaatctccataaatttcacgaaaacattttttcatgcttgttgctggcatatcgtattgttttgacaattcttcgattgtgactctcacttgtaaatttgatgtaatctgctcatggatcgcacagatcttttccatattgggcaatatccagatttaaaaatagaaattctcccaatgacggactaccagcaaagaggagaaacattttccgttcttggaagcaaatatgatctgtttgaaggtatttatgggcctgctgactggaagagactttgtcagtttcttgaacttgacaggacaccaatttgttgtgccattcctaagaaccaccctctttgtgatcacaaacaaatttctatgcatgatcttgataatcaacatattgttacgattcctctggatacagatctgattctgccttatggattaatgtatgcaaatgagccaagtgaagctttgaaaaagtttcttagaattgtaaaaaaactgacatggtaaaactgtcagcttttttgatctcttcttgcaacgtatatttattcatttttatttgtaagttttttcatgatcttaagcataataactgctgcgatcaatgctgtaaccacgtctgaacacgcctgtgataccaaaactcctgtatatccaaacacatttgacatgataaaaagtgctaatacatagatcacaccctgtctgctaatggataaaacaaaagctcctcctgcatttccaacggcctgacatacgcaggttgagatcaggctcacggacataaaggtcattccgatctgctggaatcttaacatcatggctccatttgttatgatatctggtttatccataaatactttgatgatctgtggtgcgaaaatacacatgagaatcgtaaataatagtcctaatcccatttcaaataaatatgcaaatttcaggatattttttaatcttttttcatttttagccccgtagttgtatccgaccagcggctgtcctccgaaggcaaatcctacgagtactaaggctgtgatcatattaacctttaatgcgattcccatcgctgcgactttatctgttccatatgtaagtaaaaaattattggtcatgaccatcataaaggtctgcatgatatttgtgatcgatgctggaattccgatcattaagatatctctgatctttcttcctgtgaccttcatatgggatggagaacatgtcagtctctttgatttcttcatcaccgcatatacataataaatatctgcaatgatatttccaagaactgttgccatggcggctcctgctgccccctggtttaatccaaagataaagattgggtcaaagatgatatttacaatggaaccaataattgatcctgccattgactggactgctaatccttcagttcttaggatattgcttggcaccatgctgaaaatgatagatactgcaccaatcgcaatccatgtgtagtaggcattggcatactggtatgtatctttgccaactcctaataatccgagaatctgtgtacggaataataataggattgcactgatacatagtccaaataccaaagatatccagatacagaatgcgcatgttttctttgcctcgttatctttcttctctcctaacaatcttgaaatcgcggaacttcctccaagtccgaagatatctccaaatgcgatcattaaggtaaacatcggtgctacgagtgacactccggcgaccagttcctgcactcctgtcagggcgataaaataggtatctaccatgttatatactaatgatacgatcatacttaataccactggcagtgcaagtttcatatatgcctttggaactgacattttttcaaataaatagttttccataaaaactcctttccaaatcttattttataggccaaaaaacatccataatccttacttaaaatggattatggatgtccaaaccgtagcattgcatacgcaatgccctatcatattttactttatcactaagtggcattttaacagagtttattttatacgtcaagattcatttaaataaaatctgtatcctttatgatctttgcaattgcagtattcgagtagatcaatggattggatccatgataaaacaaacatccctcgcatggcgaattgattacttcaatcacatctccttcataggtatctatgatctctgcgatctcatctcctacacttaaatgatctccacattttactttcaagacaagaattcctgaagtctttgttcttactgttacaagttcattttcttctacgatccttgaacggtatcccccattcaccttcatatggatcagtccatgatatgcaagaaatcggatcactgcatcaattccgtaacgtgcctgttttacatcaacctgatctgttcccggtgtataaatcgaaaatgcctgtgttccccatacctgccattcataattcagagttgtcgtatcataaggttttggatttcttaacataatatatggcattgcaaattcttttgccacttctacattttcatatcctgttttcatgattctgacatgcggagtgaaa

SEQ ID NO: 687 - DNA, 162 bp, Unknown
  gut microbiota DNA sequence
taaaaagcaactatgccggtttatataataatctgtattatctttctttcgcatgacgtatctcctttacagctaaacatacgtttggtataattgtactataaaagtacgatattttcaacatatcagaaaggagacaaccatatggcataccgtgtgaca

SEQ ID NO: 688 - DNA, 228 bp, Unknown
  gut microbiota DNA sequence
aatttgtaagttggccaactgtagtctttcagtatatgataaaaaataaataagcaaccgaaaacgcagcggtggaattttgctcacattttgaacaaatcgcttatccgcccaatttcctacgagaactcgctctgaagttttgttttagacaaaagtctttgaagctcagacactcgtccaattgggctgcgaatttgttcaaaatatggcaaaattccaatgctg

SEQ ID NO: 689 - DNA, 249 bp, Unknown
  gut microbiota DNA sequence
gcgacgatccatagccggcctgagagggtgaacggccacattgggactgagacacggcccagactcctacgggaggcagcagtggggaatattgcacaatgggggaaaccctgatgcagcgacgccgcgtgaaggaagaagtatctcggtatgtaaacttctatcagcagggaagatagtgacggtacctgactaagaagccccggctaactacgtgccagcagccgcggtaatacgtagggggcaagc

SEQ ID NO: 690 - DNA, 964 bp, Unknown
  gut microbiota DNA sequence
taaatatcatttcccggcttccaggtcgtaccaagaagaaaatcgacaaagccgattttcttcattgcaggtattccgtttgcaaaaaggaatacacatattaatgctacagcgagaatggagacacaggcagcaagtagaaaaacgatttccattattttttctttagattttgccatgtctgttctctcctttatttactaacgtcactccatgatgttgtctcaccagtgaagatagattttacctgatctgtggataattcatctacggaattgtcattgtttacgacaactgcaataccatcttttgcgatagtctttccttctacaccctgtgatgtttcatcatcttttaaatctctagatgccataccaatgtcataagaaccttctactgtagaagaaacacctgttgtactatctgttgtctgaacgtctacctgtatatttgtatttgccttactataagcttctactaatttttccattacaggagatacggaagaagaaccaccaacaacaacttttccttttgcaccagttgctttataagaagctgctgcctcatcaacaggaatgtatccgttatcctgtacaatcttctgtccttctgcactcatgatataacttacgaaatcatttgctgcatcacttgcttttttacctaatacaatgttgaaaggtcttactactttgtagctgccattctttacattatctacagaagcttctgcaccatcaatctttacagcctttacagtatcatttaaagatccaagagaaatgtaaccgattgcattcgcatcatttgctacagaagacatcattacggaagtactgtttgtaatacttgcctcatctgttgtcttatctaccttttctccgttctcttcttcttcaataccgaacagttcgataaaagctcctcttgttccggaaccatcttctcttgacattacagt

SEQ ID NO: 691 - DNA, 2987 bp, Unknown
  gut microbiota DNA sequence
gatatttatttccattcttatggtcatatctatattttgctacatatgtctttttataaacttttgttttggatttcttccatttgaaattcttgtaaagtttataatttttctttgtaactttcactcggtaattataactgatcgcaggtcctgctgctgttcttgtatatacaacactttgcgttgcattttcttctttcacaccttttacggtcagttggtaattcttattgcttggataatatccagagaattttggtaatgtgatcttgcgagtctttcctacttcaactttgacatactgggtaggatatacttcttttccatttttatcaacgatcttcaatgctatgatctgctcttttcctttggatacagaatctttgtagaacttcaatgactgcaatggatatccgttaatatcaaacagtgcctgattatcccagcttgttccaccccatgctgcttttcctttgtaatacattttagaatctggaaaatatccaagtgcacctttcgatgcccatcctgtaccatactgatctgcgatctgcttattatattcccagtttgtccatcctgcttttaccggaatccatgcaccttcccaatagaatgtacctaatccattatcctgtgataacacggtatcataaagatctgtaagttcatttacctgtccttgtggtcctacttcatatacacctgtatttgtactgtctccgatagaatttggtgtaccgtctccatcatttaaactgttaacccagcttgtctcaaatactgcaaacatctttccataggaagcggccagtgtctgcacatctttcaatgtctttggcgtatttgcttttgctgcaatggaccagaatggataatatgaagatcctaaaacatcatagtccacattatctctcttccatgtattcatgatcgttttgtatttccatacatttggtgtttcaagatgtaatgcaaccaaagcctgcggtgtatattctctgactgctttaattccggcttttaaatatttatttacttctgttgatttctttttatctccccagataacattaaaagattctcctttgtctctgttagagtatattccaagaagtccgttggtaatttcatttcctacctgaaccattccaatatttgccccagcatctttaaatttctgaatagattctttggtgaaatcatatacatctgaacacatcttttctgtattatttacatcctttttccatgcttttggaactaactgaaccgctggttctgcccagaaatccgaataatgaaaatcaagcagaactttcatatcatattgggctgcctcttttgcgatctctacacctgtggaaacatcatttccaccaccgccataggtttccccatctgcattaaacggatcattccagatcctgatcctgatataattgattccattatcatgaagtacttttaataacggtgtctcatttccttcataatcataatatttcactcctgctttctttaatgcaagataagatgaaatatccattcctcggatagaactctcagacattcctttgacttttttgatcgttactttttgatcttttaatcctgtatctccaccatattcccatggatctttgtagctgcttacatcaacctgatttccttgtgcataagcaaagattgcaagtgaagacattgcttgtccattttcatcaaagaatgagtcccatgccccgacaaaatctgcatcatcgtagatcaatccacctgcatttttctcattgatcgttgcctgaagataatcataaatgctctttgtctgtgtcgttatactggcttttccttctgaatctttccatggacatttgacactggaaatgatcatctgctttcctgctgccttttcttctactgtattctttaatgtttttacataattgtcattgtgtgtatccggatagatgtttactccaatataatcataatcaacatcagcatttcctaattttccaatgatccattgaatatctgaagcatctgttgttggtgccgatacactaacagccggtttgattccttcttctctgatcattttcgagattttgctcattgcaacaaagccttcccatccatctccactactcatatttaagaaattatagtttacttcatttccgatcgtgatcatcgttgggactgcatctgctgccttcaattctttgatgacgttttttgtatactccagtgccttttcttctgctgaatcagtatcccaaccatctggtaatttctgcccccctgcatatgttatatcatcagaatataacaatgtaacatttgtttttaatcctgctttcttggcttcttttaatgtcttcttagcgttttctaaagacagacagctttcattaccctctttatcttttgttggattcactgcaactttcacagaaatcgtattgattccctgtgatcttacatattcaaacacattggaaacttcgattcctttgtaatttttccagacttttttccacgcatttttttgcagttgataatgggaaaaatctgctcctagaaccgtgttatctccaattccattgatttttttgtatttcgtcagatcattctctgcctgactggtttgtgagacagtattcgtatctgcttttacatgatgtgataacggtaaaattgttgttccttccatcgccgtaatcaatgctgcgatcattatagttgttaccagttttcttaccttttgcataaactaccctcctgttatttgacaacttttgcagccttcgtattgatatatccaacaaattttcctgattttgtatacaatgcaagatatttatttccattctcatgtttatatctatattttgctacatatgttttcttataaacttttgtttttgatttcttccatttgaaattcttatatagtttatattttttactcttgatct

SEQ ID NO: 692 - DNA, 54914 bp, Unknown
  gut microbiota DNA sequence
cgaatcaatcaatccagctgctgccggaataaacataacaggcatgatctcaatcaggaaaaatgctgcatctttaacttgactcgtcttcaaaacaccagtcatcagacataccaacattaacaccagtccatacacacttgccggaattggcaatggtataaacatcttaagcacttctcccaaaaaagagagtagtaaaataatcataaattgtctaagaaatttcatacaatcctccagtttttcatattaagtcttttttcttgtatacaatattatggtactaccaacttttaatgtcaatactttatttattttcataaatgaaaaatagaatcctgcatcgacagaattctattttttcacctaaattactttataactttcacagctttggcattgatatatccaacaaattttcctgattttgtatacaatgcgagatatttgtttccattttcatgtttatatctgtattttgccacatatgtctttttataaacttttgtttttgatttcttccatttgaaattcttatatagtttatattttttactcttgatctttacacgttttccataagtgtatgcttttccctgctctggctgtgttgctgatcctaatcgttttaccgctttcttattaatgtacccaacaaatttaccaccttttgtataaagagcaagatatttatttccattcttatggtcatatctatattttgctacatatgtctttttataaacttttgtttttgatttcttccatttgaaattcttgtaaagtttatattttttctttgtaactttcactcggtaattataactgatcgcaggtcccgctgctgttcttgtatatacaactttctgtactgtattaccttcctgtgttccctttaatgtcatgttataatttttattctttggataatatccagagaattttggtaatgtgatcttgcgggtctttcctacttcaactttgacatactgggtagcatatacttcttttccatttttatcaacgatcttcaatgctatgatctgttcttttcctttggacacagaatctttgtagaacttcaatgactgtaatggatatccgttggaatcaaataacgtctggttatcccagctgcatccaccccatgctggctgtccattataatacatcttgttatctggatagtatccttttgctccctgggctgcccatccagttccataacgatcagacatatccttattgtacttccaattggtccatcctgcttttacaggaatccatgctccttcccagtaaaaagctccaagtccattatcatttgataacaatgtctgatacatatccgtcaatgcatccacctgtccctgtggatcatcagaatatacttttgcatttgcatgtccttcaccaatgacatttggtgtaccatccgcatcttttaagctattaagccagcttgtttccataaccgcatacatttttcctcttgacttggcaagattttctattttttgaagtcccgctaatgcatttttactggagtttccttgccagaattgataaaatgaactgccgaaaacatcataatccactccattttgttcccatgcattcataatttctgaacattttccatagcccatactttcaagatgcagtgtaactaatgcttttggtgtacattctctgactgctttaatcccggcttttaaatatccacataaaatcttggcgttctttgcatttccccatgtatctttataagtttctccctttgaacgatctggcatgatatcaagcattccatttgtaatctcatttccaacctgtaccattccgatatctgctccaacttcctggaatttctttatcgtatcctttgtaaaatcgtaaacattttgtttcatcttttctgtatcatttttatctttttcccaagcttttggcaccttttgaagtgctggatccgcccagaaatcagaatagtggaaatctagcagaagtttcatatcatactgtgcagcttcttttgcgatttcaaggccagctgccacatcattcgcaccacctccgtatgtttctcctttttcatttgtcggatcattccagatacggattctgatataattaacttcattatcatgtaatacttttaacaatgatgtttcttttccatcaaaatcgtagtattttacacctgctttctttagtgctgtgtaggatgaaatatccattccacgaacggaactttgtgacatgttattaagttttttgacagaagctgttagattcttaagtcctgtatctccaccgtattcccatggatctttgtagctgcttacatcaacctgatttccttgtgcataagcaaagattgcaagagaagacattgcttgtccattaccatcaaagaatgagtcccatgccccaacaaaatctgcatcatcgtagatcaatccacctgcatttttctcatcgatcgttgcctgaagatactcataaatgctctttgtctgtgtcgttatactggcttttccttctgaatctttccatggacatttgacactggaaatgatcatctgctttcctgctgccttttcttctactgtattctttaatgtttttacataattttcattgtgtgtatccggatagatgtttactccaatataatcatatcctgcaccctcatattttttacaggcatatccgagctgttctataatatattggatatcagaagcctttcctggcgctgcaaaactaaatgcggcttttattccagcatcttttacaatctttgaaatctctgccatcgcacaatatccgtcccaattgctcaaagtcaagaaattatagtttacttcatttccgatcgtgatcatcgttgggactgcatctgctgccttcaattctttgatgacgttttttgtatactccagtgccttttcttctgctgaatcagtatcccaaccatctggtaatttctgcccccctgcatatgttatatcatcagaatataacaatgtaacatttgtttttaatcctgctttcttggcttcttttaatgtcttcttagcgttttctaaagacagacagctttcattaccctctttatcttttgttggattcactgcaactttcacagaaatcgtattgattccctgtgatcttacatattcaaacacattggaaacttcgattcctttgtaatttttccagacttttttccacgcatttttttgcagttgataatgggaaaaatctgctcctaaaaccgtctgactgctgattccatttattttcttatactgtgacatatcattcgtatcactgcttattgtttctgcctttgactccgcttttacgttatgtgcaaacattggcatggatgttaatcctgttgaaacagttaatgttgctgccatcaatgttgtcaatatctttttaactttgttcatttaacttctccttccctatcctttgttattttttcttacattttaacgcatgtaaatcataaatgtgaataaatccttctgaaattgtattccttttgcactttcatatttccatgcctgtcctggcactccataaatataatatgcagatgatgtcaaccctcctctctctaatcgttctctcttaaaccagtttccaaaagagctggttggtctgctcttgatcggatgagaatctaagaccagatatttttttgtcttgggattaaaatcagcaactgttacataatgtcctggtacatgcgagattgctacacaaccttttttcagatattctcttacttctgatgtactgtaagttgtcttaatataagtgaacccatatgtgtctccaaatttcttcgctgccgccttaaaaatcccatcatgtgttccggcacctatgatcctgtaatgtttctccactgcataatctgcaaacaacattggatcaacaaattgcccattcaatgcatatactgcatttgtgatcgccacaactccgcagcctgctgctgccattttcccactgtaatccgaaacatttccataatcttttctggcccatgcaggatcaaactgcataaaatcacgatacggatatacatttttattgttaagacgcattacctgccattgatagaacttctgtgctgcttctttctgtggttttgtgaaacagttgttcatatcttttattttaccgtctgtcaaggtaccattttcatccattgacagatatttttcatttttcatatttttgatataaaaatgatcgtactcacgtattagtttccatgtgtgatcttctttgctttgattcaaaatcgaaacttgatatttctgatttcccagaaaaatgatctgtacacgaattccttctccagaagctttattttgtatccaataagttccatttcctagcaactgtttttcattcccattatatggaatagcttccttatgatacaaacctctatcaatccatccaattccatatgctttctttttctcatagatcacctgaacatgatcggatgttttactaaccacgatcactcctgaatatcttggcgctacccctatctttttacttcctgaagatgtttcaaaaacattcatcttttttttcaaaaatgcataactctttttgaatgaacgatcataaatcttcccagcaaattcatcatagaccgtctggggattatcaaaatatcctggctgtgctgcctgtattttgatgcctgagatcatgcaaagaacaaggcatatcactacacagattcttctcttatttttcctgtattgttttgtcatttgattttccttttattttgttaattctattgacagtatatcattttcatgataaattattaatcagttctgctgctgtggcacaggaggtagcgcacctcattggtagtgaggaggtcacgggttcaactcccgtcagcagctttataaagaagacttaaaacatctgttttaagtcttctttttatttctcttatctttactttaactttcctgatcatttctgatcttcctgcgaatcctctgaatcgcattatcaatggatttatcactttttccaagtttttttgcaatcgttgtatatgtttctccattcagataatgatacatcacctgtttttcgaatttacttaaattctggtcaagcattttgtaataatcatttaattcttcctttcgaagcatcatctcctccggagtttcctccggagtttctaagatttcatccaatgataattcttcttcctgattcttttgttcaaacagagagattgctgtattcaacggaatatgtttttttctgttaaatgcagtgatcgttgtatagatctgtctttgcacacacagataagcaaacgttgaaaacgaagtgtttttttcttcctgataggatgtcactgctttaaaaagcccgatcattccttcctggatcagatcttcttcatccccacctgcaagaaaaaagctccttgcctctttccttaccatatccctgtatctctctaacagacattccatcgcatcatcattaccgctttggatctgtctgagcaatttctcatcagaaattgtttttaattctttcattctttattttcccagtcgttgtcttacaacttcaaacgccagaacacctgctgctacagaagcattcagtgaatcaatatctcctttcattggaatagatgagataaagtcacacttttcctttaccaaacggctcacaccgcttccttcatttccaataacaagcccgatcgatcctgtcagattctgacgatagatcacttctccatccatatctgcacatgcaaaccacataccacgttcttttaattcatccattgtctttccaatatttgttactttcacaactggtgtataattgatcgcacctgcagatgtttttgctacggttggtgtaattccaactgcacgatgctttggaatgatcactccatgtgcacctgcaagatttgctgtacgaatgattgccccaagattatgagggtcttcaatcccatctaacaggataaagaaaggatcctcatccttttcttctgctcttttaaacagatcctcaatcgttccatattcatatgctgcgacaattgcaacaactccctgatgatgttcatttgtcagctgattcaagcgttctttatctacaaatttaagaatcgcatctgttttctttgcctctcttacgatcgtacggatcggtccatcctgacatccatccaatacaaaaatcttgtcgattggtttctttgctcttaaagcctcgatcacggcattacgccctgcgatcagatcttctttatgattcatgttcttctcctatttcttcttttttattcaaatcaaaaccgatcccgatcaattcgatgatgcggtccatatctcctgccagatataaatatccaaccaaagcttccactccagttgcttttctgtaatccatcatagatgcattctttgcaacagaacctgatttggaatttcttccacgtttataaacagccatttcttcttctgtcaaaaatggctcgatcttttcaaacacttctttttgtgcagaagctttgaccatactgcttgattttttgtgatacttattcacactcatattccctgcagacataacgatcgttcggatcacgatctcatagatcgcatctccaatgtaagcaagagataatggagagtaacttttgggatccaatccatcaagatacaatccttctttgatcttttgaattaagctctgctccattttacaccttctcttgtatcttttaatacgataccctgctctaataactggtctctgatctcgtctgctcttgcaaaatctttgttctttcttgccgcctgacgttcttcgatcagtttttcgatttcttcatctaggatctcttcttcttttgttgtttcaattccaagaacgctgcaaagatcttctaatacttttagtactttctttgcatagtctgcactgaagtctttcactgttgagtttgattcacgcacgatctcaaaaatagccgaaactgcatctgctgtgttaaagtcatcttccattgcatcttcaaatttctttacaagtacttctatattagcaaaatgttctgtttcttctttgcttaaagaacctgtttcttctttagctgccatctctctgcatagatcgatcgctgtcaagatacggtccaatcctgtttttgcactttctactaaagtatcactgaagtttaatggggttctgtagtgtgcacttaacatgaagaaacggatcacctgtaatggatacttttctccaatttcacgcactgtaaagaagtttcctgctgatttagacattttcttattgttgatatttaagaaaccattatgcatccagtaattcgcaaacttctccccattgcatgcttcactctgtgcgatctcattttcatgatgagggaaaatcaagtcttctccacctgcatgaatatcaattgtatctccgatatatttcttagacatctcagaacactcaatatgccatcctggtcttccttctccccatggagaatcccatgcgatttctccttctttctttggtttccataatacaaaatcaagaggatcttcctttccttcttctcctgttaccttgatctcgcgatgtcctgcttctagatcatcaatatttttcttggagagttttccataatctttaaaagatcttgtcttaaagtatacagttccatctacttcatatgcatgcccttttttgatcaatgtctgaatcattttgatcattccaccgatttcttctgtcgctcttggctggtgggttgcaggtttgatatttaacgcttccatatcttgtttgcattccttaatatatctttctgcgatctctgttgctgttacaccttcttcatttgccttcttaatgatcttgtcatcgacatctgtgaagtttgaaacataatttacttcatatcctttatattcaaagtaacgacgcaccgtatcaaaaatgatcattggtcttgcatttccaatatgaatgtagttatacaccgttggcccacaaacatacattccaactttccctggatgcaccggtacaaattcttctttttgtcttgtcagtgtattgtagattttcatttttctttttcccttctgattgcttctgaattttgataatgtataataaatgtttccagtgcctgtcgtaattcagcattctctcttgcgagcttttcgatatccatatcgactggatttggaagatcgatctggtcaagcacaatactctgaatgcgattgactctctctccatcctgtttaactaccttacctggaactccgacaacagtagaattcggcggtacatcagatacaacaacacttcctgcaccaatctttgagttctttccaattgtaatagatcccaaaaccttagcacctgaactgatcataacattatcttcaatcgttggatgacgttttccagtttcatttccagttccacctaatgtaacaccttgatataaggtcacattatttccgatgatcgtcgtctcgccaatgaccactccatgcccatggtcaataaagaacccttctccgatctgtgcacctggatgaatctcaattccagtttttctcgcccatttctgagaaatctttctagctttgtaaaactctcctttcttatataattcgtgtgcaacacgatgccaatacagtgcttttacataaggatacaaaaaaacttctttctcttcccttaacgcagggtctcttagtttgatcgtatcatattggcttttcgcaaattctcgaaaacccatcataatttctaaacctccaatatatagtatgtaatttacaggactttttatatcatagaggattccatcaaaattttctataatacaaaaaactccgtctctaaataaagagacggagtatatccgcggttccactcttttaaaagttcctgatcttcttattatatatctgactaatatcacttgatcaagatactttcactcgaatccgttaacgccggcaacgtacaaaactactttattcatcttgtctgctcccagatgcattccagacatcttccctcaaagccgcttccagccgatggcagcttctctctgacagttccaacttgtctgtactaattctgttcattgcatttaactacgaatagtttatgctttttcatccaaaatgtcaacagattcttatttttcatacaaagtatttgttatttattctggtaaaactctcgccttcacaacagccttcttcactgcacttcctacaatgatcgcgatcacgatctttgccgcatctcctggaagatatggaatcacacctgcatataatccctgtacaaatgttaaatgcatctgtgcacacagccagatcgttccaaatgcatatgttactgctgttccaagtaccataccaattactgccatcactatgttccctgagaatttttctacaaagaatccactgatcaatgccaaaaagataaatccaaccaaatatcctcctgttggtcctgcaagtttagcaagcccaccactaaatcctgaaaatactggaagtcctactgctccgatcagaaggtatacaagataactgatcgttccacgtttcatcccaataaccattaccgcaaaataaatcaccaagttcgtaaatgaaatcggtactggtgtaaatggcaatgtgatcgacattggtcctaaaatacaagttaatgctgccattaatgcaatcagtgttaaatcctgaattttcattgtttgttgttccataataaatttctccctcacttttattatttttcctgtactgactgccattatatatcatcaatttcttattgtcaactttatttttttaaaagttaacaataagaagtcttttgatcattctaaaaaaagaaaggcaccaccgatgcctttcttaatcttcgttctcttcttctaaaatcccaagttctttgatccgctcctcaatcttttttaaagattcttcataagttccttcttttgtctcttccctctcctgattcattccatcaagtaattcgtcaatattcttacttaatggattgctgtccgtttttctcgtcaataatcccatatctgtctccttcttccgcttctttgatgatcctgcatggattacctgcagcaactacattggctggaatatcctttgttacaacacttcctgcaccgatcacactattgtcgccaatcgtaactccaggaagaatcgtaacccctccgccaatccatactttatctccaatcttaactgggagggcccattcatatcccttttctcgtctcttcacatctgctgggtggttcgcagtataaattcctacattcggacctataaaaacatgattcccgatttcaactcctccaccatctaaaatcgtcagattaaagtttgagaaaaagtcacttccaatcgttgtcctatatccataatccagataaatgggtgcttccagatgaacattcttcccaagacttccaaatatctgtcctatcagataattccgacgtcctttatcttcccaatgttcattaaactgtctggttagagattttgcatggtttctctcttctatcagagcttgatcctctgcattatataaaattcccatcaacattttttgtttttccgtcatctttttccctccgttgtcttatattttatcatacttcttttctgttatctatcgaatttgactttctatcaaaaaaattgtaggataaaagagatttaaccattaaggaggtttaaacatggataccaactttattatttctcttgattccattgcagacgtgaatgcatttgcaaatacgatcgcacattttaaatctgagattgatctttcttctggaagatatatcgtaaatgcaaaatcgatcatgggaattttcagccttgatctgacaagacctttgactttaaccgtacatggtaaagatgaacttgaagaaatcagctctgcaattacaccatacttgaaaaaataagtttacttgtgatcaatgcgagcatttgaagtctctgtttttagaggcttcttttattttgtgaattttatttagtaaaagaaaaaagcatgatctaagttcattcttaaatcatgcttattaactgagcgtgcggggattcgaaccccggacaacttgattaaaagtcaagtgctctaccacctgagctacacacccttaactggggtagctggactcgaaccagcggtgcaggagtcagaatcctgtgccttaccacttggcgataccccatcaatgcgacagctcgtttatattatcatatgtttccgacaactgtcaacactttttttgaatttttttaaatttatttttcaagagtgaattctttcagatattgactgttccagaaacggtccgttactggctgccaatattcaaatatgattttccccttattcccttgttctgagaatctccctttatcttctccctttccaatataaatttcgagaatctctcctcttccagattcttttccttgattatcataaaagcaaagtgtcattccctcactcaactctcctctgacaaactcaacttccatggagcctttcccttcttcgatgatttccattcgttcaatataagtaaggcttccttctaattgatgcagcttataaattcgttttcttgcttcttcattttcttttgaaggttcctgtttttttaaatattcaaaaaatctcatgctctttcctccattgctctgttctactttatcataatttgtttccatatgaaagtcttctctgtaaagaaagttctctttatattttacattttatcagttgacacttcctgatttttatgttagattgtcattattgtaaatgatttaaatacaatgataaggaatagtagaatatttaagacattcagagagttgctggatggtgcgaagcaattgttgatgatatttgaactcgcctttgagtagcatgctgaacttacagtaggtattgccggagtccaaccgttataatggagagatatcggttttataacccgtatcagtaagaagtgcacgtttctttataacgtgaattagagtggtaccgcggaagtttcttcgtctctatcctgataaggatcagattcggagttttttttatgttatcgtacatttatttcatccgatacatgataccccgtatccacctttcaatacttaaaacatacctacaacaatcattattttttgaaaggagcttcacagcaatgatgaacccaagcaaatatgaaagacaatattttatgccacctgaaacgtcccttgactggacaaagaaagaatatatcacaaaggcacctacatggtgtagtgttgaccttcgtgatggaaatcaggctctgatcattccgatgagtcttgatgaaaaagttgaattttttaaacttttagtaaaggttggtttcaaagagattgaagttggtttccctgctgcttcagaaacagaatatacatttttacgtactttgattgaaaatgatctgatccctgatgatgttaccattcaggttttaacacaggcaagagaacatatcattaaaaagactttcgaagctttaaaaggcgcaaaaagagcgatcgttcatgtatacaactctacttctgttgcacagcgtgaacaggtatttaaaaaatccaaagaagagatcatgaaaattgcaacagacggtgcaaaattattaaaacgcctagctgatgagacagacggtaacttcttatttgaatactctccagagagttttaccggtacagagatcgactatgcattagatgtatgtaatgccgttcttgacgtatggcagcctcgtccagactggaaggtcatcatcaatcttcctgtaactgtacagctttcaatgcctcacgtatatgccagccagatcgaatatatgagcaaacatatgaaataccgtgaaaacgtagttttatctcttcatccacataatgaccgtggatgcggtgttgctgatacagaacttgccttgcttgcaggtgctgatcgtgtcgagggtactttatttggaaatggtgaacgtacaggtaacgttgacattatcactcttgcattaaatatgtatacacacggtgttgatccaaaactggacttctctaacttaccagaacttacaaaagtctatgaaagattaacaagaatgtccgtttacgaacgtcaaccatacacaggacagctggtatttgctgcattctccggatctcatcaggatgcgattgccaaaggtatgcactggagagacgaaaaacatccagagcactggaatatcccatatcttccaatcgatccacacgatgttggacgtgaatacgaaagtgatgttatccgtatcaacagtcagtctggtaaaggcggtatcagctatgtactagaagaaaactttggattccatattcctggaaaaatgcgtgaagatgtaggatacacagtcaaagatgtatctgataaacgccatcaggaattagttccaagagatatcttaaaagtattcaaagaagtttatgtaaacattgatgatccatgcaaattaaaagaagtgcattttgtacagaaagacggtggcatcgaagcagaaatctctttagagaaatctggtgttccaaaactttaccacggaaaaggaaatggtcgcctggatgctgtaagtaacgctttacagagacacagtgatatgcattactctatcgttacttatcaggaacacgctttaaatgttggttctaactctcaggcttgtgcttatgttggaattcaagaaccaaatggtaatgttacttggggatctggaatccacgaagacatcattactgcttctgtattagcactgatcagcgctgtaaaccgattagatcagtagattttgatttaaataactgaaattattggtggaatattataaaaatggttatatgtctgcaacgcgctctcgctcgactcactacgcagctgtactaagctcctgaatgatcttacaatcatccactcgctaagtgcaggcgtgttcctacggtcgccgacatataaccatttttataatattcaataatttcagttattgaaaccactaataagtgtgtatgctttactgtatcggtatgtataataaacatctgtctaccactacataaatcaaagatcaataacattcaacatacacaccacttaaatttttcaattcttgtaattgtccacactttagacttctggtatatgagaaaaaataaataagcaaccgaaagcacagcattggaattttgccatattttgaacaaattcgcagcccaattggacgagtgtctgagcttcaaagactatggtcttatataaagcctcagagcgagttttcgtaggaaattgggcggataagcgatttgttcaaaatatgagcaaaattccaccgctgcgctttcggttgcttatttattttttctcatatactaaaagacttaagttggccaactacaaaattaaaatttcattttccagcagattcaccgctgccatcgcatcttctgtataataatctgctccgatattgtgtgcgatatcttccgtcacaacagctcccccaacccagattggttcactgcatcctgcttcgtgaagcgctttgatcgttctttccattgatgcaacggttgttgtcattaatgcacttagcccaatcgcttttggcttgtatttcttataagcttctactaccttttcaactttaacgtcttttccaaggtcgatgatcttatatccataactttccagtacaactttcacgatgttctttccaatatcatgaatatcaccttctacggttgctatgatgatcggtcctttttcttctccatcatttgctaaaaatgtttctttaacaacttcaaatgctttcttcgttgtctctgctgactgaattaactgtggcaggaagatctttcctgtctcatagtcttttcctacgatatttaacgctggtatgatcacttcattaattactgtcagtgcttctttatctttcagttcttcttttgtgactttctctacttcatcttttaatccgtgaatgatcacatcttttaatgtgaagtttgttgttgccgccgctgcggctggttttgtttctttatctttggactggtttttaatataagtctgactatccacgtctttgtagaacagcacatgaaatgcatctatggttcccatcaattctgcatctaacggattgatgatcggtaaatccaatcctgcttccattgctaatgctaaaaatgttctatttaataacggacggtttggcaatccaaaggatacattcgatacccctaatacggtatggacacctaattctttttttaccatcttgatcgctcggagtgtttcttttacttctttttgctgtgcagatgctgttaatgtcagacagtcgatgatgatattctctttaccgattccgtattcagctgctttattgacaatcttcttggcgatttcaaatcgttcttctgctttcagcggaattccgtcttccagagtcagtccgatcacaactcctccatatttcttagcaatcgggaagattttttccatgacttcgtctttaccatttacagagttgatcaatggttttccattataataacggcaggcattctcaatcgcatctgcttcggaactgtcaatctgtaatggaagtgtgacaacttcctgcaacagacgtacaacccgtttcattgtctctggctcgtcaattccaggaagtccaacattaacatctagtacttccgctccagcttctacctgtttaactgcttccaccacaagttcatcatagcgctcttctaacaacgcttttttcatctttttcttacccgttgggtttagacgttctccgcagacgatcacatgatctccaaacgtaactgtctgtgtctgactggatactcttgttttcttctcaactgttctctctgcaactgctttaggcgcagcttctgcaagttttcctataaattctggtgttgttccacagcatccaccaacgattgctgcacctcttgccatataatctttcatagattccacatattcttctggtgtcacatgatagtgtgtttctccatgttctaaacatggaagtccggcattaggctgtaacatcactggaatacttgctttttctaagatttcgtcaatgatcggttttaattcatcgggtcctaaagaacaattgactcccaatgcatcaactcctaagccctctgcaacattaataaatgtttccggatcatttccagataacgttcttccattttgctcgaaggtcattgtaacaaacactggaaggtctgtgtgttctttgaccgccagaactccagctttcacctcatatagatcactcattgtctcaaacagtacaagatctacttgatcttttactgtttctacctgctcgaggatgatgtcatatgcttcatcaaatgtcaatgttcccattggctctaacagctgaccgatcggtccaatatcaagaacaatataagagtcatcttctctcccagcttctgttcttgcagctcttgcattctctactgctgctaacagcatatctttcgcctcgtattttgcttcttccatctttaatcggttacacccaaatgtatttgttgtaataaagtctgctcccgctttcagatagtttttatgaatcgatcttaataaatccgggcggtcaatatttaattcttctgggatatcccctgcacttaatcctgcgttctggagctgtgttcccatcgctccatcaaatattaaaagttcttttcctaatcggttctgtaacatctttgtcctctctttctaaacgggcaatcttctttcatcacacaatttccacatgatttctttcgtttatcacttccgatcccaatcaatcctaacatagacttctgtggaatcaaaagattatttggcgtgatcgtgactccgatcttccttggtatatctagtaatatagcaattcttttgttgaattcaagtggaaaatctccatatccgggacatgcacgatatgttcggttatcaaacccaagtgtttcttcatatctgtcacaatattcttccagataagcacttgccgcagcatccataaccgtagattttgtcatgttaacctttgcataaaacttgatcttacgctccataacaatcccaagagtacatccgatcaatatacattcttcacaatcttccagcatatcttccatctgctgccctaaaatctcatcccccgattcctctaatctcaatggatctttcgccagtttaaatctcttcactatcactttgggctgtgctatctgtttgatctcttctatacattcacccaaaagacttgaaattcctggagtcaaaccttcaaacatcggtgcctgatatccaagatatttcaaggcattttctcttacaacctgaaaattcatcttagtttaattctttcaatacagctggaatactgtcaaatacacgctgcgctgtttctgcacgattcattgtgtaaatatgaatcccatcaactccatttgtgatcagatcaatgatctgttgtgctgcgtagttgattccgatttctttcatagcttctggattatcataatgtgcctcgatcattgtagataactgatatgggatcgtacatccacacatctttgttgtacggatcagagatttcgcattcgtaattggcatgatccctgcaagaattggtactgtgataccgatcttccttgcttctctgactaatctgtaataataatcattgtcaaagaaaatctgtgttactaaatattctgctcctgcatctactttcttctttaatgcttctaaatctttcttaaacccatccgcttcctgatgtgtctctggataacatgctcctgataagcaaaattgtcctttaaaatgttctccgataaattcatttaattcacttgcatagtgaaattccagattctcaggatcaaagtttgttgcatctgcaggataatctccccttaatgctaagatattatcgattcctgcttctttcagacgttcacattcgtatttgatatcctcttttgtagatgaaatacagcttaaatgtgctacagattcaattccatattcatgcttaatgactgatgcgatttctactgtcttaccttttgtagatccacctgcaccatatgtaacactaataaaatccggggataattttgctaatccctcaatcgtactataaatggaagaaatatctccttctttattctttggaggaaatacctcaaacgaaattgttgacttattttttaaaatttctgatattttcatagaattttgctccttttcattatttctgactaattaactatgataaattttaacatgatattttatcactgtaaaggaacgaaatcatatcattcttcgtctatagatcgtaactgatcttaccatcgatttcagcgtaataagtttcttctcctttttcaagaactgctttccccatagatgcttccataaactttttctcaacacttccaacttcttccactggtacgatcatttcaaatgttacattatccgtatacactgtatcaagcactgggatatgctctgttgctgttaaatactgaatctttccagatgtcgtgtaatcacaagtgaggctgagcattaccccaagacatttctcgatcaccatactttccttgatcccttcttgcgtactttttgtgtacgcacggatcaatcctcccgttccaagaagtgttccaccaaaatatcttgttacaactgctaccacattatgtagttcctgccctgtcagcacctcaagcattggcttcccagcagttccacttggttccccatcatcactacaacgcaaggctggttgcttttctccgatactgtatgcccagcagttatgccttgcatcccagtattgtttttttatcttctctatgaatgcctgtgcttcttcttctgtctgcgctggagcaatatgtgcaataaatcttgatttcttttctgaaatctctgcttctccctctttatataagattttatatttttgaacgtccatcttcttcctccctggtcatgatctcatctaaggactctgccagtgagatcggtgttactttatattttatcaggttatggatcacacgatctactaattccatagattctgatatacttggaactgcatcccactcgatcacattcgtttcttcctgatatttttccagttcgactccatacatcgtgtgttcctgatcttccatcaaatagtaggatactacattttccctttgtttgtcatcataaaatgactgcttcccctttaattgttttttcatattcttctcctttatacttttgccccttacatcatcatattgttgattgtatcgtttatagttacacggtcggtttacttgaacttttttatttggtataatacgtaacaggaggttttttatgaaatataccaaacaaaacattcagaaaaagagacagatcttatcttcagaaaaaattcgtagaaattctaagatttctctctttctttttaaatatgcttttatcatctccattgccttgatcgttactgggctcggcctcggggttggtttcgtacgtgggattttaaaaacaaccccacagattacaaaagattccgtccattccaaaggatatatcacaactatttatgataacaaaggatcaacgatcaaaacactttcaaaccatgattccaacaggatctacactcctctttcttccattccaaagaatcttcagcatgcttttattgcgattgaagatgaacgttattacagccataatggaattgatctgtatggaattattcgagcaaccttccttggtatcagaaaccaatctctaagccaagggggaagtactatcacacaacagttgatcaagaacaatgtacttggaattcagccggaaaaaaccacaatggaacgtctggaacgaaagatcaaagaacaatctcttgctcttgaactagaaaagattgcttctaagcaatatatcttagaagaatatctaaatgcgatcaatcttggagaaggaacacttggtgttcagacagcatcacaaaaatattttaataaagatgtttctgaactcacattgtccgaatgtgctgtacttgcaagtattactaagaatccgacacgtttaaatcctgtaactcatccggaaaacaacgcttccagaagatcacttgttttacaaaatatgttagaacaacattatatcacaaaaaaagaatatcgagaagcacttagtgatgatgtatacacaagaattcaaaaaaatgctgctgctgcacctgcaaaaaaaacaacaaattcttattttgaggacgcattaatccttcaagttgtaaaagatttaaaaaagcaactggggtatgacgaaacaaaagcttataatgctatttacagtggcggattgaaaatatactctactcaggatcaacagatccagaagcttgcagatagcgtcacaaacgatgcttcaaactatccaaaagccacaaaaatcgcgctttcttattctttatctgcaaaaactgtttcaggaaaagacgttgtttattctgatcacaatctgcttgattatatgagaaaaaataaccttggaaatcagttgatttttacagatgaagcaagtgcaaagacagttgttacaaagtttaaacaatatattttatcaaaaggtgaaaccattacaaatgaatctttccaaacaacgatccagcctcagatatccatgacgatcatgaatcaatctaacggaactgtagaagccttagttggtggacgtggaaataagacttccgatctttccttgaatcgtgctactggtactacaagacaaccaggttctacttttaagattctttctgcatttttacctgcacttgacaagaatcatatgacacttgcaaccgtatatgaggatgctccttataactatattgacactaacagaccagtacgcaactattacaaaggttataaaggttattcaacgatccgcgaagcgatcacaaactccatgaacgttgtttcggccaaaaccattgctgacgttacacctaagacttcgtttgaatatttgatgaatcttggtttttccactttggtgtctaatgagacaacttcaaatggaaatgtatataccgatattacccagtccttatctcttggtggcctgacttatggtgttacaaatatagaattgacttctgcatatgcttccattgcaaatggcggaacctaccagaaacctgttttatacacaaaagtcgtagatcataatggtaatattcttctttctaatactcagaaaggtaagcgtgtcatgaaagaaagtactgctttccttttaaccgacgctatgaaagacgttattacaaaaggaactggaaaatcagcaaaactttcttcatctatggctgtcgcaggaaaatcaggaactacttcaaacagttacgattactggttcagcggttatactccttatcatacagcttctgtctggatgggctatgacaagaatacaaattttgcttctgataacactcataaaaaaatatgggcaaaggttatgaatgaaatcataaaaacaaaacaagaacaaactacagattttaaaaaaccagctgacattgtaaaagcaaaagtctgcaaagagtctggaaaacttgctattaaaggggtttgtgatcacgatccaagaggcagccgtgtgatcacagaatattttgaaaaaggaaccgttcctacccagacctgtgatatccacgttgcagttgaagtatgtaaaacaagcgataaactcgccacaaagaattgtcctgcaaacaaaaaacaaagaaaaatttacattgtccgcaaaaagggcagtcatggaaaaacagcagactctccttatatgcttccaaaaaaatatcaatctgttttctgtaagaaacattaaccgttgatcttctatatttttatattaaaaagggattctctcaaatcagaatcccttttttctctttatttcatactcttgcctttatttcttgatcttcggctgaaagatcaaagatgccagataagaaaagatcaatgctgctgatgttccgactgctgctgccgtgaatcctccttcgaataaccctagaaacccatgattgtcaactgcctctttcattcctttccataaactgaatccaaaaccagacaatgggacggtcgcaccacatcctccaaacgcttcgattcttttataaatccccagtgccccaagaataacacctgcaataactaagagtaccatgatccttcccggctgtaatgtcgtatgatccatcaatatttgcaccaggatacaaataatgcctcctactaaaaacgccctgatatattccattattatcttactccttccagaaagatcgcatgtgcgatccctgcaacattttcaccttcattaaaacttgtctttgacattaatgctcctgttggcacaaacaatactttcttccacgttccatcaatgagcttcggtatgatcatcgatgcaagaaccactgcactacaggcacagccagagcccccagaatgagtatcctgcgtctcattctcatagatttcaattccacaatccccatgaactttcgaaagatcatatccattttcacggagcaaatgcaacaaaatcttcttgccaacttctccaagatctcctgtatatactgcatcataatcttcaggcttcgacccaaaatccacaaaatgctgatagattacttctgccgctgctggtgccatgcaagcccccatattcatcggatcttccatcccataatcaacgatctttcctgttgtgatcccttgaatctttacaggaccaatttcttttgacacaataaaacctccagatcctgtcacagtccatgtcgcagataatggtctctgatttccatattctaacggaaaacggaactgtttttcagcacttccgatatgactggaagcaattgcaagtgaatgctttgcaaaccctcctgcaacgctcatcgctgccagagacatcgcttctcctaccgttgaacatgctccaaaaagtccaaacaacggtatccctagttctttcattccagaaaacgttgctgtattctgttccaaaagatcacccgcaaacgcgtaacggatgtccttcttatgaagatcagctttactgatcgcaagcattgctgcctgtttcataaaacggccttctgccaattcccagctttcttgtccaaagtatggatcttcaatgatctgatcgatcagatttcccagaggaccttccccttctttcttccctgcaactgatgcccagccttttaagtacggcgcattctcaaactttagactctgcataccacaaatcgatgtcatagaaaccacccccattgctttgtgaataaataaatcaatccagtaacaaatgatgagaagattccatataagatcactggtcctgcgatcgtaaaaatcttaacgccaataccaaaaacctgtccttctttctgatattcgattgcagctgaagccactgaatttgcgaatcccgtaatcggcacaagcccgcctgcaccgccaaattttgtaatttttccatagaaattaaatcctgttaataagacacttagtaagatcaattcaattgtcacatataataatgaatctttcttggagagattcaaatatttcatcattaactgcttcataacttcaccaagaacacaaaatgtcccacccgttacaaacgcttttgtgcaatttaacagactattatgttttggtgtaagatttttcacgatctgttgatattcttctttgcttggttcttttttcacttgtatcaccctttcttcattttatgaaaatatataaaaataaagccaacatcctagcatttttccaaatgcgatcccatagattacatatggaatccctgatctcaaatttaatcttcttgaaaagatcggaagacttttgatcgtttctgccaaagctccgatcatacatcccacaaagattcctccaaacaatccatacagtacaagaagcgggtatccagctttgatctgccatcgataaagaaagaccaatgtcccaagaatccctccaagtgccacaaaactttcatacattctggcgtttttcatactcttcgtcaatcctgctaatctcgggatcacacctaacatactcaaaaatgccagaaaactggctgcgatcaagccgcctgcacacaatccgtaaaagatcagaaagaaactacgaatccacatctgcttcttcccctttccgccctgcattgatcatcaatgtatcattcacatctctctcgtaaagcctcatctgtacttcaaatggtgttggatcatcatttaacttgatcttacctgcatgatcaaaaaatagaatgatcccaatcgctaatcccgctgcataagaaatatgaagaatatttggaccatctggtgcctgtcccatgatcatttcataaacgttataaaacaattcttcgatcccaacatccgtgttatatgtcataattgaaaaacttgcaccaaaaaatgcgactaaaattacaaagactatctttccataatgaaaaatctttgattcttcttgttttctcttgtaatatacaataaaatcttcggcacctaaattgatcacatctaatgtcttatccacctgttttatcacttcaactaacatcaaaacagaaaaacattttctctgatcatgatctcctataaaatgatacacactttgattctttattttctgttccaaatccttgtcggtgcagtacagggacatgatatcctttattttaatctctggatgcacaagacatacactttcttgcgcttttatataaacattcactttgatatcctccttctcttacaaatgcacctttcacttcttccttgttatctttggatactaagacacaaaacgctgcgatcacaaaaatgatcagtcctgcacataggatccactggtactttcttttcattcttatcacctcagcgttattatctgtcatttttaacttttcattcataagttgcaagaaaaatcatgtggtgttataatttttcatagtgacttttatcgataaatcaaaggagatcagccatggaacaagaacaattaacactttataagcttatgattttatatttaattgagaaggtagatttccctttgagcaattcacagatttctgaatttatccttgataagggatataccaattattttactgttcagagagcttttcatgagttagaggaagaaaatatgctcagagtcaagcagattcgtaatatgagccactacgcgctcagtgacgagggatctgaagcaattgagatgtttgaataccagattccaaactctatcaaagaagatatcgctcagtttttaaaagaaaaagaatatgagcttcgtaaggaagccagtgtgactgctgatttttatccatccaaaggagacgaatataccgtaaatcttaagatcagagaaaaagaaaacctgctccttgagatcaacttaaatgttgtctcaagagaccaggcagtttacatatgtgaccattgggagaaaaaacactccgatgtctattctatgctaattgaaaaattgttatttgacgagccgaataaataattattcggcttcttcttgttgaagcaccattgcctcaatgaaatcccaaatctcatctcttccctgttttgataatgctgagaatgggaaaattggtgtttccttatccatctgaagctctgtgcggatctcttttagatgttttggcacttggcttctcttcagcttgtcaagctttgttgcaatgatcactggacgatatccattgtgaagaatccagtcatacatcataacatcgttctttgatggcttatgtctgatatcgatcagtaaaaagaccatttttagctgttttgatgtctgtaagtaattttcgatcatgtgtccccatttttccttgacggattgtgttactttcgcaaatccatatcctggaaggtctacataataaagttcttcgttaatattataataattgatcgtctgtgtctttccaggctgtgctgaaattctcgcgtaagatttgcggttcatcagtgcattgatcagtgatgattttcctacatttgattttccagcaaatgccacttctggcaatgtattgtctggtaatttacttgtaatcccacagacggtttctaaatttacactttttatgatcatgtcattctcctcacgtaaaataaatcctttaccgaacatattctacgtgaaagcccattatttgtcaatggatacatgatggagcggcttagtatttttagtgatcggaaggatctgatacccttcttttttcaatgttttgatcagcggatctaatgctttcactgtatttgttgtctcatgaaggtcatgcattaatacaatacttgttttctgtctcctgacatcctttaaaatcttcttgtttaactgctgaggactttgttcaaaattaaccgcatcttcattcaatgcattccagtcaaaataaagtaatccctttttgttcacataccggatatacggttttatattttttgcgcaatgattactgctgccacccggaaaccggtaaatatatggctttacatctgttagatcatataaatatttctgtagtttcataaggtctttcgaaaatgcacctacattcgcataaatctgatcataattatgactgtaggaatgcattgccaatgtatgaccttctaacacgattctttgatacattttcttggcatgttccgtttcttttcctacgacaaagaatgtcgcctttaccttatgtttctttagaatatcaagaatctgtgccgtatgatcggatggtccgtcatcaaaggttaaataaactttcttttgattcaaattactgttggttaaaaagccactttccccttcaccctgacttgcaatctgaaaccagtatgtctttgttcccttcccttgtgccagaaatgtgaacagaagaatccctatgatcatatatgcaaaaaatttctttttcatattcttcctcttttctaattttgtaagatattctttttctttagaatatgaaatttcaaaaaatatattctggaatatttttcaaacaatgattgatacacaaaaagaaagcaacagatttctctgctgctttctctttgtgtattaagaagttttacaaactatgtaattattatacttcgaaaatcagatctccgtaacttggcattggccagtcttcttttgctactaacatttccagtttgtctgctggttcacgtacggcactcatatctgtgaaaatcgtatcatgatagtagcgagcctgagcttcactttctaatgcctgagcttctggaatatcagcttctaacttgttgatcgctgcaaacagatcttttaagtttgctgtgatatcttctaacaatttttcctgtacagagctgtcaacaccaactgtctttaattcagcaacgccatttgcaagttttctctggtatttcataactgctggaacaatctgtttcttagcgatatctaatgttgcaagtccttcaatgttaattgtattagaatactgttcatataatacttcaacacgagattctaattcttcttttgtgtatactccaaatttctcaaacatcttaactgctttatctgttgttaatgttgggattgcatctaccatgctgtgtaagtttggaagtcctcttctctcagcttcagctacccattcgtcagaatatccgttaccattaaagataactctctgatgctgtgttaataattcttttgtaatctcgtgagcttccatagctactgcttcaactccgccttctactttctctaatctgtcacatacatctgcaaagacatctgctacgattgtatttaatacaacgtttggatcagagatagactgtgtagaacctaccatacggaattcgaatttgtttcctgtaaatgcgaatggtgatgttctgttacggtctgttgcatctttctcaaatgctggtaatgaatgaacaccagatgctaatttgtctccatgtttggattctgtagcttcacctcttgttacaagctgttttacaacatcttctaactgatctccaaggaagatagagataattgctggaggtgcctcgttagctcctaatctgtggtcatttcctggtgtggaagctgacatacgaagtaaatctgcatgtttatccactgctgcgataatagacgctaagatcagtaagaactgctggttttcatgaggagtttttcctggatctaacaggttctttccttcatttgttaccatagaccagttgttatgttttcctgatccattgattcctgcgaatggtttctcatgaagtaagcattttaatccatggcgtcttgctacacgtctcattgtttccattaataactggttgtggtctgttgccacgttgtttgagttatagattggtgctaattcgtgctgtgctggagctacttcgttatgttctgtcttcgcactgattccaagtttccatgcttcgatatttaaatctttcatgaatccttcgattcttggtttgatgattccaaaataatggtcatccatttcctgaccttttggaggcattgctccgaataatgtacgtccagtgaagatcaagtcttttctctgtttatatttttcttcatcaactaagaaatattcctgttctggtccaacggatgtgctaacacgtttcacattcttatttcctaatacatttaataatcttgttgtctggatatctaatgcctgcatagaacgaagaagtggtgtcttcttgtctaatgcttcacctttgtatgaacagaatgctgttggaatacataagatacaagcattatctgtttctttgatgaatgctggtgatgtacaatcccatgctgtatatcctcttgcttcaaatgttgctcttaatccaccagatgggaatgaagatgcatctggttcacctttgatcagttcttttcctgagaactcaagtaaaactttaccatcgtctgttgggttaatgaaagcgtcatgtttctctgctgtcacacctgttaatggctggaaccagtgagtataatgtgtagcacccttttcaatagcccattctttcatctcattcgcaactacgtctgcaattgctggatttaattctgttccttcttcgattgtctttttcagatctttgtaaacggcctttggaagacgtgctttcataacactgtcgttaaatacgtgggatccgaagatttctgatacattgattttttccttcatagagttcttcctttcttctcttacatttgaagcataatctatatatttttcttctattatctaactgatagtagaaaaaaaggggcgacaaacaatatgaaactaattgtttgacgcccttgtcagtaacttcactggttataggatacaatgattctttttgaaaatcaagcccttttttgtattttatccagtacttctatttgatcgttacggaaacagtttttccatttaccttattgattccttttaagcggaatttgtaagttgttcctactttggcttttttctttgtatatgtgatcgttccgcctttggttgttgtttttactgtcttatatgctgcttttcctgctttcatctgcactttgtagcttgcatatcctgtgacatttttaaatgttactttaactgtcttgcttccgaatttggctttggctacataggctttaaaatatttctttttgtttttctttgttagtttgtatggttttactttaaatttgtaggatgagtctttgttgactttgatcgtctttgatgttttctttcctacggttgttacttttttgtatttaccttttcctgctttggcgtaaataacatagcctttggcggattttttctttttccatgtcagttttacgcttcttgtactttttactgtttttgtgactggttttacttttgtttcgttgactactgttgttgcttcggatgatggttttgttgctggtttttcctctgctgttgattctgttggttttacagttcctgctgcttttttaccaactgcaaaaacatatcctgcatcattactataatacatcgtaccattttcatctgcataaatatttctcatacaataatttatttcatttttatctgttggctcaaaaattgaatttactttggcatcttttgaatcacaaacagaataaattccgcctggttcagcattcattgtaaaatatacttgcacagaaccatctgttgtttttgttaacaatggttcacattgtgcataatttgttattggtaacacataattcaactcagttttatcttttccaatacttgctactccaaaatatcctttatatttagcatctgagctaaaagattcaccattatttcctgatacataaatttttccatcgtagacaattggtgtcattgatgaatatcccgtatcacaaaattgaactttctcttctaaatctccaaatgttccatcttcatttacttttattccatataacttatttactccaccaacaaaatatattttgctatatgttgagtcataagccatgcttcctgaaaatgtaatttctgtttttttcgtctgcaccacgctattatccgttgtatcaatgcttgttaaatttccaactgtatccgatacaataagatattttcctacctctgttgcctttttccaataaaatcttccaccatcagatttaacaattgcttttactgtttttgtctcattttcacttttatcattttcatcttttgtatctaatacataatatgacgtatcggtatctccataacttcctgttccaaaatataactttttattcttatatgtcattttggatgtcacagaatgacctgtatcctcactaatccatactggttttaatgtatcagcatcaaatgcttctactttattatttgcatatcctacataaattttatcatctccatattctatatctgcataatagtctaatttacatgaatccgaaaaattatgttctgcttcaacttttcctgtatctttatttaattttactactttttttgttgcattatttgctaaataaacatattttccaacgattttcaaatctgatattgtttgatacgcttgtccatttcctttttcaggccattgccacttaagcaccgcctcactactactcttcgctggctgcacatccgtcactgctgctttcgcactaacccctgatgtcatcagcacgacaacagacaatgccactgccgctacacgtttcatcgttctcataaattcctccttgttatgtctcattgattgattagtttcctgacttcttcatctttgaagaaaccatatttatatttaaccctgtttagtttctttacaaaaacagatgttaaaatccataaaaatatcacattcgatacgcagtattcaatcgtcactggaaccgaagttcctaatactgccacataccgcatccattgaaatccatctcctgctgccagaagtgtccagatatccatcacaaaagaatatgaaattcctgaaagaatcccaaaaattgttaacagtatcttactgttttccaaccattttctctgatttaaaattcctgagatccatccgatcattccccatgcaagcatctgaaatggagtccatggtccttgtccaaaaaagaagttcgataccacagcacttaaagatccacataaaaagccagattctcttccaaacgccataccacagatgatcaccattgcactgactggtttaaatcctggtgaaaatgcaaatagcattctggatgcaaccgtcaatgcgatcatcaccgcaagcacgacactttctcttgtctgtggtttcttcttttcatatttaaaatagtatggaatacatgatatacacaccacaaaaatgatcaccgcatttaacatacgcttaccacctcctgtggcagaatgatcactttctcaaaatctctcgtaatctttgcacactctgtcgtatagaaataattttgtgcaaaaaacttggatggctcatcaattccttcaattttcccatcaaacatcattccaacgcggtcagcatactcagcacaaaattccagatcatgcgatacgataaatatcgtttttccctgatctgtaagtttgcgtaaaagttctccaaacttcctgctgtgttcccgatccattcctttggtcggctcatctaacagcaagatttctgaatctgcaagtaatactttgatcaacgctgccatctgctgctgtcctccacttagatcatatggatgtgagttcttttctctcattaaatccgccatttccaataatttatcgatttttacttctttttcttttcccatctccaaaaggtcttcaaacaactgatcttttacaaacaatagtgttggatcttgtggcatatagacgatttttttcttgcattttaattttccatcaaatttcatctgctttaccatacaagaaagaagcgttgattttccacttccatttgctccgacagctgcaaagatttcaccttctttaacttcgactgacagattcgaaagaacatcttttcctttctcatatcctgcatataaatgtgaaattgaaagaactgtttttctttcaaaatgtgttttctttattaactgatattctttttttctgatctgttctcttgcttcttccatcgaaaaggtcagttctatctgaaatttctcttctagccgaagaatctgtggcagagactgttccaatggatgatgtattttttgaagatgtcttgcaacctctttcggatttccctgttcgataacttttccatcatctaagatcacacattcatctgacatttccatcacatcttccaagttatgcgatgttaaaataatcgttaaaccaaattctttatgtaatttctgaagcatcacaagaaaatctttccttgccgctggatctaactgtgcggtcggttcatctaagatcaatacttttggatgcattgccataactgctgccagattcaccaattgtttttgtccgccagatagcttgtctgtatcttcatggtatattttctgcagatcaaaataattaacgatctcggctactgttcgcttcatctgttcataaggcattccgagattctcaagtccaaatgcgatctcatgccatacggtatccattaccatctgggctgatggattctgaaataaatacccaacttcttttacagactgcaagtctttcaattgttctatttcctgcccatcatataaaacttttccagatcttttacctttgggcagcagttctttttttaaatgtcttaacaacgtcgtctttccactgccgcttggccctgcgatcagagtgatctttccttttttaatttttaatgatacttgctctagagaatttctatccgataacatatatcgaaatgttaaattattaatttcgtacatcaaaattctccttccacatgcatggtaataaaaactgaaatgccattataagcatccacaacagatctctcatctgaaatgctggcataatgatcatcggataaaagaaaaatctggaataatagtggatgtatgcccagagatttaatatcgtcaaaatcacaatctccacgatatgaatccagtcttttctctcccatgtaaataaatgaaaatgtgttcttttttttactccgtagcctcgtgcattcattgaatccaactgatccatcgaagactcaaatgcccatgtcatttccattgacatggtatacataactctctgcaccgcacgttctgattttaaggattttcgtgtctttaaaatcttctttgcatggttttgatatcttgggatcaatccaaatgccattgaggttatgactccaagttttgggaagaatctgcctgataaatagatccactgctctttctttatatattggttaaagattgaaaagaccagtaagagatttactaatacacatccgtaatgaattccataaagcaatgcttctttcgtgatccttatgtgtgtgtctgcatataggatcgttcttcctctttgtacaaataatggattcgttacagctacgatcacgatcaaagcaataaatggaaaaaactttttcaaactctgattatgataaaagtacaatagacataaacagatcatctgcactcctgtcatccatggatgtctactaaatggtgccagcaaaaacattcctgcaaaataagtaaatacaacgaacggatgggctctttttaatgccttgatcatctacagatctcctctgacacaggtatacagccattccactttatccccatcatgaagcttacatttccctgccatatagtttgggaacttaccattgacacggtacatccatccactgttttttccacaatcaaattcgtataaaccgtcaattcctgctacatatcctttagaaacatcaatatctactcctgttcttttgagaacatccatcacggtatcgccttcttcaaactccatcttcttctcataaattttcccgccagctggaacttggtaattggattgcaatgcacttttattagagagaactgttttacagctaatcaggaattcacaagattgttcttgctttgcttctgttgtctgattctctgccgtctgtactgttgattcatttttactggctgttgttgtttttgttgtttcttttgtattctttgtctttgttgtcttttcttttgtttttttcttctttacttttttctttttagctgttgttgtgcttgtctctttcttttttgctgtactactttttgtctttttgctgtttttcttactcttctgtgatttctttttatcttttttcttttcgttcttcttcccttttttacttgttatctttgctgcttctgtctgcgttgccttctctttttctgccgttgttatctgtgcctgatcttttgtatctttcttctgtgtatttgaacaggctgtcatcgatactgccatcaatgcagaaatcagccataccatatattttttcataaaaaatagatcctcccatgtatacagcataaaaggatctactctggcatatttacataacaaaaagacatgcattcttattcatttctaaaaagactacattttatcatcttatcttttgtcattctggcaccatgaggacgactttgtctctcgcaaagtatatccttagatcatggcaagtattccggcttaagatcatcgtcttggcaccttcccagtttcccagtggtatattaccttgactccctatcacggcggcgggaccgctcaggatttgcacctgattccaatttaaaatctgtatgtacagattaccatgaaattatgcgtttgtttttctttttttcgtctttttattatgtaatatttgttatttagttgtcaagattttcgagtgtttttataggatttctccgtttgttttgatgattttttgatatttcacaatttcatctgtttccctgttggatcaatacggtagttgctccgataaatcaatctggaaaccgacacgaattcatatccttttgctttgatatttcttataatctgttttaatgcttgctttgtgcattttgttccagtatgcattaagataatgcttccaggtgataaatttttgtgtccacaaactttctcgatcagctgctcctttgttggttcctgccagtctaagctatccacgttccattgaatgatataataattcatttttcttgcattccgtacgacagattcgttgtaatctccgtatggtgcccgaaaaagatctattttgatacctaataatccctgaatcttctgtgtcactccttgaatttcttcctgctgctgtttgtctgttaattttgtcatgtatttatgatgatctccatgacttgcaatatcatgtccttcctcatagattgttttgatatccgttggatatttactgatccagtctccacagaagaaaaaagttgcttttacattttcctgttttaatatcctgagaatctgttggatatcttcatttccccatgcagtatcaaaggttagtgctatctgttttttctgcgtatctacacaatagatcggaagtttttcctcttgtgtttcactccagacatagatgttattttgtataaattctctggcggactggatactgtcactgcttgtaaactgggctactgttaagatcagcaagatcaagatcgtgatctttcgaagcatttttctgctccctttgtttttatcattttatgaattcatgtataaaaaaagaatcctgctttgcaagattctttttcttatctcaattgatattctctattttacctgccccttctggatgatggatacaatattcaaatctttatctaaaactactgcattggcatattttccttcttcaagacttccatatttatcatcaattccaatggattttgctggatttagtgttgcacaacgtactgcactttccagtggaatctgcatttgtttgactgctgttctcatgcaatccattaagtttgttgcagaacctgcgatggctcctccttcggtcagtgttgcaaggtttcctactacagtcactggttgtccgcctaattcatactgtccatcttccatacctgttgccatcatactatcactgatcagtacgatcctcttatctgtaaacatttcaaacgttgctctgacacaggatgggtgaatatgaactccatcgcagatcagttctacataacaatcgctgtctcttgctgctccaataacccccggttctctatgatttaacggtggcatagcattatataaatgtgtgatatgatcagcacctcttctgattgcttcacttgctgtatcataatcagccatcgtatgtgcaattgatacatgcacttcatctttcacttgatcgataaaatccatagctccttcagtctctggagcaagatctactaatttgatcaatccaccggctgcttcctgcagtttatggaataattcaatatccgccagcttgatgtcctcttctttctgggcaccttttttctctttgtttataaaaggtccttccatattgatcccgacaagatctgcaccttttccattcttatgttcttttgctgccttcattgcctgaaatagttcttcttctggaatcgtcattgtcgcaggacagattgccaatactccattggctgcttcataatcagccagtgcctgaatggattcttcggttccatcgcacatatcatgtctgacacatccatgaaaatgaatatcgacaagtcccggtatcacataacatccttcagcttctacttctttgttgtccgttgtttctttcgctacgtattctccttctacatagagatcttttttctcaaattttccttctggtgtgaataccagtccattttttatgatcattatattacctcgatttccgttacccatttgtattgttctttctgcttctattttatcagtctgatactatacaatcaaataaaacaggacttttttgccctgttttactgaaactgattcttccttcacggtgcatttttgtttgatcatatttttgaatgtactttcaagttaataatcatctcctgcaagaccattctgttactgtcaattatcaacacaaaacgagccggcatatcaccggcccgttttcggagaaaactatgaataacaataaaggcttatttacataatttttccatctcatctgcaacaaactgaacttttggtccaatgataacctgaatgttaccttttcctggacgaatgattcctgctgctcctgaggatttgatcttcgcttcatctattttgttatcatcattgatttccagacgaagtcttgtgatgcaattatcaacactcttaacattggcacttccgcctaatccttcaaggatgactgctgccattgctgtaaaatcatcattggctaatgtaatattttcttcatcaagatcgtcatcttcacgacctggtgttttcagatcaaatttcgtgatcgcgatacggaatactacatagaatacgataaatgctgcgattcctaaaggaatgatcatccatgtcttctgtgctgctggtaaggaagatgagaatacaaggtcagttgctcctgctgagaaactaaatcctgctctgaatcctaccagtgttgtgatcgttgtaaagattccgtaaaggattgcgtagataacatataaacctggtgctaagaacataaatccgaattcaaatggttctgttacaccacagacaaatgcacaaagagctgcggatcctactaaaccgatggcaatctttttcttgttactctttgctgtctggatcattgctaatgctgctcctggaataccgaacatcatacatgggaagaatcctgacatgtacattccaaggctccatgatacattcttagatgtttctcctgcccagaaatgagttaaatctccgagtccaatcgtgtcaaaccagaatacattgttcaatgcatgatgtaatcctgttgggatcaacagacggtttaagaatgcataaataccagctccaacagctcccatcttggcaatagactgaccaactgtgatcaatgctgtaaatacaactggccatacaaacagtaatacaactgatacaatgatagatacaacaccagcgataattgctacgcaacgtttaccactaaagaatgataaccaatctggtaatttagtatctttgaatttgttataacacatagatccgatcacaccggctaagataccaataaatggattggaaatcttatcaaatgcaagtgttgcatctgcattctttgcaatagatggcatgattgttgttactactgctgtagataacaaatttgtgatcatcagccatgatgctaaagctgccaggccacccgttccatcatgtttgtctgccataccaacaccgacaccgataacaaacagtaatgccatgttgtcgatcaatgctccccctgcctttacaaggaagaatccgatctggtttccaatacctgtgatatcaccaccctgcatggttgcaggacacagtgcatatccgattcccattaaaataccacagattggcaagcatgctactggaagcattaacgcttttcctaatttttgtaaaaatttcatatagattgtcccctttcatttttactttaagtttttcatgttcttttccttctcttttagttactcatctttgttattgttttgttaactgtatcacctcttcccctgcttttacttgttgtcctgtcaaacacttcgtgatcttataatcacctaagttcgttattacgatcggcgttgtgacgtcataccccgcctttgtaatctcttcaagatcaaattccaacaaaacgtctcctgcctttacctgatctccaatttctttatatgtctgatagtactttccatttaattccacggtatcaagtcctgcatgaacgatcagctctaatccgtcttctccctgaatacaaactgcatgttttgtatccattaccgtggcgatcgttccattgatcggagaaacgactgttccattggatggaacaattgcgattcctggtcctaataattcctgagcgaatgtctgatcattgacttcgtccattgggattgttctcccatcttctactgcttttaatgaaatggtctttgcgttcttctcaaacatcttccttaatgaatcaaacatcttcttctcctttttctatactgctttttctgatcctctcgatatgcatcgttaaatatgcaacttctgctgatgtcatatcttttttgtatctttctttaataaaagtcttaatatatcctgcacactgatattctttcggacagatcttctggatcatctcctgtacatcatcgttcatatcatccattcgttctgacgcaaataactttctggataaaaacttcaaatgtgtgataaaccgttcataactcaatgactgggtatcgatctccaaatggaagtagttctttatctgttccataacatcttctaaaaattcagtgatctttaaagtatctttgactcttgtatcaaattctgcactcacgatgtgtaaagcaatggatgccgcatcatctaatgggagtgatatattcaatcgctgtttgatcattcctaacgcgtattctccaagtgcaaattctttctcataaaataatcttacttccctaagcatcgggtttggaaaattcatatgatcttcatatcgctgaatcgcaaaatgaatatgatctgttaatgtcacataaatattctcgtttaattctgttcctaaactttgctttgcatgttctatgatcgctgttgaaatctcaaattgttccatcggaagatcttgtaagatttcttttaatttccggatcatcttcggatcttctaatcgaaaaatcttctgaatcttcttctcatcaactactttcccttccttcccctgaaatccaattcctgttccaacaacaatgatttcctgtccatcttcatcgatgctgcttactacgttgttgttcattaccttatctattttcataatcttctctccatgatcattggaagcttttcttctagtatatatattatatgttctatcttaaaataaaaagaaaaccacattttataaatatgaaagtcaacactttcacacttataaaatccggttttgcctgcattaccagtgacaatcctcaatattcatatcatttaagtcactttattttcttaacttgcttttattttatcagcattttatacaaaagtcaagccttttttagctttttctttttatattttttacaatggatattgtgatacttttttactgccggtgcgtgccatcttttacaatctctattggctgcgcaccttgcagtatgtgtgtttttcttaaattaagatcattccttgataacaagtgtatcatagccttttttcttcaattcattttccaatcttactgcttcatcaagcgtattatattccccgatctgaactgcataataaggatccttataaacgatattcccctcgtatccatctgcaaccgcacgattcagaacatactgtgcattagaaaaattacggtataaaccaatctggacacgatagattcccttcagaactttattttcatctccgatcgtttccataattccatctgcgatcgcttgtgcgatctcttgaaatttctcatcaaatctttcgttgtcctgatctgaatttaaaaaacctgcctcgatcaagatcgcaggaatctttgttcttcttaatacagtaagattcgggcgttctttaactccaatattacgaaatcctacttgttctaagttcgcatttacatttcttgccatctctgctttgatcccatgatcatcaaataccagtgtttcaacgccttgatattcattcgcattcggacttgcatttctatgaaatgagataaaataatcagctccactttcattcccaagccttgctttttcagatggtgactggtagatatcactttgtcttgtgtaggatactggaacgccattttgctctaaaatctgaccgactgcgagtgtcagtcttagattgtcgtctttttcctttcttccatcatactgggctccattatcataaccgccgtgcccagcatctaaaattactcctgccatattattttccctgtatttctttcttctatcagactattcatttctccatgttttgtgttatattggtagtagataacctgatgataaagagttttattgaaaatatgacctattacttgacaaaaaatttaggggtattattacaaatttaataataccccacctaccatgtatcaatatttattatcttcgttttttattctactatattatgattcttttttcaacaactattttaatttaaaatatttattttttttgattcaaaatagttgttgaaaatataaatatattcatataaaataaactcaaggagttgataatttatgaaatacaaaaaactaacaccatcacaattaaatatcatgaaaacattatgggacaaaaaagagcctatgatcgcttctgattttgttcagcttgatccttcactgaatctgaattccgttcaatctgcattgcgttctctacttaagaaaaactatattgaagtttccgacattgtatatagtggtaaggttttaaccagacgttatattcctgttgtttcctctgaagattatgcttctgagaatatcaacggagtgctggaagatcttttatcttctaatatacttcttcaatatgtggagtctgaaaatgatattaaagtgatcgaacgtttacaggagaaattagaggaacgtaagaaaattctagaaaggaagtcttgatatgacacctgcgaattatggttccgtatttagctgctgtctttttggcagtctgatgatgctttatctttatgtattttgcagaagcaaacgatttatcttaagaaacggaacctttgtgatttatcttgctgtcggagttgtcatgatccgtatgcttttaccttggaattttcattttgcagcaaatgttgaatcccataaaattcttccttttctttttgatcttttaagggtgaagattttatctgtggaatttctgacaatccttgtgatcattttttgctttggaagttgtttaagacttgctttatatttctataaacttgttcgctatcgtcatttacttcatcagttagaccctctcgatgacataagaatattaagaatcttttctgatattttggaagaatatcattgtacgaagcagattttaatctatcaggtgcctggcctttctagtcctgcaatttctggtctgatccatccagtgatccttcttcctgacagagaatacagtgatcaggatctgcgttttatttttatgcatgaactcaatcattatctacaccatgacttatggaagatttttttctgggaactcgttgtatgtatctactggtggaatcctctttcttatatgattcgccgtctgatcaaagatactgcggaatatgcaaatgatatccgacttaccaaagacagagatgaacttacaagaacaaattatatgttaagtcttctcaatacttccaaacagactcatacgtcccacacccttccaacactgcattttcaggaaggtacgattttaaacattgagaaaagatgcgatcttatcagtgatagtccaaagattcgcagaaatttattttcacaatttatacatattggatctatttctttattgttcaccctttctctgtgctttatctttcagccaagttcgccagctccaaactatgacaatgatggcactgttatttttgataaacctgacagcagtaattctttttatataaagcgaaaagatggaaagggctatgatttatatgtcaaacatgaagatgcttttataaatacaggaatcattgaaaaccctgaagattataaaagtcctaaaatatattctagcaaaaaggaggctacgaaattttatgaaaacattaaataaatttatttttctatttttacttggttttatctctattggtgtattttctggttcaatcgtctcagcccaaaatacctcaagcgaaccttccattgctgtttcagaagaagattcctctgtatacagcggcgatgtcatcgtttggaaatataagactatgaacgggaaattatacaaaagaaaatataacaaaacaacaaaaaaatggatcgggaattggattccagcttagtgagcatgaaaaagaaaggaaatcagacatcttaaatctgatttcctttctttttctctatcaatttctgcgtgatcaaagataccataattccacaaaacgccccacagctatcgatcatcacatcaaatacttttccttctcgtcctggaacaaacatctgatgaatctcatctgttgatgcatatcctgtagaaatcaactgtgcggtcaatactgctttctttcgatctagcacatcacatgacaccgccttataagtaaagaatccaagtactgcatattccgtaaaatgtgctgtttttctaacaaacgtatgtaccgcttctgcatgcatcataagatcagcattagaatgaatctggaaaaatccaagaaagcttaggatccttgcaagttctttcgcatatccgatactcatccctgctgaggatgtgccgttctttgcagaaaatgaaaaaatcaaaatcatcaaaacgagtgttatcccccagtataacactcgttttgtctgtttctgtactctcatacagactcctataagcggtttccgtacatcttatcgaaatagtttgcatactctccagataaaatgttctgccaccattctttgttatttaagtaccattcgattgtctgtgcaattcctgtgtcaaagttatattttggttcccatccaagttctgtctctagttttgttgggtcgatcgcataacgcatgtcatgtcctggacggtctgttacgaatttgatcaggctttctggtttgtctaacgcttttaagattgtctttacaacttctaagttagtacgttcgttatgtccacctacgttgtaaacttccccgacttttcctttgtggatgatcaggtcaatagcttcgcagtggtcagatacgtgtaaccagtcacggacattttcaccttttccatagactggaagttcttcgtctgctaaggcacggctgatcattagtggaatcagcttctctgggaaatgatatggtccgtagttgtttgagcatcttgagatcgtcactggaagtccaaatgttctgtggtaagctaatacaaataagtctgcacttgctttggaactgctgtatgggcttgatgtgtgcagtggtgttgtctctgtgaagaataaatctgggcgatctaatggaagatctccgtatacttcatctgtagatacctgatggtaacgttttacaccgtatttctttgctgcatctaacagtacgactgtcccttctacgtttgtttttacaaaaatagatggatcttcaatagaacggtctacatggctttctgctgcgaagtttacaacgatatcgaatttttctttttcaaataaatccatgataaattcacggtctgcgatatcacctttgacaaatttgtaatttggtttgtcttccactggttttaatgtttcaaggtttcctgcatatgttaataaatccaagtttacgatctcgtaatcaggatatttgtttaccatatgatgaacaaagtttccaccgataaatccggctccaccggttactaatattttcatgctattctccttatttatctaaaaattttcctgccataacgtccattaaatactgtccatactggtttttctttaatggttcgatatctgttaataactggtcctttgtgatccagtgatttaaatatgcgatctcttctaagcaggcgatctttctgtgctgatgtgtttcgactgtttttacaaagtttgttgcttccactaaggattcatgtgttcctgtatctaaccatgtaaatccctgtccaagtaattcaacatctaactcacctttttccagatagatcttatttaaatctgtgatctctaattctcctctggcagatggttttaattcttttgcatattttacgacattgttatcgtagaagtataatcctgtgacacagtagtttgattttggcttttctggtttttcctcaatggaaatggcttttccatcagaatcaaattcaacgattccgaagcgttctggatcatctacatagtatccgaaaacagttgctccttcttttttatttgcggcacgtaacaggcgtttcttcaatccatgtccgtggaaaatgttatctccaaggaccatagctacactgtcatctccgataaaatcttctccaatgataaatgcctgtgcaagtccgtctggtgatggctgcactgcataagataagttcactccaaactgatgtccgtctcctaacaaagactcaaatcttggcgtatcacttggtgtggaaatgatcagaatatcacggattcctgcattcattaatacagataatggataatagatcattggtttatcataaattggcagtaactgtttggatgttaccatggttaatgggtacagtctggtaccggaacctccggcaagaataattcccttcatttgtgttccctttctccctctgggtaataattaaaacttaaatgtgtcttttaaacctttccatttctggtctttttcagaaatgatcaagtcaacgccttcttctaatggccattcaactccgatttctgaatcattccatgcaagaccgccttcgtctcctggatgatagaaatctgtacatttgtagcagaattctgcttcatcagataatactaagaaaccatgtgcaaatccttccggaatatagaactgtttcatattttctgctgataattctacaccgaaccattttccataagttttggaatcagatcttaagtctacagctacgtcaaatacttttcctcgcacaactcgtactaattttccctgtggaaactgtttctggaaatgtaatccacgaagtacgcctcttgtagacatagactggttatcctgtacgaataccatatcaagtcctgcttctttcatgtcgttctggttatatgtttctacgaaatatcctctttcatctttaaatactgttggttcaataacataaagtccttcaatatcgcaaggtgttactgtaatttttcccatgatcgttctcctttttattttaatattcaatctcttttaaatatctgcttaatgcatcctgccatgttggtaatggtgtaaatccattggctgtcagcttgctcttatccattctgctgttagatggacgttttgccttcgcgggatattcgtcactgctgactggtgcaacggatacgttcatccctgcctgtttgaagatttcacaggcaaattcataccatgtgcaaattccttcatttgttgcatgatatcttccatatttgtctgtctggatcatatccactaacaatcttgcaagatcatatgtgtatgttggtgaccctgtctggtcattgacaacggttaaatgatcgtgtgtctttcctaagtttaacattgttttgataaagttctttccattcactccaaatacccaagcgatacggactgtgaaaaatttctttacatgttcttcgatagcaagttccccttcatattttgtctgtccatagacattaagaggttctctcttatcatctggttcccaaggtcgctcaccctgcccgttaaatacatagtctgtgctgatatacatcattttgatatctaattcttcacagacttttgcgatattttctgttccctgtgcattaacttttctgcagatttcttcgttatcttctgcagcatcaacggctgtgtatgctgcacagtggattactgcatctggtgctgcttctttgatcacttcatttacctgatcggcatctgtgatatccatttcatcaatatccacaccaattccttcaagcccctgtttttctagttcgttcattacgtcataaccaagctgtcctttgactcctgtgacaaaaactctcataactcctcctttatggtttacatataaaaatcccggcagattttgtgatcttgatcactcctttggctgccatcttctttcttacaaagtctttaaattctaaataacgatgatttaaatattcatgctgatttccgtgacaggataaaatataggagatcagtggttctggctgatcgactaacaattcatcctcatagtcaatttcttttacttgtgaaaatactttttttaattgttcttctccattttccagaccaaagacatcatataatttgtgatcagaaagcgtgatcctttcatcaaaatctttgatcagctgggtaatttcctgcatatgactgcttccataggtactgcagataaatgttccattttgttttagaactcttttgatttcgttaaatacttgttgtcggtcatccagataaaataatacatggtttgcgatcactttatcgaaactgtgatcttcttttggaatctgtctacagtcgatcatctgataagaaatctgtcctttttcctctccgacatagttcctggcatcttttaccataccttgtgactggtcggataaagtaacatggacattttttggaagatttttattcttccacaattcccctgttccacatcctagttctaatacttcgtctttttcttttaagtttaactgctcataaatccattcaaaccatggttgcggattttgtgaatatttttgatgaagtccgatacggatatcaagatttgatgcattcttatattgttctaccaatcctttttccagattggttacgtgaagaagattcatcatctgtgtccagtcgatttcttcttcattatccatcttttgttccatctcttctaaggattgctctaccagttttaagtgttccatctttttttgtacaaggtataactgtaagccaatagattctttaatgaaatcctgatcctcatcgttgatcgtcatcgtcatgatctcttccaaagaaaatccgaggtattttaatgacaagattttttgtaatttggcaaaatcggcatctgtataaagacgatatccattgtctgcaactttacttggctttaagatgccttgacggtcatagtagcggatcgttcttagtgttacattggctttttttgcaaattcaccggatgtatagtatccatcttttgtcatttagattcctccttggttttctctctatacgttatcataaagggtgacgtaagggaagtgtcaagaggaattttaatttgctggtgtaatagctgtagtctttctgtatcttaggaaaacgaaataaaagaatagaagatccagaccagaaattttgctcgccattttgaccggtcgctgatttgcaaattttccttgcataactcactcgctacgcgagttcaaacaatgcaccaaatttgctgcgaaccggtcaaaataacggcaaaatttcaatggttctggatcttctattcttttatttcgttttcctaagatacctaaagtttacatgtattaaatccaataaatcaaaattcacagtatgtatgttttgctatattgctttacattttcaggataatcgaaaactgaaattctctcattttaatcttgtaagaattaagataaaagattttccaaatatctcgctaaatcggtgtctaataatttttttagctatcaaaatcagattcgtagaaagtactttctgtttaatttatacaccgtgactttttattcaatagcttatatactctaattaatcaatttattgttatttttaattttatgggggtttttgtttatgcttgataagtctcttatttataaagatattgtaatgtgtctgccttttgaggatttagaggatcttaaggttcctgttttgcctgatggatattcttataagatgtttgaatctggggatgagattgcttgggcgaagcttgaagtgttggttggagagtttgattgttttgaggatgcttctgcttattttgctaaaacttttttaactcatgaagaacttttagctgaccgggtttgttttattgtgaatcctgagggagagattgttgctacgacgagtgcttggtttaagacaaatggcgatattcggtttcctttgattcattgggtgtctacttctcctaaagaacaggggaaggggcttgggaaggcaattgttttgtttgctttgtctcgttttcttgttgtagaaccggatgctgattttatttttcttcatacacatacttgggcttataaggctgttggtatgtatcagaaaatgggatttcgaattacaaaaaaagccctgccgactagcagaactgatttttcttgtatggatgttttgaaggatgtacttcctaattcgattattgctcagcttttagagaaagattaagatgctgtccagtcacattgatcttatatatactaacacacacttatatttttaatcatcttaattgacataaaaatatataaatgttactataataatagaaaaggtgctaccgatgacggtttgcctgatataaacgattgaataaccgctcacataacttgtcaggtcaatgggcggttatttctctatcttggcatcatgctttccacacacataaccaagactataaaaagccacacacagtgaaatcactgcaattagttctgtaatggttagcataacttcaagcccccttttcgtaagatttctcaataatagagattgatctatgtaatcggggctagaactccccgtaggaagcaaaccgccattcacgtcaatgtgaagtaacaccttgacgtttattttaacagaaaacatatattaattcaataaaaaacaaagtataaacatataaaagtacaaaaaattttacatacatttaacacaacacatctcctaaataagttaaaataaaactgttgtaaaaaataagtgaaagaaaagtaaagaaaagaacaactaaaggagaaaaaaagtgagcagtacaaacattttaggtctgttgggaggattagcattattcctctatggtatgcagatgatgagtaacggattagaatctgttgccggaaataaaatgaaagacattttggaaaaattgacatccaatagattcttaggaattatcgtaggagctttgatcacagccgtgatccagtcatcctcagctacaacggtaatggttgtaggatttgtaaactctggaatgatgacattaaatcaagcagtatggatcatcatgggagcaaatatcggtacaacgatcacgggacagttaattgcattagacgttggagcattagcaccattgatcgcatttattggtgtagcacttgttgtattttcaaagaatgagaaagtacagtttgtcggagagatcgttgcgggacttggtatcttatttgtcggaatgaacatgatgggagattccatggtaccacttcgtgagtatccgccatttatcaacctgatgacaagattttctaatccattgatcggaatcatcgcaggtatgatctttacagccgtgatccagtcatcttcagcttctgtaggtatcttacaggcactggcgttaagtggggttatcagtttccatgacgcagcctttgtattatttggacagaatatcggtacatgtatcacagcaatcttagcatcgattggaacagagagaagcgcgaagagagcaacgatcattcatttaagtttcaatatcattggaacagttatttttacaattttatgtttagtgacacctttggcgaattatgtggcaggattcagtggaagcagtattacaaaacagattgccaatatgcatacattatttaatatcagtacaaccatcctgctgatcccatttggaaattatctggcaaaacttgcaaccaagatccttccagagaaagcagaagagaaagaacatcacaaacatttaaaatacatcaaatcagttgatacaagagtggatgcaacatttggtacatcagcgatcaacttacagaacttaagaaatgaaattcagagaatgcttgagatggcaagagtcaatgtagaagaaagttttgatgcatttttggcaggaagcagcagattcttaggtgatgttgataaaagagaagattatattgattatctgaacaaagaaatttcaagagccgcagcaaagatgatggcgcatgaaacgaatgttaaagcttcaaaaaatatcggttcatatcttgatatgacaagtaatatcgaacgaattggagatcatgcagttaatatttgtgattatacaaagttgatcgaagaaaaacatattgtattttcagatgacgcaaaacagcagatggaagaaatgaaaatgatctgtgaaaaaatgttccataacatttctaaggtaccagaggatacgcaggaatggcttcagaaagttcatgattctgagaactttatcgatcagaagacagaagaattctacgaaagtcacttggaacgtatcaacagaggagaatgtaatgatgaagcatgcatcattttctctgaaatgttaacagactttgagcgtatcggtgatcatacatggaatgttgcgaaacagatggcaaagatcattgaacgtgggtaaaacaattacataaaattcaaaaagaaccttctgaaagaactaaaataagaaggttctttttttgatagtaactagacttgttataaacaatacgttatactaaaaagagtgctaaaaacaggtgtgtaaaggagaaatgagttatggattatattttatccccatcaattttgtcagcagattttgcgaatcttggagcagatgtaaaagaagcagtaaaagcaggtgcaaaatgggtgcatattgatgttatggatggaatgttcgtacctaatatttccttgggacttccagtgattaaatcacttcgtaaagaaacagaagctttatttgatgtacatttaatgattgaagaaccaggaagatatattgatgattttgcagaagcaggagctgatctgatcactcttcacgcagaagcaacaaaacatcttcatagagcaatccagcaggtaaaagcgaaaggattaaaagttggagtagccttgaatccagcaacgccattatctgcattagattatgtattagaagaattagatatggtactgatcatgactgtaaacccaggttatggcggacagtcttatattgcgaagatggatgacaagatcaaagaattacgagcgatcatcaatgaaaaaggactggatatcgatattgaagtagatggaggaatctcagcaaagaacgtagcacatgtcaaagaatgtggagcaaacgtatttgtagcaggatccgctgtatttaacggtgatattgcatctagtgcaaaagatattttagaagctatggaggcgtaaaaatgagtgaatgtagtcatgactgcagcagttgtagtgcaaactgcggaagcagaacacaggagaaaacagattttcttgaaccattatatagagaaagtaaagtaaagaaggttatcggtatcgtcagtggaaaaggtggcgtaggtaaatccatgacaacttctttattaggagtcgcagcaatgagaaaagggttgcatacagcaattcttgatgcggatgtcacaggaccgtccatcccgcaggcatttggacttcatgagagattattaggaaatgcagaaggaatcattcttccagcaatgacaaatttcggaatcgaagttgtatccttaaacttaatgttagaagaagaaacacagccagtgatctggagaggtccagttgtagcagacgttgtaaaacagttctggggtaagacattatggaaagacattgatgtgatgtttgtggacatgccaccaggaaccggagaagttccattaacagttttccagtctattccattagatggaatcgttgtcgttgcaactccacaggaattagtaggaatgatcgtggagaaagctgtgaatatggcgaacatgatgaatgtaccagttctgggtctgatcgagaacatgagctacatcaaatgtccagattgcggcaaagagattaaggtatttggagacagtcatattgaagaaatttctgagaagtttaacattccagtactcggaaaacttccaattgatccaaaattaacacaggcatgtgacgcagggctgatcgaggatgtggaaaatatttacttagatggtgtcatggatatcattttataagaagaaacaacgtaaagaagcggttttccgcttctttttttgatggaaaaaatgcaatgaaaaatataaatattgtatacaaatttataaaaaacaaatcgtataagttaataaatttgtaataacaaacttacatatattggaaataaattgtattttatcgagtacaaaggttgacatattgatggatatcgggtaaagtatgaaacatagatttcgaaaatgttacaaaattgtttcgaagtttaagaaactattgagcacagaaagaggtttatatgctgaaagttatgaagaagaaattgttagtagtgattgcgatgttagttgta

SEQ ID NO: 693 - DNA, 4071 bp, Unknown
  gut microbiota DNA sequence
gaatgccacgatataaaatacaaaagaacaagaaagttgatgttacagaaggaaatgaagaagcataccctgtataaaatgtaatttactttaattcctaggtactccattgctataacttaaaactatggcaaaccgttaaatatatatattttaaaagatgatgttgaaatgatatactatatacaacttaaaaaacaaggcaaaaaggagacgacagaaaatgagtaaattacaagagccatttcgatatgattatgtaggaagctttttaagaacagaagaattaaagaaagcaacaacacaatataacgaaaacaaaatcacaaaagaagtatacgataacatcgtaaatgaagagatcgcaaaattagtagcaaaacaaaaagaattaggatatcatgtgatcacggacggagaattcagaagaacttactggcatttagattttatgtggggatttgaaggggtagcacatgaacagacaggaagtggagtacagttcgatggagaattagcttctttagaagacacttatctgataggaaaggtcaaagcgaaaaagcatccatttgtagagtatttcagatatttaaaacagtttgaagatgaaaatacaattgcaaaatatacaattcctgcaccagcacagatgtttcagcaaatgatcgttccaacaaacattgaaacgacaagaaaatattatgcgacaaatgaagaattgattcaggatattggtgttgcatatcaggatgtgatcaaacagttctataaggcaggatgccgtaatcttcagttagatgactgtacttggggagcgatcgtgggagatgctgcgaaacaaagatataaagcattaggaattgatcttgaagatgtgaagaaacagctgcttactgtgaacaaccttgcattagaaggaagaccagaagatatggtaattacatcccatatctgtcgtggaaattatcattctacattcttcacaagtggtccatatgatacagttgcagactatgtatttgcaaaagaaaatgttgatgcacttttccttgaatatgatgatgaaagatctggaggatttgcaccacttaagaaagtatcagaagacaagaaagttgtccttggtctgatcacgacaaagaaaccagatcttgaagacaaagaaaaagtgatcaacagaatcagacaggcagcaaaatacattcctttggaaagactatgcctaagcccacagtgtggatttgcttcttgtgcaatcggtaataaattaacagaagaagaacagtgggcaaaactaaaattagtgaaagaaattgctgaggaagtctggggagaataagattagatcttaatactccacagaaaccagaaataacccttgaggcggtgcagtaatccctgcatcgcttctttttgtactttccagtgcttttgtaatatcctctggttttattttcccacatccaacttctactaaagttccagtaagaatccggaccatgttatgaaggaagccatttcctgtataagagatctggatttctttttttgtctttttgatctcgatgttatagatactacggacggtagatttttttgttttcttaattgaagaaaatcctttaaaatcatgcgttccgatcagtaatgatgcagcttcttccatctttttgatatccaaagtttccgggaaataccaaaggtatttacgttcaaaaacattcgatacaccaggaattgcaattctgtaaagataagttttctctttcgcatttaaacgactgtgaaaacgttcggaagtttcagaaacttccacaataccgatatcagatggaagatatttggtaagatagtctttgatctcattaacagacatcatacagtctgtatggaaattggcaacctgaccataagcatgaacaccagcatcggtacggccagatccattgatattgacatcttctccagtcatctttgataaaacagactctaattttccttgaatcgtattcgcattggaatcaccaccaagcctctgccagccctgatagcgggaaccatcatattcaattgttaatctgatattacgtttcatgtatgtataaatcctttcgttgtaaagatatggttgttgtaaaacaaatttattatagcgaatttcttaaaaagtggcaataaataaaaaagagaggcggtagtttactatatatggtaaaattaagataaaacgcggtgaaagtagagaaagaaaggataggttatcatggaaatcaatcaaatgttaaaaagacaagaacatttttttcaaagtcagaagacaaagaaatacgaatttcgaaagaaagcattattgcgcttggaatgtgcgatcaaacaacatgaagaagatatggaacatgcattatataaagatttagggaaatcatcttttgagtcctatatggcagagattggcatggtaaaaagtgaactttcttatgcaaagaagcatctaaaaaaatggatgaaaacagatcaggtaaaaacaccgcttgcccagtttccatcccaaagttataagatcaaagaaccactcggaaaggtgttgatcatatccccatggaattatccaattcttttatccttacagccgctgatcggagcgatcgcagcaggaaattgttgtgttttaaaaccatctgaacacgcaccacattgtgccagtcttttaaagaagatgattggagaagttttccattctcattacgttgctgtgatcaatggaggagtagaaatcagtgaaaaacttctggaacagtcatttgatcatattttctatactggtggagaacgagttggaaagatcgtgatggaaaaagcatcgagacatttaacaccagtgactttggaattaggtggaaaaagtccatgcattgtagaagaaagtgccaatattaagttggcagcaaaacgaattgtttttggaaaatttttaaacagtgggcagacctgtgttgcgccagattacattttcgtagataaaaaagcagaaagtgaactgatcttctacttaaaatactggatcaataaaatgatcggggaacatcctttgtcgaataaagattattcatctatgataaatccgagacattatcagcgcattatggaattgatgaaacatgaaaagatcgttgaaggcggttatggagatataagacttcgaaagatcgccccaacgatacttgtgaatgtaaaagaagaatccacggtgatgcaggaagagatttttggtccattacttcctataatgacatatgacaaattagaagatgcagtttcgtatatcagagatcataacaagcctttggcattgtatttatttacagaaaatgataaagtagaacaagatgtactttcacagttgtcttttggcggtggctgtatcaatgatacgatcatccaccttgcaactccatatctaggatttggaggagttgggaatagcggaatggggtcttatcatgggaagaaaagttttgatacatttacgcatgaaaagagtatcataaagaaatcagataagattgatattccagttcgttatatgccatataacaaagctaaagaacaattgatgaaattttttctaaaattataagataaaggagcaacttttatggaatttacaaatgtattaccaggagtgaaattggtaaaacaagatgaagctgggaatgaggaagaactttttgtttcacaaaatgatcatgtgatcgtaaagacattaaatggaagagagatcaaaggtatttttatgcagattgaatttgcaagatgcttagaagaagatgatattgtacatgtgcataaagacaacggggaaaatgagggaatcccatttgacacgatcgatgatatcattaagggttaagaaagaaatagaggatgaatttatatgggaaatccaaatgatactatataatcttctagtatataaaacaaataaaaaagagatggaatacgaaaacgattgaatttcatgacggattttttgcaaaacgctgatccgccatgaaattcaatcgtttt

SEQ ID NO: 694 - DNA, 667 bp, Unknown
  gut microbiota DNA sequence
atggtaaaattatatagtaaatataagtgaatttttgcatcgatctttcatattttcgattcattctatatgtaaggagctataatgtatacaaataatgcatatctaaacaattcaaccattgaccgaaaagacaaatccaaacctcttgtcataactatgtgtggaacttataaattatatacacgtcccaaactccccacatggcgacctcgtggtagactagattttcaattactctatattgctgctggaaaagcacattttcattttgataacaatgatgaagcaactattgttcatgctggtcatatggttctatatcgtccaaaagaaccacaaaaatacgaatattacgcaaaagatcaaactgaagtttactgggttcactttactggaaacaatgtcacgaacctgcttcgttcttatggacttactaataaaaaagtttttcactgtggatccggtgcagaatatcaaaatctgttttgttctatgataaaagaattgcaaatgtgccaagatggttatgaagaaatgcttgaaatatatttacgacagatttttatcagacttcagcgacattttaaatcatctctcaattctgataattcacatgctttcgaagaaatagataacgcaatctcttacttttgtgaacattata

SEQ ID NO: 695 - DNA, 8317 bp, Unknown
  gut microbiota DNA sequence
ttttaaacagaaggtaatggtattatgcttcataaacatttcgataaatcggtgttgtttaagcccttttatcttcagttagcgaatgcaaaacttatcaaccagtatcgtttaacatacacaccctgtagtgatttgaatagcgttccgttgtatgagatagaaataagataagaacaaatatttataatatatcggtggcaacgattagcagattttaagtgcgttttttacaaattcgcagcgccctgtggttgattgtttgaccgtagctgcgggcattttggctcgcagcgaggaagttatcaaaggaacaggcgcggatcagcgatttgtaaaaaacgctcttaaaatctgcgtgttgccaccgatatattataaatatttgttcttatcttatttctatctcatacatgaaacactattacaaatcacaatttcatgcttaactgtatccgttttttatctatatccacactgacaactacaacatccacaacatctccaacactaactacttctaatggatgtttgataaatcgatctgccatctgtgaaatgtgtactagtccatcctgatgtactccaatatctacaaatgctccaaaatcgatgacattacgaactgttccttttaatttcattcctggtttcagatctttcatttctaatacatctgttcttaagattggttttggaagatcttctcgtggatctcgtcctggcttttccagttcttttacgatatctttcaacgtgatctctccgattccaagttcttcggataatttcttgtaatctgtaatcttactgctgattcctttgaatccttctttggatagttcttttgttgaatatcctaggttctttagtaacattcctgtttctttgtatgtctctggatgtactcctgttgcatcgagtggctcatcacctccagatactcttaggaatcctgcgcattgttcaaaggctttgggtcctagtttagctacttttaatagctgttttctgttcctgaacgttccattttcttcacggtaggctacgatattttttgctacagtcttggacacaccggatacatattctaaaagagatgctgaagctgtatttaggtcaactccgactttatttactgttgcttcaacgactccacctaaagcttcggtaagctgtttttggttcatatcgtgctgatactgtccgactccaatggcttttggttcaatctttactaattctgccagtggatcttgtactcgtcttgcgatggatgtcgcacttctttgtcctacatcgaaatttggaaattcctcggtcgcaagtttacttgctgagtatacagacgcccctgcttcatttgtaatcacatactgtactggttctttgatctcttttaacatatcaacaacgatctgttcagattctctggatgctgttccatttccaattgagatcagtgtgattccatatttcttgatgagtgccttgacaacttttttggcctcttccactttattctgtggtgctgtcggataaatgacgactgtatctaatacttttcctgttgcatcaaccactgctaatttgcatccagtacgaaatgcagggtcccatccaaggacgacctgtcctgcgatcggtggctgcataagaagttgtgctaagttctttccaaagactttgatcgcttctgtacttgcattttcagtcagttcatttctgatatcacgttcgatcgatggtgcgatcaaacgtttatagctgtcttcaatcgctgcaaataaggcttttgttgtattgggattcttccttgttatgatcttccttgcaagatatgatgcgatcttttgcatgtctggctcaatctttacctgaagaattccctctttttctccgcgattgatcgcaagaatacggtatcctgcaatcttttcaatcggttcttcaaaatcataatacatctcaaatacagaagattcttctggtttcttcgctgaggatgtgatttttccgtgattccatgttgccttacggatccatgtacggtattccgcatcatctgcaatgcgctctgcgataatatcatttgcaccttttaatgcatcttctactgtctttacatctttttcttcattgataaacgcttcggcttctttctctaatggctcttttgtcatttgtaaaagaatcagattagctaacggctctaaccccttttcctttgcgatcatagctctggtacgttttttctgcttatatggacggtacaaatcttccactgctaccagtgtcttcgcttcttcaatctgctttgccagttcctttgtaagtttaccttgttcttcgatatttttcttgatcgcttctttgcgctcttctaaatttcttaaatataataatctctcatggaaattacgaagtgtctcgtcatctaatgatcctgtcatttcttttcggtatctggcaatgaatggaatcgtgttaccttcatcgatcagtttgatcgttgtctctacctgtcctcgtctgattcctagttcttcttgtaaaatcttaataatatccatatcttcaccttataaatctacttcgatcgtctgtccttttggtacgaactggcgatatttaactcctgccatatcaaacatcttctttgatgcctttgtcgtatcactgcctgcatatttatcctgcatatagataacttctttcataccgctttgaatgatagcttttgcacattcattgcacggaaataatgttacataaacacgcgctccgtcaagtgagcctccaccatagttcaaaatggcatttaattctgcgtgacatacataaaaatatttggtatgaagaggatctccttctctctcccaaggcatatcatcatcgttgcatcctattggcattccgttataaccaactgacaaaatcttattatgatcatttacaaggcaagcccctacctgtgtatgatcatctttacttctctgggcagatagaatggcaatccccataaaatactgatcccaggagatataatctttacgtttcattgtacatattcctttctgaatctttgtagatatattttgtcatgtttctacgatatcgtcaacttttgatttgtggagtagtttgatgaactgaagttattggtggaatattataaaaatggttatatgtctgcgacgcgctctcgctcgactcactacgcagctgtactaagctcctgaatgatcttacgatcatccactcgctaagtgcaggcgtgttcctacggtcgccgacatataaccatttttataatattcaataatttcagttatcgaaaccactggtaggggtgtatgttttactgtattggtatttataataaacactgtctgtcactacaaaaatttaaaaacgataacactcaacatacacaccacttaagtttttcaatcttgtaattgtccacactttagacttcaggtatatgataaaaaataaataaacaatcggaagcgcagcattagaattttgccacgttttttgcggattcgcagccggcttggtgtgctgtctgagcctcatagagttctgatttaaacacccttgaaggcgagttgcacaaggaaagccggcggatcagcgatctgcaaaaaacgtgagcaaaattctctagctgctcttccaatcgtttatttattttttatcatatactgaaagactacagttggccaacacacaaattacaacttatcagaaatctgtgcatgtaatccctgtaatgaattcacttcttcattctgatcctgatgtgcttttacataagcgattccttcagctgctgctttggctgctgcgatcgttgtataatatggaatcttcgctttgatcgcaccttttcttaggtaactatcatcgttcacgctgtcttttccgactggagagtttacaataatatcgatattaccatttgtgataaggtcaaggatgtttggtcttccttcgcttaatttattgactttctcagcttcaattccagcttctttgatcagtttacatgtgttttctgttgcaaggatcttgaatccgtcgtctgcgaatgcttttgctacttctacaacttcttctttatccttgcgatttacagaaatcagtaccgttcctcctaatggaagtttcgctccaacaccttcctgtgctttgtagaaagcttctccataggatttggataatccaagaacttctcctgtagaacgcatttctggtcctagaactgggtctacttcttggaacatattgaatgggaaggctgcttctttgactccataatatggaattgcctgttcttttaattctggtactggtgatggttttcctgttaattcagatgtgatgatctgtgttgccagtggaaccattctcacgttacatactttggataccaaaggtactgtacgagatgcacgtgggtttgcttctaatacataaactttatcatcctcgatcgcatactgcatattcattagtcctttgacatgcatttcttctgcgatctttcttgtgtattctttgatcgtttccaggttttcttctgaaatatgaacagatggaagaatacaagcggagtctcctgaatgaactcctgcaagttcgatatgttccatcactgctggtacaaatgcgtgtgttccgtcactgatcgcatctgcttcacattccatcgcatgatttaagaaacggtcgatcaggattgggcggtctggtgttacaccaacggctgctttcatatatcctgccatgctttcgtcatcatagacaacttccattccacgtccaccaagaacgtaggaaggtcttaccatcactggatatccgatctttcctgcgatctctaatgcttcttctactgttgttgccattcctgattccggcattggaatctctaatttatccatcatttcacggaacagatcacggtcttctgcaaggtcaatgacagatggagatgttccaagaatcttcacaccatttttctcaagttcggcagcaatattcagtggtgtctgtccaccaaactgagcgatcactcctaatggtttttctttattataaatacttaatacatcttccactgttaatggttcgaaatataatttatcggatgtatcgtaatctgtagatactgtctctgggttgcagtttacgatgatcgtctcgaatcccattttcttcagtgcctgagatgcatgtacacagcagtagtcaaattcaataccctgtccgatacggtttgggcctccacctaagatcatgatcttttgtttatctgtggatactgggttcttgtcttctgcattatatgttgaataataatatgcactgtctggcgttccgcttacatgaaccccttcccatgcttcttcgacaccgattgaaatacgtttatttctgatatcttcttctggaatctctaataactgacttaaatatttgtcagagaaaccatctttcttcgctgatgttaacatttcatcagatggcatgtttcctttgcatgcaagaagcttttcttcttcttcaactaactctttcatctgctcgataaagtatgtttttacttttgtcagttcaaagatctcatcgacagttgcaccttttcttaatgcttcgtacatgatgaaatgacgttcgcttgatggtgacactaatttctttaacaattcttcttttgttaaagtatcaaagttgttcgcatgtccaagtccgtagcgtcctgtctctaagcttcggatcgctttctggaatgcttctttgtatgtcttaccgatactcataacttcaccaacagcacgcatctgtgttccaagtttgtcttcgacacctttgaatttctcaaatgcccaacgtgcaaacttgataacgacatagtcaccgtctggtacatatttatctaatgttccgtattttccacatggaatatcttttaatgttaaacctgctgcaagcattgcagaaactaaagcgatcgggaatcctgtcgctttggatgctaatgctgaggatcttgatgttcttggattgatctcgataacaataatacggtctgtcactggatcatgagcaaactgtacgtttgttccaccgatcacctgtacagaatctacaatcttgtatgcctgttcctgtaatctctgctgacattcttcagagatcgtgagcatcggtgcggaacagaaggagtctcctgtatgcactcctaatggatcgatattctcaatgaagcagactgtgatcatatttccttctgcatcacggacaacttctaattctaattcttcccatccaagaatggattcttctacaagtacctgtccaactaaacttgcctgaagtcctcttgccataacggtcttcaattcttctttgttatataccagtcctccaccggctccacccattgtgtaagctggacgaagtaccactggataaccaagcttatcagcgatcttcaacccatcttctacgctgtaagcaacctcgcttcgagccatctcgattccaagttcgtccattgtcttcttaaactcgatacggtcttctccacgttcaatactatctacctgtacaccaattactttgacattatacttatctaaaataccctttttatataactcttcgcataaatttaatccggactgcccacctaagtttggaagtaaagcatctggacgttcctttgcaatgatttcctctaaacgttctgcgttcagcggttcaatgtaagtttcgtcagctgtctctggatctgtcatgatcgttgctggattggagttgaccaatacgatctcatatccaagtttacgaagcgccttacacgcctgtgtccccgaatagtcgaattcgcatgcctgaccgatgatgatcggaccagagccaatgatcaacactttgttaatatctgttctttttggcataaaaataattcctcctttagactttattattattatataagaaaatcagtgaaatcggaatcattttgtgaagtttttttaactatgttaactttggattttcttaccaattcataagaatttcttaatgacaatttataaatcgtttatatttgtttatattctgtatattgaatctcgaaatggaaatgattatactataaccatacctcaaggaaagacctaaaagataagacaataaaagaatttcaggaaacatcctacaggtatagttttttcatatatatttttaatcctctcttttcaaaaaggaaaccatcacaccccagatggtttccttttatttttgtcagattttcccgccttgcttttcatttttgcctataatataatgatgtttgttacttttttatagattttcaataaagaaagagaggaacgtatgtttttacatacggaaaaaaactatgttggaaaacttatttaaattaaaggagaatcatacctccgtaaaaactgaagtcattgctggtattactacatttatgacaatggcttacatccttgcggtaaacccaagtgtgctttctgcagctggcatggaccctactgctgtattattagctacatgtatcgcttcctttatcggaactatatgcatgggacttactgcgaaccttccattcgtactttccgctggtatgggattaaatgcttatcttgcctataccgttgttggtgtgatgggttatcactggcaggttgctttacttgctgtattcgttgaaggtatcatcttcatcgtattatctttgaccaatgttcgtgaagcgatctttgatgcgatccctttgaatcttaagaagggagtttctgtcggaatcggtatctttattgcctttatcggtcttcagaacgcaaaacttgttattggaaataaatctacattggtatctatcacaaactttacaaaagatttccatactgctggaatctgttctttacttgcagttattggattattgatcacagtcattcttttttataaaaaagtacctggatctatcctgatcggaatccttgctacatgggtgatcggaatgctctgccagataacaggaatctatgttcctgatttcaaaacaggttattacagcctgttccctacatttgcaatgacagatttttcaaaattaggagagactttcggtaaatgtttccagtatgacttgggcaaagtcggaatctttaattttatcgccgttgtattatctttcttatttgtcgatctgtttgatacactcggaactttagtcggtgtcagcacaaaagccggaatg

SEQ ID NO: 696 - DNA, 15239 bp, Unknown
  gut microbiota DNA sequence
attgctttcaccatatcttcctggtttacaagcactgtaacacgaatctcagatgtagagatcattcgaatgtttacatctgctttatataaagcgttaaacatacgagctgccattccatagtggtttaataatccttttccgataattgatactttggcaacttctttgcttgctttgatctcttcataatagctgtctggaaggtaatcttctaatgctttaactgcgatatctaattcttcttctttgactgtgaaggagatatctttcttgtcattatgtccaactgactgcaagatcatatctacgtttacatttttctttgctaatacattgaagatcttgaatgccatacctggtgtatcttcgattcccataactgcgattcttgctgcatcatcatctcctgctacaccgctgatctcgttgtctcttgattttacgctttcttttacgacagttccttcttctgttgtaagacttgatctaacaactaaggcaactccatgtttcttagcaagttctacagaacgattatgaagtactcctgctccgagtgttgccatttctaacatctcatcatatgtgatctcatttaattttttagcctctgatacttttcttgggtctgctgtatagactccgtctacgtctgtatatatctcacatgcatctgcgtgtaacgctgctgccagtgctacagctgttgtatcagatccaccacgtccaagtgttgtgtagttatcgaactggtcaactccctggaatcctgtaacaattacgatctttctctgttctaattcattcatgatacggtctgtatcgattcttttgattcttgcattactgtatacagaagttgtatgcattgctacctggaatgcatttagggaaacagcaggaactccaagagaatccattgccattgccattaatgatacagaagtctgttctcctgttgttaataacatatccatctctcttctggatggattaggattgatctcttttgcttttgcgatcagttcatctgtcatcttacccattgctgataagacaacaacaacatcatttccttttttgtaatcttcaatacatctttttgcaacgttcatgatacgatctttatttcctacagaagtaccaccaaatttcttaactactagcatcttgtgcctcctaaaattatttctcttatttttgtaataaccgattcattaaatcataagcgtgggaaatgacaattcctgtctctctcgctgcttcttcgctgtactcttcctgaccttcataatctttcgtgctgtcgtagatcataaatggtatcggttctttggaatgggtacggatcgcaattggtgtcggatgatccggtccgatcagaattctaaaatcctctccagctttctcaagttcttctttgacaaccttcacaacttctttatcaagatgttcgattgctttgatcttattctcaagacttccctgatgacccatctcatcaggtgcctctacatgaatataagcgaaatcatcatttttttcaagtagtgcttcaactgctgccatcgctttcccatgataattcgtgtcaagaccgccattggcaccctctacatcaagatttctcatgtttgctccaactgcgattccttttaacagatcgacggcagataccatagctccattcattccagtcttctctttaaaatcgtccagtgccggtttcgtccctgctccccagaaccagatgctgtttgctttattcaagcctttctcagctcttgcttcattgatcggatgatgatttaagatatcaaaactcttttccatcatctcttttagcttctcttgctttggaagatactgcccgatcttctgtcctaaaacatcatgaggtggtacaagttcgactacttctccatgatcccagatcgttaaatggcggtagctgactcccggataaaatttatattcatcatcttctaattcttttctcacagcttcgatcagaatcgctgcttcctcagaagtgatctctcctgcgctgtggtcgatgatcgtcttatcttcataatcttcgtcttcagatacggttacaacgttacatctaagtgcaatatctgtatccttcatatcaacaccaatgcttaatgcctcaaggggtgatcttccggaataataaacctgtgggtcatatcctaacatagaaagattggctacatcacttcctgctggtaaattggatggtactgtataagcgattccctgttcggaaactttcgccatctcatccatcactggtttgtctgctaactgaagtggtgtcttcccacctgctgcttcgattggctcgtcagccattccatctcctaaaacaataacgtatttcattctgtcctccaaaaatgtgtcatgtatatttatacatctattccattgcaattatttttacataagatacatcttctatcttctcaacatcctgaatcatagccgagacatccgtctcgctgtcttcgatgtcaacactgactgttaagagtccctttccattaattggaatactctggtggatcgtcaggatatttgccttataaagtgcaaaaatattaaggatcgaggccataacgccaggctggtcatcgacttcaatcacgaatgtgatactacgtcctttcttaccagcataaaatgggaaaatatcatccttatacttataataagaacttcgactgattcccaccttctctgtagcttctaatacagaaactgctctctttgaatctaacagtttctggacctctaacacctttaacaacacttctggaactgctttctttttaattacataatagttggtttctttcatgtctggttccttttgttttcctgtggtgtacagttgtctttgcacaaaatactaccacagatatttttatgatgcaatagaaaatttggttttaaaataaatacatgatctgaccggaagttttctgtttaattttcttccttcttactgttgttatcccatgcaagataggcattcataaatccatccagatccccatctaatacagcgcttggatttccgctttcaaagtttgttctgtggtcttttaccattgtataaggctgcaggacataggatctgatctggtttccccatccattatccccaacatcacctcggatatctgataatttttccaaatgttgctgctgttttaacagatacagttttgtctttaacatcttcattgcctgatctttgttcttgtgctgtgaacgctcattctggcactgtacaacgattcctgttggtaaatgcgtaatacggattgcggaatctgttttgttgatatgctgtccaccagctccacttgcacgatatgtgtcaatccggatatcttcatctgcaatctcaacttctatatcatctttgatatctggcattacatcacaggatgcaaacgatgtctgtcgttttcctgctgcattgaatggagaaattcggacaagacggtgaacacctttttcagatcgtaaatatccataagcgttcattcccgtgatcttcacagtaacagatttgattcctgcttcatccccatcaagataatcaagaacttctgttccataacctttctttcctgcccatcttgtgaacatacggtatagcattcctgcccagtcgcaagactctgttccacctgcccctgcatgtagtgtaagaattgcatcatccttatcatattcacctgttagcagtgttgaaatacgtaattcctcatatgttttttcaaattcatccatcaaagcagtggcttcttcgatcagatcggcatcttcatcttcttctgccatatcgatcaaagtctcgatatcttcatattttgttttcagatcatcatattcttccacgacacctttcaggcttttgacttctttcataacattctgggattcctcaacattatcccagaatcctggttcttccatattcagttctaattgatcaattctctctttttttgcttctaacgcaagggaaccactaagatcttctagtggttcctgaaaagagtttaatttatattttaattgttctgcttcaatcattgataaaaaactccttatttattccttccgcagcagttcttatacttcttaccacttccacatgggcaaggatcatttctgccgacttttgctccttttcttacataaggcttcttctcaacttctgcatctttgtttgttccagtgatctttggagcttcttctctctcgatcttctgctcaacctgtacgtggaacagtgcacctgttgtctcttcctgaattgcctttgtcatatcattgaacatctcaaatccagccatacggtattcaacaactggatctctctgtccatatgcctgaagaccaattccttctcttaattgatccatatcatcaatatgatccatccacttgcggtcgatgactttcagtaagataatacgttcaatctcacgaagatcaaagtcttcgaattctttttctttctgttcatataatgcaactgtttcttcctgtaatcttgctaccagatcatcaactttaccagaagatttctctgcatctgttaatacgatcttattcagtggtacaattggaagcaactctgcattcagtgctgccagatcccactcttctggtggaagctcatcactgatcacctgatatacatgatttgcaactgtttctttcatcatgcctaaaacagattctttcatgtcatctccgtcaagaacacggcggcgttctttgtacataacttctctctgttcattgttgactctatcataatctaacagattcttacgaataccaaagttgttattctcaatcttcttctgtgctttctcgatcgtcttgctgatcgtcttatgctggatttcttctccttctggaattcccagtgcattgtatatactgatcattctttcagatccaaacaatctcatcagatcatcttccagtgataaatagaacttagattcacctggatctccctgacgtccagcacgaccacgtaactggttatcgatacgtctggattcatgacgttctgtaccgatgatctttaatccgccaagttctgcaacaccatcttccagcacgatgtcagtaccacgaccagccatgttcgtagcgatcgttacggcaccgatctcacctgcgtgagagatgatctctgcttctttctcgtggaatttcgcattcagtacgttgtgtttaattccacgtttcttaagcattgcacttaattcttcagacatctcgatggtgatcgtaccaactaaaacaggctgtccttttgcatgagattcaatgatatcttcgacaacagcattcatcttctcacgttttgtcttgtagatcgcatcatcatgatcgattctctgaactggtttgtttgttgggatcacaacaacgtccattccataaatctctctaaattcctgttcttctgtaagtgcagtacctgtcatacctgctttcttgtcatatttattgaagaagttctggaacgtgatcgttgcaagagttttggattctctcttgacctttacattttccttcgcttcgattgcctgatgcagaccatcagaataacgtcttcctggcatgatacgtcctgtaaattcatcgacgatcaatacttcatcatcttttactacatagtctttgtctttaaacattaagttatgtgcacgaagtgctaagatgatattgtgctggattgcaaggttctctggatctgcaagattctcaatatggaagaatttctcgactttcttcacgccatctgcagtcagcatgatctgtttatctttttcattgacaaggaaatctccatcttcttcgatatcctcgttcattaagatatccatcttggataattcaccatcagaacttcctcgttccatctggcgggctaagatatcacatgcacggtacaattctgtagacttaccactttcaccggaaataatcagtggtgttcttgcctcatcaatcagtacggaatcgacctcatcgacgatcgcatagtgaagatctctctgtacaagatcttctttctcaatgaccatgttatctcttaagtagtcaaatcctaattcattgtttgtaatataagtaatatcacagttatatgcttcacggcgttcatcattctccatatcatttgtaacaacgccaacagttaatccaagaaaattatgaacttttcccatccactcggcatctcgagttgccagataatcattgactgttacgatatgaacgcccttttcttccagcgcatttaaatatgcaggtaacgtggatactaaagttttaccttcaccagttctcatctctgcgatacgtccctgatgcaggatgataccaccgatcagctgtacacggtaatgttttaaaccgatcgcacggctgctggcttctcttactgttgcatatgcttctggtaacagatcatctaatgtctctccatttgcaagtctttctttaaattcaacggtcttatgtcttagttcctcatctgacaatttctgcatggactcatcgagtgcttcgatcttgtcaaccgtcttgctgattcgttttagttccttatcactgtgagaaccaaatactttatcaaataaacccataaataatctcctaagtttctttttatgattgttccatcttgtgatcgttctgtctctgacatctgatatcaagatagtcttatatctattatatagtctttgctattgtaacacttaacattataaggtgcaagttaactaattgtaaaaattctcaataaattttgaattttttataaaaaaaagtatgaaaaaaggagatccttgtcataaggatctcctccatcttccgatcttctaaaattcaggttcgatcagtccgtatgtatttccttttctcttgtatacaacattgacttcaaatgtatcagcattgcggaatacaaagaaatcatgtcctaataattccatctgtacacaagcttcttctacatccattggtttaatagcaaacttcttgcttcggatgattctgatctcatcatcttccacatcgtcttcctgctccataaattcctgtttgaagcttgttccatcatatttctgattcataagtcttgttttatatctgcggatctggcgttcgatcacatctactaccaggtcaatagatacatacatgtcttcactgccttcttcagcacggataatgtgccctttcataggaatggtaacttctatcttctgtcttcccttctgaacacttaaagttacattcacgatcgtatcgtctactaaatatttgtcgagacgtccgagtttctcttcaattgctgctttgataccttctgtaacttcaatgttctttccactaataatgaatttcatggctcccatctcctttaccttttttgtatgaattcattataacatataattctgattaagaaaacaaaatctttttataaatagtaaacaaaacatatgtttctttttgaagttatccacagttattatttgtcgaattgtggatgtggataatgtggataactctgtgggtaactcatttttggctaaaatatgccatttctgtatgttgataactttgtgggtattttgttagcaatatgtgtgtaatttttccataaaaaaatcaacctgctttttgttatacaactagcacaaatcgacaaaaagcggttgatttttaatttatgagtcactatataaaaatagcttaaattgtctgaaaattaggcattttgaagatatcgctcgactgaatacacacagttggcaccatctgacaccgccgtcaccacctgacgaagatttttgcttcttccatcccctgcagcaaagattcccggaatatttgtaacaccgtcttctcctgcgataatatatcctttttcgtctgttgataactttccagataaaagctcggaagctggttttgtccccacagcgataaaaattccatcaacatctagtaacttatccacatggttatctacatcttgtatatgaagtccctccacaacctcatctccatcgatttttgtcacgatcgtgttccataagatttcaatcttgtcgttcttctttacttcatcctgaagaatctttgcaccacgaaattcatctcttcgatggatcagataaacttttttacacatacggcttaagaatattgcatcttccaatgcaacatttccaccaccaacaactgctgttaccttatttctaaaaaatgctccatcacatgttgcacaataagatactcccattccctttaatttttcttctccttctattcccaaagtctgatgaactgctcctgttgcaagaatgatcgtccttgtttttaatgtatctccattcttaagcatgatctctttgatttcttcgtctgcatagatttctttaacttctgctgtaatacttttagcaccaagttctttcgcatgctctgaaaattttaatccaagatccattccatttgtctttggaattccaggataattatcaacttcataagtctgtacaacctgtcctcctggcatatattctttctcgatcataacaaaatcaagcattgctctctgtgcatagattgctgcagacattccagctggtccggaacctatgattactaaatcgtatattttcatgatattatctccttttactcaaaatttctgccttattctttcttcgttagttttaataaaactccactgtatcttggaagtgtgatcgtaagctcactgtcttttccttttttcttcagatgaatattttctttacgtttcttcatcgttccaccatactgttcccattcagtatgtaacaatgttcttctcgtatggtgtcctttgatcgttaatttataatctttctgctctttgtcagagaaattaaagattccaacgatcatgtgatctgccgtttttcttccgatcgcataaatacatcgttcttcctgatggcagtccagccattcaaagttttctctatgataatcataatggaaagctttttctttcttgtaaatgtcatttaatttgaccatatatttatggaaggcatcatgaatcggatattttaagatcatccaatcttgttcctgtgcctcgctccattccctgatctgtccaaattcatttcccataaagtttaatttctttcctggatggatcatcatatacatatacatagcccttgcctgtggaaatttatcttcataatccccatacatcttctgtaagatcgttgccttgccatgtacaacttcatcatgacaatattctagcatataacgttcattccagaaatacaccatagagaatgttagtttgtgataatcacgacttcgatattctggtccagtctgaaaatattccagagtatcgtgcatccatcctaaatcccatttgtaatcaaatcctaacccgcctttccatacaggttctgtcacacctggataagcagtggaatcttctgcgatcagcatggcggttggatgacgttgtttcaaacctaaattgaatgcttttaagaagtcgatcgctgtatcgttgactcctctgctttcatctccctgccagtagatcaggcggctcactgcatccatacggattccatcaaaatgatactcttccagccaatagttggccgctgattgcaagaagcactgaacttctcttctggaatgaataaagttgcaacttccccattcactctctccagtatctttattatcgtattcatataatggagttccatcatataatttcagtccatatccatctactgcaaaatgaactggcacaaaatccataatgactccaatccctgcctgatgcatcatatcaacaaatttcattaatttatctggagttccataacgtttcgttggtgcaaaaaatccagtgttttggtatccccatgatccatcaaatggatgttctgacagtggcattaattctacatgggtataattattttgttttagatatggaacgagcatcttggcaatctcatcatactgataccagccattctcatctttcttattcattctccatgaacccatatgcatctcatagatattgatggcatcttccattccgacacttctcatctgcatccatgatctgtcattgaatctgtatgttgtgatatctctgataatagaacatgcccccggtcttagttccatctcaaatccatagggatcacaatgttcctgccggtttccatctggtccgtagatgcagtatttgtacatctgaccctctttagctttgtcagagtagaataaaaagaaaccactttgtgcgtcttgttccataaattcttcattccagtcattaaactccccaatgatcgatatcctggaggctcttggtgcataggttacaaaacgaatcttatcaccgtctttatgtgcacccatataacgatatgcatcaaataattttccatcataaaaatcttgccggttcatgtttgtgcctccttttatcatacaactgttgtttttcattcatatgtatattataataaatgtatgtgtatacaacaaccaccaaaatagtgtttttggtgattatcgaacatttttcattgttttgtagattatcttttttatatgattttaaaggagtttttgatatggtagagaagaaaactgatcgtcgtattttgaaaacaaaacgtgcgctcagagagagcctgctttatttattaaaagaacagccaatacaaaaaatatccgtttcccgcctatgtgagaaatcggatattaaccgcagtacattttatacgtattattccagtccgatggatcttctggagtcgattgaagatgaaattttaaatacactagaagaagatatgatccagtttgagaaggaaaattcaatttcacagttgatgaattctattatcttttatatcagtgagcataagcagttggtaagattgttgttctccgaccatggtgatccaggatttcagaataaacttctgcttgccacccaacactggaccatgccaatgtggcagagccgccggcctgattacgatgcggaggctttgtcttctttgcatatttatattgtgagcggatgcatggctgtgattcagcagtggatcacgggtggttttaaggagtctgaggaggaaatttcatcaatgttggagaagttgtccgcttctacttcggctggatttttgcaagggaaataaataaaatggattttcataatacatgctgctattataatcatcgattttttcacttaaaaatgaattataaactttgatcaatgcatcaattactgatcaattacaaattcatctaatacttcctgcagtctttcaaagaacatactagcatgatatccatctgcggatgcatgagatatcgtcaaagcagcagacagccttcttctgccctcttcttccacatattttccaaatgtaatgatcggaaatagatttggtcttccggttggcacccatgtgctgtagcctgtgaaatccatccatggcacacaggagatacaaaagaagtttggcggctgcccttcttttcctttgggtcctttgacatctttgtatgtttccatatcatttataatgttttgatagcatgtctgaaaatcatcatcataataagaccagatgtctgaaaatgtatgatcatctttgtgaaagatcgtaaagtttggatgcatcacatcaaagtaaccaggtcttccttcctgatcgactcccattttaaattctcttttctcattgacaacttttcctgtgcagtaaataaatgccggataaaactttaatccacattttttgacctgctgatacagattttccacatctagacgtactgtaacagtataaccgcatggtatcatctgcatataatattcaaaatgtttctgtcgttcccatttttctgggtctagtaaataaaacatgtcagacacctccttttttagctttcgatatcaaatcatttcatatccacctaaaactaccggcattttcaatacttccaatactctctcaagcaatactccttctctgtttggataatcaaatccataacttgccttgatcgcctgtgtaataaactgcacacccttatccagtgcgattggcagactgtctccgtctaacaggcttcctatcataacagaagtataagcatctcctgttcccggataaaatgttgggatataacggcattttatcttccaatatgtattacaagttctatcgtaagcgatcacattagaatctttatctttctctttatctggaacacttgtcacaacaatgatatctggtcccatatcagacaaacgttttacccattctttgatctcttcatcggttgttgtctgtttgtattcttcccctaataaaagacttacttctgtaaaattgggtgtaataatgtcagcttttgttaccagacgtttcattccttcaactaatccttgatccatcgttgaatacaagtttccattatctccaaggactggatcgatcacaaccatattatcctctgttccaaaatcatcaataaatccggaaacgatctcaatctgacgttcagatcctaagaatccagaataaatacagtcaaaatcgatatttagctctttccaatgatcgatatagtcctgcatatgatctgtaaagtctacaaaactaaaggtatcaaatcccccagtatgattggaaaggatcgctgtcggcaatggacagacctgcactcccatggatgaaaggatgggaatgatcgctgtcaacgaagctcttccaaaaccagacagatcatgaattgctgccactctttttacactatgcttcattttgtttctcctttttataatccgatcattgtactattttaaacggaacgtcaggattcctttgtaatcgatcacatggatcgcttcatcttttttcatctgttccatcatcgcttctggatctttcacatctctgctttctaagaatcctcgtacttcaaactgattcataggatgtcttccgataatggatttaaccgcttcatagtcatcttcaatctcactgaaaaatgcaccagaactcatcatctcaatcgaaataccaccaagtgtctcaaccgcatatcgcatgcgttcttcagatacgacattcacatctgcttctgctggcggacgaactggtgtatttaagtatagtctgtcatattttaattcttttaataattcttgaaacttaagaatagactgctcatcatcgttgatcccatcaactagcatgatctccaaccaaagttctccttcatacatgtgagtgaactttttgagaccttcaaattcttcttcaaatttgatcgttccataaggtcggtcgatcttcttggaaatttcctgattataagcatccaaagatggcaataccatatcagcatggcataattcttctctgacttgtggatcagaaagcaacgcaccatttgtgatcactgcgactggcttgtctgttaatgctttcagagcaactactaattcaccaagatttgctgctaaagtaggttctccttctccaacgaccgttacgatatcaaatttatcagagtctttgagatactgtttaaattccgctatgatatcttctgttttataaaattcctgacgtttatttgtcattttatcggttcttcctaattgacagtagatgcaggaatagttacatgtcttcttaggcagtggactgatacctaaggatcttcctagtcttctggatgggatcggaccaaatacatatttaaaatcattcatattgatatttccttttcctattatttttgtataattcttattatacggcacgtatacaaaatttgtctatatgaattgttctttgaaaactcctgaaatttaatttctatgggttttctttctataactcttgcgttacaatagtataaaataaacaggaggatattaagtaattcaatgaaaaaagataaaaacattctggttgttatgccagtaaaagacgaacataaaaaaacattagaacaacattctcaaggcaataaatttatatacagttcatacgataatgtaactcaggaaatggtacaggaagcaaatgtgatcattggaaatgtagatccattttacttacaggaagcaaaaaacttagaatggctgcagcttaattcagcaggggctgatccttatgtgaagaaaggcgtgcttcctgaagatgtaatattgacgaatgctacaggagcctatggaccaagcgttgcagaacatatgctggcagtcttattttccctgcaaaagaaattacatctatacagagataaccaaaatcaatgtgaatggcaagatgaaggaggtgtcatgtccttatgcggaggaacacttctgatcgtgggactcggtgacatcggattatactttgcaagattaatgaaaaattttgactaccatatcatcggaatcaaacgaagaccagggcaggtaccgcaagatatcgatgaactccataccatggatgatctggataaattgctgcccaaagcagatgttgtattatctgtacttccagattctaaagcaacacgaaatatcttcaataaagatcgttttgaaaaaatgaagaacacctcaatcttgctaaatgctggcagaggcagtgcagttaatacagaggatctttgcgaagcattgatccaaggacagatttatggagcaggactggatgttacagacccagaaccgctgcagacgcaacataaattatggaacgtagaaaatgtgatcataactccacacgtagccggagattttcatcatcctgcgactttatatcgaatcgtagatattatagctggaaacctgcaaaggtatctggaaggagaacaattgacgaatattgttgatactacaactggatgtaaactctgattgatagtgttgcatgtatgagtcagaaagaacaagagaagaaatatttataagaataaagggtgacactcaacatacacaccacttaagttttccaatcttgtaattgtccacactttagacttctggtatatgataaaaaataaataag

SEQ ID NO: 697 - DNA, 4676 bp, Unknown
  gut microbiota DNA sequence
cctgagcttcaaagacttttgtctgaaacaaaacttcagagcgagttctcgtaggaaattgggcggataagcgatttgttcaaaatgtgagcaaaattccaccgctgcgttttcggttgcttatttattttttatcatatactgaaagactacagttggccaacttacaaatttaaaatttacagtaaattatcagctaattcttccatagtcttaatattctcatcattcatcgtagatttgatcgttacaactggatctaccatctcgatattcttaaatccttctacgatacctttcatgatttttgctgccattggtgcccatgatccattttccataaatgcaactttacgtttctgatagttcttagcttttaagtgatgtaaaaagtcttccatgcatgggaagattcctgcatcgtatgttgctgctgccagtaccagtctgtcatagcggaatgcatcttcgatcacttctgccatatcatctctggaaaggtctgctactacaacttttggagctccttttgcttctaagatttctgctaatttctttgctgcagctgctgtatttccatggatagatgcgtatgcgatcaggattccttcgttctctggctcatatttgctccatgtgtcgtataatccaatataatatccaaggttttcttttaaaattggtccgtgtaatggacagatgatctcaatatctaatcctgcggctttctttaagagattctgtacctgtactccgtatttaccacagatattgaaataataacgtcttgcttcacatgcccaatcttcatctgcatctaaagctccgaatttaccaaatccatctgctgagaataagattttctctgatgtttcatatgctaccataacttctggccagtgaaccattggtgccataacgaactgtaatgtatgagatccaagagataatgtatctccttcttttactacgactttacgtccttctagatcaaatgtaaagaactgagggatcatattaaatgtcttggcattacctacaaccttagcttctggatatttttctgctaatacctgtaagcttgcagcatggtctggttccatatgagatactacaatgtaatctacgtttcttccatctaatgcttcttctaagtttacaagccattcatctgtcttgcatgcatccacagtatccataacggctactttctcatctaagatcacataagagttataagaaacaccatttggtactacatactggctctcaaataagtcaatgtcatgatcgtctacaccaatatattttactgaatctgtaactttaatatccttcattgtcttacctccaaaattaaattcattttgctttttcaacttttcttactataacatagttttgccaaaatatctactagtaatagttactatttctaatacaatttcttttcagatacaaagatccccaaaacaaaacttcaatcttgctccagggattctttatcatctctttggatgcttcatgcaactctgattatctatgcattgagaagctatccatatcataacgttttaagttgtctgtgatcttgcgatcatctgcggatttgatcattgtttctctgactttacgagctttgatgatctcttcgttacggcttggtccaccaacgcatccgccttcgcatgccataccttcgatgaagtcttctggtaatcttcctctctgtaagaacattaaagctttcttacattctgctgcaccgttagctttgcatactttgatatcttcgttctgttctgtctctttcatgtattctaatacagaatctgttactccaccagagtttccatagaatttaccgaagatcgtagaatcctgatatgtattctctgctggttctaattctacgtcttttgctttcataattgctaagatctcgttgtagtttaatgcataatctgcatttccttcgatcttctggtctgccacttctgatttcttggctacacatggtccaacaaatactgtaactgcatctggatcttttgctttaatcattcttgatactgcacacattggagatactgttgtagaaatcatatctgcaagatctggataatgtttgcgaatcatgtttacgaatcctggacagcatgaagttgttttcttctcaccgtttctgtaagcttctaaccattcttctgcttcgctgcatgttgtcatatctccacctaaacctgcttcgatcagatcttcaaatccaactttctttactgcctgtctccagctttccattgtaatatctttaccaaactgtccttctgttgctggggcaaggatcgcgtagactttcttacctgctttcaagtctgcgataacgtttgtgatccatgtctttgttccgatcgcaccgaatggacattttgctgcacactgtccacaacggatacatttttcttcatcgatcactgatactccatactcatcataagaaattgcatctactggacagctgtctttacatggtcttgatacatgagcgatcgcattgtatggacaggcttttgcgcacataccacattccttacatttctgaggatcgattcttgatcttgtatgtcctggttcgatcgctccgaaacgacatgctttgatacagtcttttccaagacaattctgacagttgtttgttacaacatagcttgagatcggacagtcagcacatgctgatttaattacctgcacgatatttccatcatcttctgctcctggagctttaccttctgctaaacgaattctctgtcttacgatttctctttctttgtagatgcagcaacggaatgttggttctggtccttcaatcatcttctctgggatcagatctctttcttcttctaaagtcccttcaaacgatgcctttgctacgaaatacagtacatcttttttcagattctgaatgcttgttacatcatacataatagtttacccttccttaaaaaacacttaactaaaacaccctagatattgttatttttttatctatgtgcattataacaaatattttcttttttctctacaatgcttaaagaaaagtacaaaaaatatgcaatttttttaaaattgtacaattaacattttcttaacgatgactctgtccgtatattgcatacaattattgttaaaagaaagacataattgtctgaaaatttttatcattataacttaaagttatggcaaactattatttttatgtatttcacaagccttattctatctgttattgtatagcttatcgatagaaaattattagacttatataaatggaaaggatagatttatgagaccatacagatatgatattgttggtagttttttaagaccagattatttaaaagatgcacgtgctgaatatgcagaaggaactttatctgcagaccagttgcgtgaagttgaagataaagcgatcaaagagttagttgaaaaagagaaagctgttggattaaaagcagttactgacggagagttaagacgtcgctattggcatcttgatttccttgcttccttagtcggagtcgaggagatcaaagctgatcactggtctgttgcttttaagggacatcagccaaaagccgcaactcttgagattgttggcaaaattgattttgatgaaaacagtgaattcttagatcatttctcttacttgaaagaaattgctggggatgttgactgcaagatgacaattccttctcctgcaatgcttcatctgatttgttgtgttcgtggaagcgaaacttacaaagcgatcgatcgttataaaaatgaagatgatctgtatcatgagattgctcttgcttatcagaaagcgatcaaagcattctacgctcgtggatgccgttacttacagtttgatgatacatcttggggtgaattctgtgatcagaataaacgcgacgattacgcaagccgtggtcttgaccttgaccagattgctaagaattatgtgaaaatgatcaatgaagctttagaagctaaacctgaggatatgacaattacaatgcatatctgccgtggtaacttccgttctacatggttctcttctggtggatatgaaccagtagctgagactttattcggtggatgtaagatcgatggtttcttcttagagtatgatagtgaccgttccggtgatttcaaaccattacgttttatcaaagatcagaaagttgtgttaggtcttgttacttctaaagatccagaacttgaagataaaactgagattaaagaacgtattaaagaggctgctcagtatgttgcacttgaccagctttgcttaagtcctcagtgtggtttctcttctacagaagaaggaaatatcttaactgatgaagatcagtggaagaagatgactcttattaaggagattgctgaggaagtttggggataggatatccgtgatacatatttcataataatatagtaaataaaagaatccggcattacatttttgtgtttgccggatttttttatatccaattttcatctatttcttttttcaacaggcaaaacatatcataaaatttttcttttgcctgtgaaataattgataatgcgatattctgattataagaatgtgttacatttctatccaaataagtgctttctattataac

SEQ ID NO: 698 - DNA, 50053 bp, Unknown
  gut microbiota DNA sequence
tatttttttgtaaaaaatcaaagaaaaaagcctctggagactaaatccagagacttaaaagggctattatttacgttttttataattgtgttcttcttattttacgttgaaggctttgattccagaatatacggcactgtctcctaaagcttcttcgattcttaataactggttgtatttcgcaacacgttctgatcttgaaggtgctcctgtcttgatctggcatgtatttaatgcgacggctaagtctgcgatcgttgtatctgctgtttctccagaacgatgagatgttacagctgtgtatcctgctttgtgtgccatcttgatcgcttctaatgtttcagagatagatccaatctggtttaatttaatcaggatagagtttcctgctcccatttcgatacctttagaaagtctttctgtatttgttacaaataagtcatctcctactaactgtactttatctccaagtctttctgtcagtttcttccatccttcccagtcttcttcatctaatccatcttcgatcgagatgattggatatttctcacataatgcagcccagtgctcgatcagttcttctgctgtatattctgttcctgcttttggcagtttgtaatatcctttacctttttcactcttccattctgaagatgcagcgtccatagcgatcttgaagtcttttcctggttcgtatcctgcttttttcactgcttctaagattgtttcgatggcttcttcatctgattttaatgctggcgcaaatccaccttcatcacctacggatgtagcaagtcctctttcttttaagattgctgctaatgcatggaatacttcagcacaccatcttaaacattctttgaatgatggagctccaactggcatgatcatgaattcctgtacatcaagtcctgatgataatgcatgacatccaccatttacgatattcatcattggtactggaagtctgtttccagatactccacctaagaatctgtatagaggtacttcaagagatgtagctgctgctcttgctgctgcgatcgatacagctaagatagcgtttgctccgaagtttgatttatcttttgttccatctgcgtcgatcattgctttgtctactgcatatgtatcagaagcgtctaatccgatgattgcttcactgatctttgtattgatattttctacggcttttgtaacaccttttcctaaatatctttctttatctccgtctcttaactctagtgcttcaaattctcctgtagatgcaccacttggagctgttcctcttgcaactgttccatcaactaatgtaatctcagcttctacggttggatttcctctggaatctaggatttctcttccgactactttttcaatttctaaataattcatttcgattgtgactcctttccctatacatagcagtactcctcgctggaagaagggtaagcttccagtttgagatcattttgttgcaggtgtcgatctcaatcgaggagtccacatgattcattcacgtttttagttagtgttgtctaactgctatttatgatactagatttggatggaaaaatcaatggggatatatgataataattatcatatatcccctagttgattattttcttaattttttgatcaactcttttttcgttgtattattatatgcccatacacgtacatcatttttcgttgcacttctatattgtttttctgaaatatatgtcaactttcctttttcctttttgctatatatttctttatcaatgactctatgtactgttttttctgatttttctaaatttgttgtaactttatttccatcctcatcttcgaaatgtccttcacattcaaagaaatatgatgctttttttacaattttcttcccattatacttataaatataatatttttcctttcaggaccattttcacttaatactgaatactgtaagcctgcaattgttttctgttttttattatatgcaattatttgatccgatgttgaccaaattttctttacttttcctttattgtatgtataaatatttaaatttctagctttgccttctgcattactatttaaattcacagtgaccagttctttcgttccgcctcctgttacttcaattaatgaatagcttgtaaatttggctactttgtttttcttgattgcttgtgcataggctttgttcgccttcttctgtgctttttttgatgcagctaatacattttgagttgaaaccaatgttgttgccattaaggctgtgattgctaaagttgttaatttttttgttagattttttaatttcattttaccttcctcctatcttattctgttacaatatgatatccataatcagataacatttgttgtgttcctagtggtacataaactgacattttttctgcattaaatataccagaaccacttcttgcttttgaaatatggcttagcatatcttttgccgctatatttctaagaaattaagttttccaaaccaaatcattagaaaaagccttccaatagatttctccattgaaaggctctgtatattcttcgtatcttccgtaacgtatgattaacgttttgagaactgtggtgcacgacgcgctttgcgaagacctggtttctttctttctttcattcttggatctcttgttaagaatccagctttctttaatgttgaacggaattctccatcaacctgtaataaagctctggaaataccatgacggattgctccagcctgtcctgtaaatccaccaccatgaacgtttactaatacatcatatttgtcaattgtatctgttgcaactaatggctgacgtacaactacttttaatgtttctaatccaagatattcatcaatatctcttttgttgattgtgatttttcctgttccaggtactaaatatactctggcaacactgtgttttcttctaccagttccgtaatattttgctgtagccactgcttcttcctccttcaaaaattaatacttgatctctaatgcttttggctgctgagctgcatgattgtgctctgcacctgcatatacgtgaagtttcttaatcatctgtcttcctaaaggtccttttggaagcattcctttaactgcaagatagattacgtcttcaggttttttagctaatttttcttttaatgtctgttctttcattccaccaacatagtctgaatgatgatagtagatcttctggtctaatttcttaccagttactttaatcttctcagcgttgataacgatcacgttatctcctgtatcgatatgtggtgtataagttggtttgtttttacctcttaagattgttgcgatctcagatgctaaacgtcctaatgtatgtcctgtagcatcaactacataccattctctttcaattgttgatgggctggccataaaacttttcatggtgttcctccttaaaatttctatcaatcatatgtgtctatattaaatactcccaccggggcattggggtagtattctctcgcatgtcacagtttcttattatataatacgcagccgggtgtgtcaagattttttctcgttgtttttgataattttttgatgttatccacaagatggtcttgatttcaaaattttatccacaatatatgggtatattatgtccgtatatgttaaaacattgttgataaatctcaatgtcaaataagatatgctacaatcggcagcgttatgatcgataacagtgttgtcagtacaattcctctgctgcagatcgaactgtctaatccataatcgattgccatcatcactgccatgcttccatttggcattccaaacattaataccatgatccccgagagaacaggatctaaatgaaacagccggatcgcaaatgctgcgatcattgggatcaccagcatctttaaaaatgtaaactgatacatcttgatgtctttgaaaacttcgatcagcggcatcttcgctaaagataccccggtaatgatcatggagagtgggattgctgcatttcctaagtattgtacaaaacttaccgcaggtgctggtgcgtcgatctgaaatgcaaaaatcaataacgcagccagacatgcgaccattcctggattgatcatctttttccagtggaatatgatcttagctttttgtcctgtctgcatggcacgttctttctcaaaaagataaattccataggtgtaaaagagaatattatataccagtgtatacagtgctacataaaaaatagctcctctaccgtataattcttcaatgatcggaatccccataaatccaagattcgaaaagatcagcatcactgcatagatatttctttcatctttttttacacctagaatacgaacaaatgccggactgatcaggatcaataccacaaataagatcactgcaaggatcaggtccatgatcacaagattccagtttccatttccaacggaaccgatcacgccagatatgatcaatgcaggattaaatatatttacgatcagtcctgatatctgtaaacttgtatcatcactgatccattttttcttataacttaggtatccgatcagcataaaaccaaacaatactaacaatttctgaaatatgataaagctattctgcattcgctcgatcctccggatattcgatctgaattagtgtcaagccttttgctggaagttttggtcctggtgtaactctttctttagatgctaagatttctttgacccattgtggttcttgttttcctcttccgacctctaaaagcgttcctgccattaaacgtaccatattatagagaaaaccacttcctgtgactctcattgtgatatatctgccattttgtgtcacatcacattcgtaaatctctctgacataggatgtaacctgtgctttactgctgcacatactgataaaacagtgttcccctaagaaataagaagctgcttctttcattttctccacatcaagtggtacatatacaaaatgatgatgtctgcttgtcacgggattgtcgtatcttgcattgtaaaaggtatattcatatgtctttcttgtatcctgaaaccttggatggtagtctaatggcacttctttggagtcctgaataatgatatcttctggtagtcttgcatttaatgcttttgccatcttctctcccggaatacggctttctgtgtcgaatacagctacatttcctaatgcgtggactcctgaatccgttctgctggctccgatcactttgatgtcttctcctgtcagttctgatatatgcttatttaagacaccttcgactgtaatctcgtttggctgtacctgccatccacaataaccagttccatcataggctacgattaattttactcgtttcatcgtatcttacctccatggactgaaaaaggataaatagatcatcactgctaaaaatacaaacaggacgatatacgctattttatctcttttctcgtattttaatggttttaatttagttcttccaacaccgccatggtaacaacgggattccattgccattgcaaggtcattcgctcttcggattgctgctacaaacagtggtactataattggaaccatgctttttactcgttttaagagacctccggattcaaagtcgattcctctggctgtctgggctttcatgatcttttctaattcttctgttaagattggaataaatctcagtgcgattgacatcatcatagcaatctcatgtactggtactccgattttatttaaaaatcctagtgatttgtctagtccgtctgtcagttcatttggtgttgttgtaaatgtcagtaaagacgttcctaataccagcatgatcagacggcttcccagataaatagttgtcctgatcccttctgcagaaattgatatgatccagaactggatcactggttttcctggaataaataacatattgatcattacagagaataataagatcactgcaattgcttttaatcctcttaaaatatattttacaggtacctttgaaatcttgatcgttatgatcaaaaataatagtgacatcacataagttgcaggtgctttatgcataaataatgtaatgacgtagatcaagactgcaaataatttcactctcggatcgagtctgtggatcagagagtcttctttataatattgtccaattgttatatccttgagcattttattttcctctcagtccttttagtccttctaaaattgcttcttttgtttcttctaatgtcaataaatccctctggatcgggaaccctctgtctgcgagttcttcacatacttgacgataaaacggtacagcaagtcctgcttcttctagttctttcttgtgagagaatacttcttttttatctccttcatacatgacctgtccgccattcataacgatcacacgttgtgcatagtctgcaacatcttccatactgtgtgataccagaatgatcgtgattttcttttcttcatggagtttctttaacagatttaagatctgatcttttccgaccggatcaagtcctgctgttggttcatccaaaatgaaatattctggctccattgcaagaatccctgcgatcgctactcttcgcttctgtccgccagataattcaaatggcgatttttgatataatttctctgataatccaacatcttttaaacatttgacagcaatctctgttgcttcttcttttgtctttccaaagttcattggtccaaaacatacatcatctaaaatcgttgtctcaaatagctgatgttctggatactggaaacatatacctacttttccacgtaattctcgtaatgggtatccttctgaatatatatcttcatcatcgaaatatattgttccagacgttggtttgatcaatccatttagatgctggatcaatgttgattttccagaacctgtgtgtccgatcactgcaatgaattcttctttttttatttctaagtttatatcttttaatgcgtaattcttcttgctagaattatcttcatatgcgtaacttacatgttctaaacgaattgacataattcctccaccagctcttcctttgttgttatcgtatctgacaagttaacaccttctttttttagttcccatgcaagttctgttgcgtacggaacttccagacctaatgttttcatctcatcaactcttgaaaagatctcttttggttttccatccatgacgatctttccttgatccatcacgatgatacgatctgctaagattacttcttccatatgatgtgttaccataaggatcgtaatattcttttctttattcaatgctttcacaagagataaaacatgtctgcggccttctggatctagcatggctgttggttcgtctaatacgatacattctggttccattgccatgatccctgcgatcgctactctctgtttctgtccgccagaaagatgattgggacttgcttctttatatgcgatcattcccacacctgtaagagccgctgtgatccttgtccagatatctttggaagctattccgaggttttctggaccgaaggctgtgtcttcttctaccgttgttcctacgatctggttatctggattctgaaatacgattcctgcactctgtctgacttttaagagggtactttcatcttttgtatccattcctttgatatatactgtgccttctgtcggcatcaaaagtccattgatgtgcttcgcaagcgatgatttcccggaaccattctttccaaggattgctacgaattcacctttctcaacattgatatcaatatgatcgattgctgcaatctcttgtttatcttcttctgtatctccataggtcacatatttgtgaactaagtcttttattttcaatatggacataatattctcctatctgatccgtaataaggatagtatactatttcccataaaaaaagaaaagtcttatcccagttgttccggaataagacctctttgttgttgtcgatttggaatttaaataatatagtcagtattgaactgttgattaaactaattcaagtactacttttaatgctgcatcacctttacgctgagcaatcttaacgattcttgtgtaaccaccgttacgttcagcatattttggtgcatactcgtcgaataacttagctgttaaatcaactttctttgtattagctttcttaccagctgcttctgtaggaacttctgttacaggatataatacctttaacatctgtcttcttgcatgtaagcgggatggtaaatcttttttgatttctttctgaactgtttcataaacagtaactttcttaccatctacaacttctttcacgcgttttccgttttcgtctttcttagcaactttagcgtcaactgtaactgtttcaaagttgtctttttcttttacagctaaagcgatcagtttctcagctaccttgcggatttcttttgcttttgcttcagttgtaatgatttttccatgatgtaacagatttgttacttctgcacggatcagtgcttttctctgggaagctgttcttcctaattttctgtattttgccattataatgacctcctgtgttttttcgccttgcttacttatgccttcagcctaggcgggtctggtttctattcttctcctgaacttagggataatcctaattcacttaacttagctaaaacttcttctaatgatttacgtcctaagttacgaactttcatcatatcttctgaagtcttatttgttaattcttctactgtattgatgccagctctctttaagcagttgtatgaacgaacagataattctaattcatcaatgctcatttcaagaactttttctttctcgtcatcttctttttctaccataacttctgctgtcttggcattctcagaaagatctacaaataagtttaagtgctcgcataatactttcgctgctaaacttacagactcatctggtgttagtgttccgtttgtgaatacatctaatgttaatttgtcataatctgtgatctgacctacacgagtattctcaacctttaagtttacacgctcaactggtgtgtaaatcgcatcaactgcgatctcatcgattgcttttccttctttgtctgctttgtctgcgcctacatatccgcgtccgtttgtgattgtaagctccatatccagtttgctgctgtcatcacttaatgttgcgatcacaagctctggatttaagatttcgatatcactgtccgctttaatatctccggcagttactacaccctttcctgaaaactcaatataagcctgctttgtttcagcggatgagctgttgtttttaattgccagagatttgatattcatgatgatctcaggtacatcttctttaacccctgggatggaactgaactcatgcagaacacctttgatctttactgaacttactgctgcacctggcagagaagaaagcatgatacgtcttaaggaattacctaaagttgtaccataacctctttccaaaggttccacaacaaagcgtccaaaacggttatcttctgaaatctcattaatctcaatatttggtttttcaaattcaaacatacgtgccctccttttggcttaggtttaacttgagggttattatttagaatataactcgacgattaatgtttcgttaactggtacgtcgatctcatctcttgatggaagttcttttacagttcctgtaaagttatcatgatctgcttctaaccatgaaggaatcattcttccttctgttacttctaagatctctttgtatcttggagatgttctatgtttttctttgatttcgataacgtccccagctttaacctggtaagaaggaatgttaacctgttttccattaactaatacatgtttatggtcaacgatctgtctgcattcttttcttgttcttccgtatcctaaacggaataatacgttatctaaacgaagctctaataatgtcatcaggtttgtaccagtctgacctttcattctttctgcttttgcatagtagttacggaaaggtttttctaatacaccataaatgaatttagctttctgtttttcgcaaagctgaagtccgtattcacttttctttctgtttgctctatttaaacttctgtttgattttttatcaattcctaaaaagacaggatctaaacctaaggatctacatctctttaagactggagttctatctactgccatctttaattatcctcctaaattagactcttctacgttttggtgggcgacatccattatgtggaacaggtgttacatcgctgatgcttgtaacttctaatcctgctgctgataaagcacggattgctgcttctcttcctgatcctggacctttaaccattacatctactgattttaatccatgcactaatgctgcttttgttgcagtttcagctgccatctgagctgcatatggtgtagattttttggatcctctgaatcctaatccacctgcacttgcccaagaaagagcatttccctgtgcatctgttaatgtaacgattgtattattaaaagatgactgaatatgtgcctgtccgtgctgtacattcttctttacacgtttttttgcacttttctttgtaactttagccataattacgtatacctttctttcttcatttcaattccaaaaagattgcctatactgcaaatcttatgctattcctgactgtccatacagccgggtgtgtcataacactacaaatttagtgtttattatttcttcttgttagctactgttttcttaggacctttacgtgttcttgcgttagtctttgttttctgtccacggcaaggaagtccctgtctatgacgttttcctctgtagcatccaatttcttttaatctcttaatgttaagagcgatttctcttcttaaatcaccttctacaacctgtgtatcgttgataactgcactgattcttttaacttcatcatcagttaagtcgcgtacacgagtatcaggatcaacatttgcctctgccaaaatacgttttgcgcttgaaagaccgattccataaatataagtaagaccaatctctacacgcttttctcttggtaaatcaacacctgaaatacgagccatgtttttctttcctccaaaataaataattacttgtctattaagggcaatccatatatccgcagtacggtgaaatgatatatatgtctcttcctcaaattatctttctatctataaataatcagtacgagcgtacctgtactcatactgcagccgcctaaattatgcgagtgtatctctacacatcacaaaatacacctctaaactgttcttgcagtaaataggtgaatacacaacaaaccaaggattattgcgatattcttatcgaacgtcgtaattatccctgtctctgtttgtgttttggattctcacagattactctgacagatccttttctcttgataaccttgcatttttcgcaaattggttttacagatgctctaaccttcacttgaatatctcctttcaaaaaacgttcgggtatgattatatcatcatattctgaatatttcaagactttttctaaatttatttatctttccaaataatttatttgtctctccaaataattcttccttttgataaatcatatggtgataatgccagtgttactttgtcacctggtaaaatcttgatgtaattcattctaagctttccactgatgtgagctaaaattacgtgtccaccttcgatttctaccttgaacatagcgtttggtaacttttctaacactactccttcaacttcaattgcttctgattttgccattttattcctcctattcagacaaagtcaatatttcacaaccatcttctgtgatgacgatcgtgttttcataatgtgcagccagacttccgtcttcagtaacaactgtccagtcatcgtccagccagacaacatcataactaccttcatttaccattggttcaatggcaagcgtcattcctggtcttaatttcattccttttcttctctgtttgaagttcggaatctgtggatcttcatgaagatgtgttccaattccatgtcccactaaatctctgactacagaataaccattactttctacatatttctgaattgcttcagatatgtcaaacaaatgatttcctggaactgcaagtttgattccttcaaagaaactttgctttgttacttcgatcagtctctttgcttcttcggaaatatttccaaccgcatgtgttcttgctgcatcggaatgatatccttcatggatcagtcctgcatccagacttacaatgtctccatcctgtaaaatccggtctttgcttggaataccatgtacgacttcgtcattgacagatacacagatggatgccggatatccattatagtttaagaagtttggtacacatccaagatctctgatcgctttctctccaaactggtcgatctctaatgtagaaattcctggttttacaaaatcagctaacttgttgtgaacttcctctaacatcttaccggcttctcgcataagttcgatttctttttttgatttgatcgtaactgccatggtctgcctcttatcctaaaatagatttaatttcttcaaaaacaactttgatatcctgtgttccatcgatctcgtgtaagcttcctgcttctttatagtgtgcgatcagtggagctgtctgttcatgataaacatccagacgtttttttacagtttctgctttgtcgtcatcgcgaagaattaattctccaccacatacgtcgcagcagttttctttctttggaggattatactgaacatggaagattgctccacagtctttgcaggatcttcttcctgacattctgttgatgatattttcatctggaacttcgatatcaattgcaaattcaatcttctcaccgtcttttgcaagtgcttcatctaatgcatttgcttgtggaatcgttcttggaaatccatctaaaatataccctttttcacaatcatctttgtggatacggtcaacaacaagatcgcatacaagttcgtctggaactaacagtcctttgtccatgtattcctgtgctttcttcccaagctctgttccttctttaatatttgctctgaaaatatcacctgttgagatgtgtggaatatcgtacgcctgtgcaatctgttttgcctgagtaccttttccagcacctggagctcctaacataataattttcatgacaaatcctccttttgtctctcttttatttttagttaccatacaatttgtttccataccatcgtttttaatgccattgggcttttgtgcttatataaaaacattccatataagcacaaaaagctgtagttgtcactacagcttttcttatagttactcactcaaaaaaccagaatagttctgtactaacaactgtgactggatctgcttgatcgtctcaaggataacacctactacgatgatgatagatgttcctccaaatgaaacgcttgctccaaatactccattaaagaagaatggaacaactgccacgatcgttagtcctgcagcacctataaatataatatattttaatattttattcaaataatctactgtaggttttcccggtcggattcctgggataaatccaccctgtttcttcatattgtttgaaatctctaatggattaaatgtaatcgatgtatagaaataagcaaacagtactaccaaaacaatatagatcaataaaccgatcgatctttttggatgggatgcatcaaaccaggtagatgagttcaaacttgttaatgcttttccaatgaatccgttattctcgtattttaagacattctgcagcatgattgggaactgcataatggatgatgcaaagataattgggattacacctgctgtgttaactttcagcggaatcttactctgctgtccaccaacaagttttcttccctgcatcttcttagaatactgtactgggatatgtctttccgcatctgataaaacgataacgaatacgacaactgccagaacaactcctacgatcacacatcctgcgatcagagctggcccgatctgttttcccttcataaactgattataaagagaagtaaaatctcccggcattccggatacaatgtttacgagcaggataatggaaataccatttccaattccactctctgtaatacgttctccaagccacataaccagaactgcacctgcggttaaagcaatgatcattgtaacaatggtaaacgttgtataatcggtacctaatgcaccttgattggcaaatccgatcgcaagtcctgcgccttcgatgatcgcaagtacaaccgttacatatcttgtaatctttgccattctttttcttccgtcttctccatctttctgcatctcttcaagagctggaataacgatcgtcatcagctgcatgatgatggaagatgtgatatacggagttacacttaatgcaaatactgacatctgcatgaaggagcctccggtaaaagagttcaataggctgaacgaatcgcctaatgtactctttaaataggcactgatctgtgcactatcgatttccggaattggtagttgtgatccaaaacgtacaacaataagaattagtgtcgtaaataatagcttctttcttaattgcttgtttttaaaagcgctgacaacagcgtttgacatactagatcacctcagcttttcctccaagtgcttcgatcttctctttagcactagcactaaatgcatttgcttttacatttaatttctttgttaattcaccgtttcctaagattttaactccatctctaggatttttaacgattcctgcttcgattaaagcttctacagatacttctgctccgtcttcaaatctttctaaagctgaaaggttgataccaacgatttccttagagtttctgcatttgaaacctctcttaggaatacgtctgtataaaggcatctgtccaccttcgaatccaggtcttactccaccacctgaacgagctttctgtcctttatgtcctttacctgcagtttttccatttcctgaaccatgtccacgacctcttctgaaagcgtcgctatgtttagatccttctgcagggcgtaagtttgataattccattccgttacacctccttgccgaatattattagatttcttctactttaactaaatgtttcacctggtgaatcattccacgtgttgctgcgttatcaggcagctcaactgttttgtgaagttttttaagacctaatgcttcaacagtttttttgtgctttggaattgcaccaattgtagattttactaatgtgatttttaatttatctgccatttcaaaattcctcctatcctaagagctcttctactgattttccacgtagttttgctacctgctctggagtttttaagttctttaatccttcgattgttgctaatacaacgttctgtttgttgttagaacctaaagattttgaacggatgtttttatatcctgcaagttccagaacgatacgggaaggtccaccagcgatgataccagtaccttctggagatgtttttaataatacagatgctccaccgaagtttcctgtaaagtcgtgtggtgttgttcctttttcatcgattggtacttcaacaaggctcttcatagctgcttcttttcctttgcggatcgcttctggaatttcagctgcttttcctaatccagcaccaacatgaccatttttatcccctactacaaccagtgctgcaaatctcatgttacgtccaccttttactactttagtaacacgtttgatggatacaactctttcttccagctctaactgactagggtcaataagtgtatgcttcatttgacttcctcctattagaatttcagaccagcttcacgagctgcatctgctaatgcttcaattttaccatgataaataaatccgcctctgtcaaagacaacttctgtgataccttttgctaaagctctttcagcaattactttacctaagtagctagctgcggcaacatcatttgttttttccagttctgcctttacgtctttctgagttgttgaagcagatactaatgtatttccaacagtgtcgtcaataatctgagcgtacatatgatcattacttctaaatacacttaagcgaggtctttcgcttgttccattgattcgattacgaagcttgtagtgttttttcgcacgaatcttgcttcttgattcttttctaatcatcctatatcactcctttatttagccccagtttttccaactttacgtctgataacttcatcagcatacttaatacctttacctttgtaaggttctggttttctaagttctctaatttcagctgcgtactgtccaactttttctttgtcgatacctttaacgataataatgttctgtccgtccatctctgtttcgattccttctggatcagtcataactaccggatgagagaaaccaaggttgaaagtgatttcttttccttttttctgtgctctgtaaccaacaccgttgatttcaagcttcttttcgtatccttcagatacacctgtgatcatgtttgcgatcaaagatcttgtaagaccatgtaaagatttcattttctttaagtcatttggtcttgttacgacaacctgattatcttcctgtttgattgtcatttctactggtaaacatttttctaatgttcctttaggaccttttacagtcactttgtttccttcttcaatctttacctctactcctgcagggatatcgattggtaatctacctatacgagacataggttacctccttaaattgtcggaagggacaagggtgtgtcccttctgttttcagaatagtgaatgctggttaatgtacagtaaatcttaccatacaaaagctaacacttctccacccacgttctgttttcttgcttctttatctgttaacagtcctttgtttgtagagatgatcgcaataccaagtcctcctaatactttaggaagctcttcagcccctgcgtatactctaagccctggtttagagattctcttaagtcctgtaatgattttttcatttttatcagcaccatattttaatgtgattacgattgtgctgaaagaaccttcttctttgatgtcatatgctttgataaaaccttcttttaataagatttctgcaatcgctgtcttcatcttagaagcaggaatttctactgtatcatgtttcgcagtatttgcattacggattcttgtaagcatatctgcaataggatcgctcattgtcattttcgtgttcctccttccttaatcttaccagcttgccttcttgacacctggaatctgtcctttatatgctaattcacggaagcaaactctgcagataccatattttcttaaatatgcatgtggacgtccgcagattctgcaacggctatattctcttgttgagaattttgcttttcttttctgttttgcaaccattgacttcttagccatgggaaccctcctaactatttcttaaacggcataccaaataaagttaataattcacgagcttcttcatcagtgttcgctgttgtaacgaagatgatgtccattcctcttactttgtctactttatcgtattcgatttctgggaaaattaactgttctttaatacctaatgcatagttacctcttccatcgaaagagttctggttaactcctctgaagtcacgtactcgaggtaatgctaagttaattaaacgatcagcgaattcatacattctttcaccacgtaatgtaactttgcatccgataggcataccttctcttaatttgaagttcgcaacagatttctttgctcttgttacgactgctttctgtccagcgatcttttcaagatcagctactgcagattctaaaacttttttattttcttttgcttcaccaacacccatgttgattacgatcttctcgagttttggtacctgcataatattgctgtattcgaatttcttcatcatagcatctttgatctgattgctatactgttcatgtaatctactcacttgcgtaaacctcctctcttaattagtcaatgacttcgcctgttgcacgtgcaacacgaacttttttaccgtcaactactttatatccaatttttgttgtttttccattgtgcactaacattacattggaaacatccattgggccttcctggcttacgataccaccctgctggtttgcaggactaggtttagtatgctttgtgatcatgttggcaccttcaactgttacagtaccttttttatgatcaacagcaattacttttccttctttgtctttatctttaccagcgataactttaactagatcgccttttttaattttaattgctgacacagtgtttcctccttataatacttctggtgctaatgaaacaatcttcatgaatttcttgtctctaagctctcttgccactggtccgaagatacgagttcctcttggattcatatcatctttaataattacagcagcattttcgtcaaatttgatataagaaccatctttacgacgggcacctttctttgtacgaacaacaactgctctgactacgtcacctttttttacaacgccgcctggtgttgcatctttgactgtagcaacaataacatcaccgatgttagcatatcttcttgtagatcctcctaacacacgaatgcaaaggatttcttttgctcctgtgttgtcggctactctaagtcttgactcctgctgaatcatgcctttattctcctttccaaccaagcaaaattattttgctttttcgataatttcaacaagtctccatctcttatcttttgaaagaggtcttgtctccataacctttactctatctccaatgttacattcgttattttcgtcatgagcttttaatttgtaagttcttttaacgatctttttatataaaggatgttttacgttgtcttcgattgcaactacgattgttttatccattttatcactaacgactttccctacacgggtttttcttaaatttctttccacaacaaattcctcctttcgaaatgattactaagcgtttgcttttgctgtaattgcaccctgaatacgtgcaatatttcttctaacttctttaattctgcttgtattctcaagttggtttgttgcattctggaatcttaagttgaataattcctttttcgcagctactagctcattatttaattcgtctactgacttattatttaattcttttacaaaatctttagttttcactgttgtcaccgccttctaaagcttcacgagaaacaatcttacacttgattggtaatttgtgtactgcaagacgtaatgcttcttttgcaatttcttcgcttacaccagaaatttcgaacattacacgtcctggttttacaactgctacccaatattctaagttacctttacctttacccattcgagtttcagctggctgagctgttactggtttgtcagggaaaattttgatccaaactttaccaccacgtttgatgtaacgagtcatagcgacacgggctgcttcgatctggtttgctgtgatccatgctggctctgtagctacaataccgtactcaccgtaagtgatcttattaccgcgtaatgcttttccgcgcatgcttccacggaactgtttacgacgttttactctttttggcattaacattatttatttcccccttccttttttgatggaagtacttcaccatggtaaatccatgtttttactccgactttaccatatgttgtatctgcttctgcaaatccgtaatcaatgttagcacgaagtgtctgtagaggaattgttccctcgctgtagaattctgtacgtgccatatctgctccacctaaacgtccagaaacggatgttttgattccaagagctccagatctcattgtacgctgcatgcaagatttcattgcacgtctgaaagaaatacgattttcaagctgctgtgcaatattctctgcaactaactgagcatctttgtctggtctttttacttctttaacatcgatcagtaattttttgtctgtcattttctgaagatcttttttcagttcttcgatggaagatccacctttaccgattactactccaggttttgctgtatatacgattaattttactctgtcggaagctctttcgatctcgatcttagaaattccagcattgtataatcttttctttacatattttctgattttatcgtcttctacaaggttatctgcaaaagcgtcttctgcataccatctagaatcccaatctttaataattccgactctcagaccatgaggattaactttctgtcccatgtttgcctccttctatctatctttcatcaagcactaatgtgatgtggctcattctatgttcgattctgtaagctctaccctgtgctctaggtttaattctcttcattgtaggtcctttatttgcataacattctgcaatgtaaaggttttctgggtccattccgttattgttttctgcattagcgattgcagattttaataatttttcaattaatgttgaagcatatcttggattgtaaagtaaaattccaagtgctgtttctacgtcttttcctctgatcgcatctaatacaaaagctgcttttgttgtagaaactctagcgtttcttaatgtagcttttggtctagtatctttatttgcatttctctcttttttgtactgagatctgctatatttctttgccatttatatggaacctccttccaaaattaattatttcattccggttttcttttccgttttcttatgtccacggaaagttcttgttgctacaaactctccaagtttgtgtccaaccatatcttctgtaacgtataccggtacatgttttcttccatcatgaacagcgattgtgtgtcctacgaatgatgggaagattgtagaacgacgagaccatgttttgataacactcttgtctcctgcttcgttcatagcgtctactttgttcagtaaactcttatctgcaaatggtccttttttaagtgaacgagccataagttacctccttgtactatttaacagttttaccatctcttcttcttacgatcatcttgttagattgtttgtttttcttacgtgtcttcaatccaagtgctggtttaccccatggtgtgcatggtcctggtctaccgattccagtcttaccttcaccaccaccgtgtggatggtcattagggttcataacagaaccacggactgtaggacggattcccatgttacgtttacgtccagctttaccaatgttcacaagatcatgttcgatgtttccaacctgaccaatagtagcacggcatactacaggcaccattctcatctcaccagatggtaaacgaagtgttgcatattttccttcttttgccattaactgtgctgagtttcctgcggaacgaactaactgtccaccttttccaggatgcatctcgatgttatggatttctgtacctaccggaatgtttgccaatggaaggcagtttcctactttaatttcagcttctggtccattcataacagttgttccaactgctaatttgtttggagcgataatatatcttttttcaccgtctgcataaactaacagagcgatgttagctgttctatttggatcgtattcgattgcagcaactgttgctggaataccatctttatcatttctcttaaagtcaataagtctgtattttcttctagatccacctccgcggtgtcttacagtaattttaccctgattgttacgaccagcgttcttctttaaagaaactaccagagatttttctggtgtagattttgtgataacatcaaaatcaagtccagtcatatgtcttctagaaggtgtatatgggttatatgatttaattcccatgtcagtctcctttcaaatctgatttaatatcacgcttttgttgcgtatagtttcaagtccttatcttagtcgaactaagtggttaatgcctatagtccttcgaagatttcgatatctgcactttcttcagtaagctgtacgatagctttctttgtctttgcagtttttccaaaagtcattccacgtctctttgtttttccatcattgttcattgtgttgacttttgctacttttgttccttcgaacattttttccactgcttctttgatctgattcttagtagcagatggatgaactaaaaaagtatatttcttttcagccattgcgttcatacttttttctgttacaactggctttaagataacgtcataatatttaatatctgccattatgcatatacctcctcgatatttgcaactgcttccttagaaacaactacagtgtcatattttaaaatgtcatatacattgattgtgcttgttaaagcagttttaactcctggaaggtttcttgcagataatactaagttatcatttttagatcccataaccactaatgctttcttagcaccaacgctgtcaagcattgcttttacgttcttagttttgatctcgtcgaatttgaattcgtcgatcactacgaatttgtctgcctgtactctagatgttaatgcagattttaaagcaatacgtctttcttttttgtttaatttctttgtgtactctcttggtgttggagcaaatacaactcctccgcctttccactgtggagctcggatagatccctgtcttgcatgacctgttcctttctgtctccaaggttttcttccaccaccgcgaacttcagaacgtgtttttgctttctgtgttccctgacggttatttgctaactggcttactactgccagatgtactaaatgttcatttatttcaacgccaaagatgttgtcatttaattctaatttctcaacttctttgccttccatatttaatacagatactgttgccatcttatatagtcctcctttcttctaaagacctacgcctttactgattcttttaacattactaaagattttttaggtcctggtacggcacctttaactaaaataatgttctgatcagcgtcaacttttacgatttcaagattctgaatagtaactctttctgctcccatttgtcctggcattttctttcctttgaatactttgctaggatcagaagccataccattagaacctgcatgacgatgatatttagaaccatgggcagatggacctgatttcaaaccgtgacgtttgataccaccagcatatcctttaccttttgatgtagcagttgcatcgattttgtctcctgctgtgaagatgtcagctttgatttcctgacctactgtgtattcttcagcattctcaaatctgaattctcttacgaatctttttggtgcaactcctgctttatcgaagtgtcctttctgtggtttgttgattcctttttctttcttgtcaacaaaaccaacctgaactgcgctgtatccgtcattctcttctgtctttacctgagtaacaacacaaggtcctgcctgtaatacagtaactggagttaaaactccatcttcgttgaaaatctgagtcattccaacttttgttgttaaaatcgcttttttcattttgattgttcctcctatttaatctacagcggattataacgcttaacgttgtaatcatcctagacgctacaagcttaaggggatacctcatttactcataaccctgtagggattacctatttgtttttcatcttgatatcaatgtacacaccagctggtacttctaatttagataatgcatcaactgttttctgtgatggtgtgatgatatcaatcagtcttttgtgagttctctgttcgaactgctctctggaatctttatatttgtgagtcgctctaagaattgtgataatctctttcttagttggcattggaactggtccactcaccttagatcctgtcttcttaactgtttcaataatgctttttgcgcttgcatcgattaactgatgatcgtatgcttttaatgtaattctcattacctgacttgctgccataaaaaaagccgcctccttttcgtactataaatgtttttgtagcacgacaagtggtgactgtacactcctccgtgtgtatcgtgaaatctacacactgcgtctctattccggactacaccggtgttcaatagattgtatattcgtacagtgacttgtcgccagttttaacaacttgacattcgctccacggaaaacctgcaaaggcttttgcctctacagcaacctcacgcttcaacgctatcaaggtcacaacatttgctattatatatgatgtttcaaattaatgcaaggggtttttcgattttttttgcatgtttttgataaaatacaaaatgtagtgttttctgtatgagtattaccgttttgggcacaagataatcttgttttttatgtttttttgcataaatgaaaacgagttctttccttattatatatggaaaaaactcgttttgcaattccaatatgtataatataaactgttattgacttttttaatttcatatattatcatttattcgataacggtaatcattatcaatatatagaaacggaggtaagagccataaaaaataaaattaaagtattatcaggagcacaattaaaatacattgcatttttatcaatgctgatcgaccacacaaataaggcattgatctatccaaatttaaatggtggccgattgaatacagttagtgacatatttgacattatcggtagaattgcattcccaatctttgcatttttacttgtagaaggtttttttaaaacaagaagcagagctaaataccttgcaactttattagtattcggggtaatttcagaagttccttttgatctgtttacaacaaagcaattttttgaaccaaactggaataacattatgtttacgttagcacttgtacttgttacaatttggatgatcgacgtgttgaaaaagaaaatggagaagtttcctaagatattatggtttctcttgtcatttgtgatcctggcggtcatgtgcctgattgctgccattctcagccttgactatgattatcatgcgattttaattggatatttttattatattttccatggaagggaacttattgcaattccatttaatttcttatccatgtataaagaaccatgggcacttcttggatttggattggtacttacgtataacggagaacgtggaaaacagaataagctgatcaattatttattttatcctgtccacttgctgatacttggactgttaagaatatacttaggaatataagtagagaaaagggtgacaacatgagcactttttgaatgcgttttttacaaatcgccttcaaaaatgcagagtgtcaccctttttttcttataaatatttcttcttatcttctttctgactcatacatgcaaccactacaaatcagaattttcgaaatctctgatatctctgttccaccagttcttctggtgtcatcttatcatatttctcaataaatccaaggatcatttctttcatttgttcagaaatatctaaaatattgtcaatacttgcaggctctggctcttcgatcacctgctcaatcacacctaattcttttagatcgttcgctgtgatcttcataactttagcagcttcggaagccctgttcccatctttccaaagaatcgctgcaaatccttctggagacagtacagaatatgtagaattttccatactccacacttcatttccaacagccatagccaaggctccaccacttcctccttctccgatcatgatagaaagaatcggtactttgatgtttgacatctcgaataagtttcttgcgattgcctctccgactccgccttcttctgcctctaatccacagaatgctcctggtgtgtctacaaagagaatgatcggacgatgaaatttctctgcctgtttcatcaatcttagggattttctgtatccttctggtgatggcattccaaaatttcgtttgatattttctttggttgagcgtcctttttgctgtccgatgactgtcactggtcttcctccaatagaggctaatccaccaacgatcgctttgtcatctccaaaataacggtctccgtgtaaggacatatatcgttcaaaaatcgtagaaatataatcaagacttgttgggcgttctgcggatcttgaaatctgcactctctcccatggtgtataattactgctcatattcacaactccttatgatcgttaccagcacttttcttaattttttgcgctctacgatcttatctacaaatccatgttctaacaaaaattctgctctctgaaatccttctggtaacttctgcccgatcgtctgttcaataactctcggtcccgcaaatccgatcaatgctcctggttctgctaagataacatctccaagcattgcaaaacttgctgtaacacctccagttgtaggatctgttaatactgtgatatataataatcctgcttcatcatggcgtttcaatgctgcggatgtttttgccatctgcatcagagatacgattccttcctgcattctagctccaccagagcatgtgaaaatgatgatcggtaatctcatctgtgttgcacgttcaactgctcgtgtgatcttctcaccaacaacttctcccatgcttcccatcatgaaatctgctcccatgactgcgatcacaacatcttttccaagaatctttccttttcctgtgatgaccgcttcatcaagattcgttacggagcgctggcgttccaatttattcttatatcctgggaagttcagtggatcgcttgtatccatctttgcatcccattcttcaaaagtgtctttatctaataccatggcaattcttgtctttggacggattctaaagtaattgccacagactggacatacataatcattttcgatcaaatcctcattgtatacaggctttccgcaacagttacacttctggaataatccttctggtgcctgaaattcaaggagcgtgtcctttgcttttcgtacacgctctgcctgtttgatctcctgaggtgataatgtccttttcttaaacatatcttttaatgacatgatactcaccttaactttctttattcagcttcattttcagactgatgtttcttctgaaaacgttcaataaatcctgtatcaacattgccttcgataaaatcttcatcattgatgatctcatactgatagtcaatgtttgtcttcacgccttctaatacaagttctcccaatgcattacggagtttgcgaagtgccaacttacgatttttatcatatacgatcagttttgcgatcatagaatcatagtatggtggaatctgatatcctgcgaataatgcagaatcaattctcactccttttcctcctggaaaatgtacatttgttacagttcctggacttggacggaagtcatgttctgtgtcttccgcattgattctcacttcgatcgcatgtccatgaacatgtacatcttcctgtgtataagtcagatgttttcctgcggcgatacggatctgttcacggatcagatcgattcctgtaacccattcagtcactggatgctctacctgaattcttgtgttcatctcaataaaatagaaatctccatgtttgtcacataagaattcaatcgttcctgcactgtagtattctgctgcttttgctgctttgactgcgatctcacccatcttctttcgctgttcgtcactgatcgcaggggatggtgattcttcgatcagtttctgatgtcttctctgaatagaacagtctctttctccaagatgaatcgtatttccgtatttatcagcaagaatctggaattcgatatggcgtggatcttcgatatatttttcaatatacatcgttccgtcgccaaatgcattctctgcctctaacttcgctgtctcaaaagtatgtacgaagtcttcagagtcatagcagacacgcattccctttccaccacctcctgcggaagctttgatcataactgggtatcccatgtcatctgcgatcttctgccctgcttctgcctcataaacggcatcttttgtaccaggaactactggaactccagcatccatcattgtctttcttgctgcggatttgttacccatgcggtcaatgatttctgcggatggtccgataaatgtgatattgcatttttcacacattcttacaaatttgctattctcagacaaaaatccgaatcccggatgaattgcatccgctccgactgccattgcagccccaagtacacgttccatgtcaagataactgtctttggcaggtgctggtccgatacagatcgtctggtctgccagctgggcatggagtgcatctttatctgcttcagaacagattgctacggacatgatatccatctcacggcacgcacggatgatacgcactgcgatctctcctctgtttgcaattaaaatcttcttaaacatttaagaaaccctctcttatccaatcataaatgtaatctctgcagatgccactttcttaccatctacagttgctgttccctgtgcaacaccgactggtcctttgactttgatcatctcaacttctaatgtcagcacatctcctggaacaacctttcctctgaattttgctttgttgactccacctaagaatgcaatctttcctttgtactcatctgcagaaagtgcacatacagctccagtctgtgctaatgcttcaatgatcagtaccccaggcatcactggttcctgtggaaaatgtcctgcaaaaaatggttcattatatgtcacacattttttaccgacgatacgttttccttcttccatctcctcaatacggtccactaataaaaatggacttctgtgaggaatcgtattcataatatctttaatatccattaccataataaatattctgcctttcttactggatgaccattaatggctgtccatattcaaccatctcaccattctcaactaaaatagctgcaactgttccatcatattcactttccacttcattcatcagtttcattgcttcaacgattccgattacctgtccttttttgactttgtcaccgacagatacaaatggctcagctccttctgatggtgctacataaaatgtaccaacaagtggggctttgatctcatctccatagagaatctcttctgtctgttcttcattctgttctggcatgatcgcggcactctgtactggtacccctgcaacagatgcatcaactgttgcgatctttgcctttttcttagcgattctgattgaaaattcttcgttattatattcaaattcatcgacatttgcagaagatactgcagcgatcaattctttcatttctttaacttccatgtcagtctccttctaaattaatcctcaaatttcttcacaagaagtgttgcgttatgtcctccaaatccaagagaattgctcataacgtaatttaccttgcggtctgttactggttctaatgtataatcaagatcacattcttcatctggaacctttaatcctacagttgggtgaatgtaatcttcttcaattgatttaacacatgtgataaattcaatcgcaccagctgctccaagtccatgaccgatcatagattttgtagagctgatcttcacatcatatgcatgttctcctaatgctttcttgattgcttttgtctcaaataagtcattcgcatgagtacttgttccatgtgcattgatataatcaactttatctggtgtgattcctgcttcatccattgcaaataccatagctcttgctgcaccttctccatcttcacatggggatgtgatatggaatgcatcacttgttgcaccatatccgacaacttctgctaaaatatctgctcctcttgcctgtgcatgttcaaggctttctaaaacaacgattcctgatccttctccaatgacaaatccatctctctctttgtcaaatggaatggatgctctcttcggatcatcagatccacttaaagctgttaacgctgcaaatccaccaactgcaacttctgatactgcagcttctgttccaccggctaccattacatcagcttctccaacctgaatggatctatatgcttcaccaatagactgtgttcctgtcgcacatgctgtaacaacgttgatactctttccgcgaaggccaaatgcaatagaaacatttcctgcagccatgttagagatcatcattggaactgctaatggtttcactctgttcggaccctttttatctaatgttcttgttgttgtttcgatcatctgaaggcttccaactccacatccaacagatacaccaattcttgttgtatcttctttctcaagatcaagtcccgcatcttcgattgcttcttttgttgcagctacagcatactgtgaaaataattccatacgtcttgctgcttttggtgacatataatctttggcattgaaacctttgacttctgcagccagatgagctttgtattctgttgcatcaaaatatgtaatcggtgcaaatccgatcttctgctctttgattccattccaaaattcttccacgctgtttccgatcggtgtgatcgcacccataccagttacaacgacacgtttcatgctcttcatataaaatctcctttacattcccattccaccgtcaacactgatcgtctgacctgtaatatatgctgccttgtcagatgctaagaaagcaactgtctctgcaatatcttttgtctgtcccattctctttaatggaatacttcctaataaattctctttcacatcttctgacagtacatccgtcatctctgtctcaataaatcctggagcgatcgcattgaccgtgattcctctggaacctaattctcttgccagagattttgtcataccaatgattcctgcttttgatgcacagtaattgacctgtcctgcattacccataactccagatacagaagacatattaatgatatgtccggatctctgttttaacatgattcttgaaacatgtttcatgcagttaaatgcaccttttaagtttacttcaatgactttatcaaattcttcttcactcatcttcatgatcaggttatcttttgtgattccggcgttattcaccagaatatcaatagacccaaattctttctttacagaagtgatcatctctttcgccacatcaaaatcggatacatctccctgatatgcttttgctgttcccccagctgctgtgatctcttctacaactgcctccgctttatctttggaaccacagtaatttacgatcacagttgctccatatcctgcaagagtcagtgccgtttctcttccgatcccgcggcttgcacctgttacgattgcaacttttccacttaacatgattacatgatctcctttaatttctctaaatcttctactttcgcaatattgatcgctttgacattacgatcgatcttgcgcataaatccacataatgttcttcctggtccgatctctacaaatgtatctgcaccatcagcgatcatcttctcaatagattgttcccagcatacagaagaataaacctgtcttccaagcaattccttaacttcatctttacttgtgataaattctgctgttgtattggatacgtatggaactgttggatcatccacttcaacatctgctaatacatcaagcaatttctctccagctggttttaacattggagaatgaaatggtccactgaccttcagtggcagaactctcttagctcctgcttctttcaacgcttctccagcttctgcaaccgcttttgattctcctgaaataacgatctgtccaggacagttatagtttgcgatcgtaacgattccttcaacgtctggtaaaactgcttcgatcgcttctttcttcattccaagaaccgctgacatcgcaccctctcctgctggaacagtatcctgcataagaattcctctctgccttacgactttcactgcatcttcaaagctcatcacatcagatgctacaagtgcacagtattctccaagacttaatcccgctgtcagatcaggatttaatcccatttcttcgatcttctttaagattgcaacacttgcagttaccatcgctgcctgtgtatactctgtaatattgatatcttcattctcttcaaaacaaagtttctttacatcaatatccagaacttcattcgccttgtcgaaaatctccttgctgcatgcaaaagaatcataaaaatcctttcccattccaacatattgcgctccctgtcccggaaacataaatacgatcttacccattatctttacctcgttgatctataaaataatctataattagtttgatgttcaaaatattttcttcaaaaaattgacttataacaggaatgttataagccaatcttacaatttctttagtcttctacacctttgtcttttaagtagttgataacatcaccaactgtgtttaattctgcaagatcatcagatggaatctcaacatcatattcttcttctaatgccataactaattcaaataaatctaatgaatcagcatccagatcttctttaaaagatgcttctaaagtaacttcatcttcgcttacacctaactgatctgcaatgatctctttcatcttctctaacataatgattctccttcacactctaattagtttgattctcaaagtatacattcttcaactgtcttctgtcaagttttcttgtaaatttacttttatattatacgaaactatacgtgattatgcaagcctatccttgccattctatgcatcttttatgaaacattttcatattattctgtatactatatactccataaaacacttcacaaaattaccacatttttaacacaaactgttcagacttttatcacagtttgatttgtttttcttcatataatgatgagagttatcgcaaaaaggaggacaatattttgatagaagtaaaacatcttaccaaaaaatatggcacacatctcgccgtagatgatctgtcatttaccattgaaaaagggcgaatctatggatttttgggtccaaatggagccggtaaatctacaactatgaatattatgactggatatatcggtgcgtcgagtggagaggttatcatcaatggtcacaatattctggaagaacctgagaaagcaaaaaaatgtatcggatatcttccagagatcccacctttatatcttgatatgacagtatctgaatatctgtattttgctgctgaattaaaaaaaattccgaaagctgaccgcaatgcacaggttataaaagttatggaattgatcaaacttgttgatatgaaagaccgattgatcaaaaacctttccaaaggttatcgccagagaacaggtcttgccgctgcaattcttgatttcccggatattatcatcttggatgaaccgaccgttggtctcgatccaaagcagattatcgaaatccgtgaactgatccgtacacttgctaaggaccatacggtgatcttaagttctcatattcttgctgaagttcaggaaatctgtgacgatatcctaatcatttcaaaaggaaaattgatcgctgagggaagccctgatgaattagaagaattaacacacggaaaagaaaccattgagcttacgatcctggcggatgaaacttccgtaaaacaggttctttctgatttttctgatattgatgatgtcaactggcttgatgtaagtaaagagagctgccatatccagatcaatacaaacaaagattctcaggaaatctgtgctgatctttctcttaaatttgcacagaaaaaaatgcctgtgacacagatgtttgtaaacaaggctactcttgaagatattttcctagaattaaccggagatgaaattgtttctgaagcttctgacaaagtttctgaaacagcctcgaaaagaggattcaaaaagccatcaattaaattatttaagagatgtaatggaggtgacaaataatgcttgctatctataaaagggaagtccgttcctattttaactctatgatcggatgcgtatttgcagcattcttaacgatcattggaggtgtatattttatggtttataacctttatagtggttatccattttttgcctactctctggcgggcgttattttcatgttattgatttctgtgcctgttttatctatgaaatcttttgcagaagaccgaaagaataaaactgaccagttattattaacttctcctgtttcacttgttgagatcgtattaggaaaatatcttgcaatggtgactgtatttgcaattccatgtgtgatctactgtattttcccactgatcatcaaaattcaaggaactgcccattttcttgttgattattcatccattctggcctttttcctgcttggatgtgtatttattgcaatcggaatgtttttatcatctttgacagaaagtcctgtgatcgcagcgatcactacttgtgcagcattgtttttcttttatctgttggacaatctgctgcagtattttccttccagtgcgatcagtaacctggtcatctggatcattatatttgctctgatcggtcttctgatctaccatatcacaaaaaatcagatgatcgctggcattgtcaccggcattggatgtatcgctggtatcgttgtttattttgtgaagaaaacattgcttgaaagtctgttttctactttattaggacaccttgtattaactgatattttttataatttttctcagaattacatttttgatctcggaggacttctgacttatctgtcattgatcattcttctggtgttcttaacagtacagacatttgaaaaaagacgttggagttaggaggaagttatcgtggataaaatcaaaaaattatttcaaagcaatgattcgaaacgtggatcttatactcttgctatgacatccatcgtgatcgcgatcgttatcatttttaatatgatcgtcaatctgatccctgaaaataagcgacagtttgatatcagtagtaccaatatttatgaaatctcatcaaaaagtgaaaagatcatcaaaaaagttgatgatgacgtcactttttatgttcttgcagaaaaggacagcactgataaaaggatcaaaactttcatcaataaatatgcttctttatcaagcaagcttcatgtcaaatggatcgatcctgtgcttcatccatctgcattgacaaaatacggaaccgaagaaaacaatatcgtcatctcttgtaagaaaaccaaccgtacaacaactgtttcgtttgatgatatattagtttcctcagattcttactacagtacttcctcttccgcttcatcatttgatggggatgggcagcttacaagtgctttaaattatgtaacaagtgacaaagaatataaggcttattatacttctggccatggagaatcatccttatcttccgaggtcacaagtcttcttacaaaatcaagaatttccacaagtgatctgcttttaatgactgcaacatccattcctgatgattgtgatctgctgatcatcgatggggctacaagcgattttacaaaagatgaagtaaaactattatcttcttacctgaagaaaggtggaaaagttgttactttacttgcccagacaaataagagtatgaaaaacttatatggtctgttaaaagactacggtttaactgttcaaagcggatatattgcagatacagaacgttcatatcaaggaaattattattacttgatcccaaatctttctgtaagcggtgatatggcttctggaatttcatcaaactctgttatgatgatcaattcgaaaggtatgacacagagtactccagttagagattctatttctaccgatgcatttatgacaacatccagcaacggatatgctgtcactgagaagaaacaaacacagggaacttatgtccttggtgcaacttccacagaatctgtcaaagtcaaaaacagcaaaggaaagaaagttgcaaaagaaagtcgcctgactgtttacggaagtaatatgctgatcgatgagcagatcacaagttctttctcatccttagaaaacctgacattatttacaaactctgtgaccgcatgtttaaataatgccgataatgtttctatctctccaaagagtctggaagttaactataatacgattgctcatcctggaccattcagtatccttgtagtctttgtaattccagttggtctgatcattggcggattcattgtatggtttagacgcagacgccgttaggaggttttcatgaaacagaaaaaaacattacagattttacttctcgtatttgcaggacttattgtcctgtatacgggagtgaatttataccagaaacagcaatcttccaaagaagattctgatcagacaatgatctctgatttaaagagtttaacttccatctcttataataacaacggaacgactctttctttcataaaacagaatggcaaatggtattatacaaaaaataaaaaatatccgatcactcagtcctctctcgaaagtcttgcttctacatttcaaaaagttgagactgtcagagaacttaaaaatgcagatgctctaagcgactatggtcttgacaagccaacttatacagttagtgtcaaagacaaaactggaaaatccatgacttattatattggaaatgcaaccgatgaaaattactatgtaacttatggagataaatcaaagatttataccgtatcttctgatattacatctagtttatcctattctttagataatctgatcgagacagatactttccctacgttaagtactggaaatcttaaaaaagttttggtcactcagaacggtaagacaaaaacttatactagcaagaagaaaaatcttgatggaatctctggcggtttgggtgtatttacttttggagattgccagaattattatgcgagccagaaagatcttgtaaaatatggactggataaggattctcgaatcacagtcgatatcacttataaggatacggatacgaagaaaacaaaaaatgttgtgctttatatcggtaaaaaagattctgatcaaaagaattattatgtacagatgaaagggtcacatatggtttatttaagtgataaggatgttgtgaagaatatattgaatccatagtttcaatatataaagatataaaaatagagagcaagatgcgaaatgatcaaattcatttccgtaccttgctctctatttttattatttctgtttatacagttcttttattcctgatgcaagcaataacatgattactgcaaaataaaaagaacttcaatcacttgaagtcctttttcatgccgcagaccggaatcgaaccggtactcgatttaactcgaacaggattttaagtcctgcgcgtctgccagttccgccactgcggcttagtggtgggagaaggattcgaaccttcgaaggcggtgccaacagatttacagtctgccccctttggccactcgggaatcccaccaagtgtttacctgacaattaaagattatacggcattgtcaggtaaattgcaagtgtttttttaactttttttatatttttttatgcctgtgtttcaacttccgtttcaggctcaaataatgcttcgaattctgcgcggttaatgcgttctttctctaataataatgcggcacatttgtgaaggacatctatatgttcttcaatcattgctttcgcatctttgtagcatttatttacaatcttcttcacttcctgatcgatcacagtctgtgtgttttctccgtatggacgctgctgtccaatttcttttcctaagaagacttcgtctccttcaccactatcataattgatcagtccgagttcatctgacataccaaacttcgttaccatagctcttgcatactgggttacctgtttgatatcctgtgatgcaccagttgtgatatcatctaagatcaattcttcggcaattcgtcctccgagacttaccatgatatcctgaatcatctttccgcgtgtcataaagacattatcgttctcaggaagcggcatcgtatatccagctgctcctgttcctgttggaataatagatacagtgtaaaccggacctacatctggtaacagatggaataagattgcatgtccagattcatgatatgcagtgatccttctttcactttctggtaccacacgactcttcttctctgttccgattcctactttgataaatgatttatcaatatcttctttcatgatataggctctgtcatctcttgctgcctgaatggctgcctcattcatcagattctcaagatctgctcccacaaaacctgctgttgttcttgcgatctcatgaagatcaacatcatctcctaatggtttttgacgacagtgaatctttaagatatcttctcgccctttgacatctggtcttccaacgccaaccttacggtcaaatcgtcctggtcgtaagatcgctggatctaagatatccacacggtttgtagctgcgatcatgatgattccttcattcactccaaaaccgtccatctcaactaacatctggtttaatgtctgttcacgttcatcatgtccaccaccaagtccagagcctcttcgtcttgcaactgcatcgatctcatcgataaatacgatacaaggagaatgtttcttagcttctgcaaataagtcacgtacacgagctgcaccaacaccgacgaacatttccacgaaatcagatcctgaaatgctgaaaaatggtacattcgcttctcctgcaactgcctttgcaagtaatgtcttacctgttcctggaggtcctacaagaaggacgccctttggaattctggctccgatctttataaatcgtcctggattctttaagaattccacgacttcttctaattcttctttctcttctgtcagtcctgcaacatcgttaaatgttactttcttaccatttggattggcaagtttagcacggctttttccaaaatccatcatcttgccgccaccgccaccattctggcgcatcatcataaccatgaaaaatatgacaactccgattggtagtactaccccgatcagattagagatcatatccccactgtgatcgattcccttaatactgatcttattggcaagagagctgtcagctttcttaatatcattgatcgcctgattgacatctgtaacttcacagctcttataatcatcttttccaaactctgctgtgatcgtcccagttggtacttctttattctgtttaatagttaccgcagttactttgtcagactttacatccttcataaactgctgataggtgtaatcacctgaacctggctggaacacgctgataaaataatatgctccgatcaccaagatcagcaggactactaaaaatccactgttacttttcttcgggttcaacgtttagtctcctctctactcttcctctgctactccaatgtaaggaaggttacgatatttctgtgcataatctagtccatatccaacaacaaattcatctggtacttcaaaaccaatatatctgactggtacttcaacttcacgacgatctggtttgcttaacaatgtacacagatgaagtgacgcaggatttctgctctcaagcattggttttaaatgatttaaagtctttcctgagtcaatgatatcttctacaactaatacttctttatctaagattggctcatctaagtcttttgcgatcttaacgattcctgaggattctctggaatttccataactagacactgacataaaatcaattgttactggaatcgtgattctctttgcaagttcacacgcaaaaaaaacacttccttttaagatggcgatcagatggatttcttttcctgcataatcttcactgatctgcgctcccatctccgcgattcgtttgtttacatcttcctctgaaatcattactctgatattctccattggaatcatctccttctcttttgaactcaagctttaaataacgcttggttgattctttgatcttataatattcgctgattcttctgccaacgatccatacaatatgactgccatctgccaccaatggtatctcttcccgcaattgtcttggaatcttctcatcaataaaatacctgcttaatgattttctcttctgatctttgccaaatgtaaaaaaatctcctggcttccggcatcgtaattgtacacctgtttctattctatcataatcaatgattttgatacaatcattttccacgatatttgtcaaatctgtaacctcttcgcacaaaatttttcctgtcatttcttgtttatctgatatatttcctttttgtaccttaatatactgataatttttctcggcaaccatattatacggaagagaaattcgtttccctgttccattttctaccaaagttaacagatcttcaatatgtcttctttctaaatctttcttcttaccagctgtttcttccaaaactttttttagaacctgtttctggatccaatggttttccaataacaattgatcacaattgatctcaaatccttgtccaataggctttgtacatcttaaaaatgactcttctatctgatctgtcagatacgtcgtcacttctttgatatcttcgcacagccatcctatatgctccaccgcctgctcattgatcatctcaagtcttggaattacctgatttcggatctgatttcttgcaaatgcatcgtcctgattgcttgcatcttctacccaggcctgcccagcctcttttaaatattttacgatttcttctttttttacacataaaagcggacggatcagatttccatctttttctctcatggcacccgccccataaattccagttcctctcaccactcgatataaaaatgtttctgcctgatcgttttgatgatgtgcgatcgcaatcttatcagcattatattttttcattgtttttgcaaatgcatcatatctcgcttttcttcctgcttcttctaatgacatcttttcacgcttggcgatctgttttacatctatttcaaatattttacacagaatcgaaagttgtccacaaagatcctgcacgaacttctgatcatccacagcttctcttcgaatcatgtgattgatgtggactgctgtgatcgtgagattcattgattctcttaattcatttaaaataagtaacagatatacagaatctgcaccgccagaaacaccgataatgatatgatctccattttgtattaaatttttttctttgataaattcttttactttattcatgtaatttactttatcattctttgcagattccttcaatacctgtcccagattcccaataccatgatcgtcatatcatctcttttttcaaattctttgtttgttgtaattcgctcatataatccatctgctattgcctgtggacgtaccacatccatttctttcaaatatcgtgctgccatctccaaaccattttgcgaaaatccgtcgaaagctccatcacttaacatgactaaaatatcttcactttccatctttttgcggtaaattggaattttctcggtatgtaataagaggttcactggtatcgtatctacttgaatgatctccacgtcgttttttctctttaaaagacatgggcaggctccaattttaaagaatgttccgattcctgcaaataaatctaactgaaaaaaatctaatgtcgcatatttttctttttctggttgtaagatcatcatggaccttaaaagctgaacactttgactttcgttaattcctgctcctagaagttcttccatcacttcaattattttcctactttcttttttcgcttcctgtcctgttcccattccatccgagatcatagacacaaaacttccttcccttacttttcccatggaaaaactgtctccattctcatcccctgcgatcattggcgaagtgtggattcctgcgattacatggaatttttcttctggtgtaaatccataaatctcataataatttccgatcatctttttctgatctggcaatggcttcattttctccattgtcatggaacttaacaacactgctgcttgtcttgtgctgatttccctgccttttttctttttcagatatagatagatctgttttcctttctctggattatcgtagaaataaatttcttttagtctcagttggctttttgcaaaaccttttgtgatcttctcatataatttcttattatctgccattaatgatacttttccctgaaagaaatcacccagtgtatttccggctctgatatactgctccccgacaatctttctcagttgtttcatctgatttctcattgcacgcagaaacaattcccgttcataaatctgatttgcttcctcgataaaatcctgtccattcttgcatggatgacatctttttaaatctgcatagcttaatccgccttgcttttcgatgatctgcccaagcctgtccttatctgctaatgtaaactgacatttttgattctcacgacatccgacacattcttttaagatcacactttcaactacatctcttccccgtttttcacacgtttcttcctcatcgttatgatcacagaacatctttcccgctgtcgtgagacattgctgcatctggcgcatatgataaaggatcatttcatgaaaattttgaaataaccggtcttcttcgaattcttttttccttaagatttccataattttccctcctgcgagattattatagagggttttgtatgcaatttctgtcgaaacagaaaatgttattttctggaaattattatcgaaaaaatccgatatttctataagaacaatcctatgactattcttataaaaacatcggattttatatctttattctttactctaccggatgtaaattcttcaaagaaatgtccataataggagctgaatgtgttaaagctccacaggatacataatccactccgatctcacggatcgtctttaggcgttcttttgtaacatttcctgaacactctgtttcagctcttccgtcgatcagtttgacagcttctttcattgtctcatcatccatgttgtctaacatgatgatgtctgctcctgcttctacggcttcttttaccatgtcaagattctctgtctctacttcaatctttctgacaaatggtgcatagtcttttgccatagctaccgcttctttgattccacctgcagcaccgatatggttatcttttaacatgactccatcggataagttgtagcggtgattatgtccaccaccaaccgtcactgcgtatttttcaaatgggcgcatgtttggtgttgtttttcttgtatctaataactttgttttatatccttcaagctctttggataactcgcttgtcattgttgcgattccactcattctctgcaagtagtttaatgcaactctctctccagataaaagggcacggatatctcctttgacaactcccattagctgtcctttggtcactttatctccgtcttttaattctgtctcaaaaacaacagtttcatctaaaagtttgaagactctttcaaatacttctaatccacagatgaccccatcctgtttacagattaaatttacttctccctgttttggttctggcatcactgcgtttgtactgacatcttcctgagtgatatcttcttttaatgcattcatcaaatattcatcgatgttaattctcatcgttacaccactgatcataaaaacttctgtcctttcgtttaatttcgtcaagaacaagctgttcattctctttctcacgctgttcttcgttctgatacttacttaaatctacttcgactgtctcggcttttgatggatgttctgtgatgtctttcgctgctgccttggcaaatacaagtgcttccaataatgaattacttgccagacggttctttccatgaaccccattacagcttgtctcaccgactgcatataaatggttcatagatgtcttgctgtctaagtttactttaattccacccataaaatagtgctgtgccggtgttactggaatcggttcttttgtcatgtcatatccttcatccaagcactgtttgtagatgtttgggaatctatgtttgattctttctccatctaaatgtgtaacagataaataaacatgatcacttccgtctttcttcatctgtttgcagatttctccagttacaacgtctcttggttttaactcatctgtaaaacgttctccatctttattcagcaggtaagctccctctcctctgactgattcagagattaagaatcttcttcctggtttctttgaataaaatgttgttggatggatctggatatagttaatattctctaattcaacattatggcgcaggcagatagccagactgtctgctgtcagatgtctgaagtttgtagaatgtttaaataaccctccaagtcctcctgttgcaagaacagtatccggagcttcgatcgtatctaaattaccatctgcatctttatatacaattcctttacattctccgtctttctcaatgatatcgatcatcgtacaattttccatgatcgtaatattatcacgtttcttcgcctcttcgtataaatggcttgtgatctcttttcctgtcagatcttcatgatgaagaatacggaatgtggaatgtccaccttctcttgtaaactcgatctctccatccttcagatcaaatcttacaccaaaatctttcagatcctgaatgatctgtggtgattctttgatcatcttctcgacggcacctttatcattctcgtaatgtccggccttcatagtgtcctcgaaatatgaatcataatcttctggattcttcagcgctgagattcctccctgcgccaaaaatgaatcactttcttcaacttccttttttgtaataacgattactttgtaatcctgtggaagaaataatgcattaaatagtcctgaagcaccacttcctacaatgatcacatctgctgttttcataattctctttgcccttccttggaactttcctgtcttactgtgcgattcttaacatctcatctaatgctttcttagcatttaatcgcaaatcttctggtaactctacctgattcttcatgtctcttaatgtgtctcttacattctctaagctgatacgcttcatatttggacagaactgacggtgtcctacagagtagaatgtctttcctgggttcttctgttttaattcatataaaacacccatctctgtacaaatgataaatacgtccttgtcagatgctgtcgcatagtcaatgattcctgatgtacttcctacataatcacctaaagctacaacgtctggtgtacattctggatgtactaaaacttctgcttctggatgtacttctttggctttctttacgttctcggctgtgatacttctatgtacatgacagaatccgtcattgtaaataaagttcttctctggaagtttgcttccgatataacgtccgaggttctcatctggtacgaagaaaatattcttctgtggaagtgctgttacaactttcagagcattggatgaagttacacagacatcagaatgtgctttgatctctgctgtagaattaatgtaacagacaacagcaagatcatcatatttcttacgcatctcttcaatcttctctacatcgaccatatgagccattgggcagtctgccttctgatctggcatgatcactgtacggtctgggtttaagatcttggcactctcacccataaagtttacacctgcaaaacagatcacatctttggattcttttaatgcaactttggcaagataataagaatccccaacataatcagcaatttcctgaacggcatcgtctacataataatgtgctagtaaaacagcatttttttcttgttttaattgttcgatctctttttttaaattttccatctttctctccttgttattaaacttaaatataccacggccacccgttgtgttcaagtatttgtgatgtttttatatgataaataccagtgattttacctctttttcagatgcttcaatcactggtattattataaattctatttattttatatggtcactatatattttcatatgcatttgctgttttcgtccgatcatatcttgtacattgtctcgtaattattttttcacatagcatgtgttctttcctctgcctctctgcatgatcaatccttttttaaccatctgcttcaaaatccttccactcgttgtctgactgattcctaatctttcctgaacttgttttctttgaattcttttttcttgatcgatcatttgcatgatctgtgtttcttcgtcttctggttgtatatgtgtatggtattgcagttcttctcttaattctgcctgtgcatttgtgtttggtaatatgatcttaaatacattattactgactttgatctctggttttataaactgatcttgataagcattcatgatcttttgtattcctgttccataagcttcgatcaattctaaacggtaaaaaacattcgctaatcttttattcctgcatacagaaatccccatcatcacatcttctaatgtaactcctgttaccaatcccccaatggatgtgaattctaaccgatcttcgtacatactgatcagaatactagaactatatccgtaatctctgtgtacaagacagtttagcaatgcttctcttactgctacttctggataatctctattatcaattcgataaagtttttcaaaagttgaatgtgtttgatttctgaagtcaatgtaatcatatactgcttccatttgtgcaaatagtgatcctgtaaattcttttctatctttaaatatattttgattctttccttcaaaaactgctgttttaatcgtatgcacgcattggtctgaaagtaataaagcaagattcgtataaattccatcttggtttataattcctaaagttttcatctgtggctgttctaatgtgatgtttctcttttggaattctttttttgtttcgcaaaaagtcaattcttgatctaatgatctcatatcttcaaaatgatcaccatctgtttctttaatcatctttctaatagctgtatccgttgctgggacagaagaatatccttgtcttacatatacgccttctggtcttaaccctttcttcgctatatagtatgggcgttctgttcctctttgaatatctatgatcacaacttgtttttgttctatctcttttgtctcataatgcaagaacatggttaaatctggtttaatcgcatctctaaccatattgcttacttgcaatgctacactgtctgaatcttctaccccgataactgtcccatcatcttcaattccaatatagatttttcctccatcacaattggcaaatgctatgatttctttcttgatgtctgtgactacaatggatttgaattccgttctctcagattcttgtaacttcatgaaaaaccctccttgaaattattctgtctgttctttctaactttattctaaccattctaaccattcttgtcaattataaatcacagtgtttgtatgctgtatagtggtttgaatcacgtaaattatttgaatattataaaaagcgatcatgtgtcggcaaccgtacggacacgtctgcacttagctcctggatggtcattagaccattcaggagcttagtacagctacgtgggagtccgaatgcgagtgggttgcaggcacataatcgctttttataatattccaccaatactttccgttattcaaatcagaatttaatagttttcttcatgcacttcaaaatagctctgtggatgtgcacaaacaggacatacttccggtgcttttgttccaactacgatatgtccacaattacgacattcccatactttcacttcacttttttcaaatacttgtgaagtctcgatattcttaagaagtgcacggtatctttcttcatgatgtttctcaatctctccaactgctctgaatttggcagcaagttctggaaaaccttcttcttctgcggtctttgcaaaaccttcatacatatctgtccattcgtaattttcaccttcagctgctgcagcaagattttcctttgtatctccgattcctgctaattctttaaaccacattttggcatgttctttctcattatttgccgtcttaaggaacaatgcagacatctgctcatatccttctttctttgcaacggatgcaaaataagtgtacttatttcttgcctgtgattctcctgaaaatgcttctaataaattcttctctgtctgtgttcctacatatctattacttcccatgattcttctccttactgattcctttacaatcactttatatatttccctagaaattgataatttctatacttcagatttccataatccatgcagattacaatactcatatgctgctatgaattcatctccatcggctaacataaataccgcctctggtttatcccctggtgcaaatttatgcagctgcccaccattctttgtttcaatatatactcccataatataatgttctggaagcattggatgctctacggaagatacagctactgtgatcttattttcttcctgtgtcacaactggtaaatgtttttctactgcagcatctgttgtgtttgcttttaaacttttcaaattctctatggaacttcctgctccaaatacttctaataatactgttttgtcttctgaacgataaaatttagccataacttcttctcccttctactacaatatatctataaaaattattcttttgaaaattgatctttccctacaaaacataatggacattcaaaatcttctggaacatcttcccattttgttcctggagcgattcctccttctggatatcctttttcttcatcatattcccatccacatacatcacatacgtatttcattgtttcatcctccttatacttaaatcgataataattactgttattatatttatataataatacatgtgagaaaaaatgtcaataatattttttagaatttgaatagtgatatttctttctatgaattatgtccaatttttgttataattaattcatacttattgacacgccgggtacatcagagcgtgacaaaatttacttttgatactctcatcattaatatacaaagttactgaacatttactcaataagggaggtggcaattatggaggataagattacaaaaatatttaacgcagctgaccagattcaggctgagatgattcatgatcatttaaaacaaaacggaattgaaaccatgtccaaacaacctggaacaggagaatatatgagtattgcaatggggtattctgtttatggaacggatatttatgttagagaagatcagaaagctaaggcagaagctttgatcaatgaactgttatacgataatgactacaatacattcgaagatgaagatatcaaattgccttggtggcaaaataaagtgattgcagcaaaatgcattttaggattttttattcttgtgatcattatcatgatcgcaatgcagattctgcaataaaatcataaatttaagaaagaacaggtatgctttagaattccttgaaatccttatgcatacctgttctttgttgttgttcattatttatatttagtttatagttaccttatagttaatcaaatttctgaaatacacccttaagtgctggataaatttctctaaactgctggtacttcgcctcatacttcgcaacaagcttgtcatcaggttccaccgtatccacaactttcacaagctgatctgctgcttcctgtacgctgtcgtattctccacatccaacggctgcaagcatcgctcctccatatcctgggccttcttcgctttc

SEQ ID NO: 699 - DNA, 3857 bp, Unknown
  gut microbiota DNA sequence
ctggatcttggagcgaatgattatctcacaaaaccatttgcggcaaaagaattgttggcaagaatccgtaccatgatcagaacgcagacaacacaaacagaatcaattttgtatgtcggaaatatcacattaaacagagcgacttttgaactgacatcaccaacaggaagttttcgtcttgcgaataaggaatttcagatgatggagatgtttttatgtaatcagggccacagtatcacgcacaaacgtctgttggaaaaaatctggggagatgaaaaacaggtacagacgaacgttgtatggatgtacatttcttatcttagaaagaaattagaagcactccacgcaaatcttcagattacagaggcaagtcacgcagaatatattttggaggtgggaggatgatccgaaaacttcgaataaaatttatagcgatttccatgacatcaacgatcattgtattatttctgattcttggatcgatcaatttgctgaattatcgggagatgagtcataatgcagatacgatcttagatttcctgaaagagaatgatggagaattgccagaaaatctctataaatctcaacataaaaagacaaatggaatatcaccagaaacttcctttgagtcccgctatttttctgtatttttgagcaataacagacagatatgtgaagcggataccgataatatctcagcgatcgatgaagaaacagcgattaaatatgcacaaaaaatcaatagaagtaacaagaactgtggattcatttcaaaatacagatatatgaaagaaaatacttcaaacggagtaaaaatatattttctggattgtacaaaatccatgatgtcatttcagacttttcttgtcactagcttttttgtttctatttttggtgttagcaccgtttttattttggtggtgttgctttcaaaacgggcaattgagccagtggcagaaagctatgaaaaacaaaaacgctttatcacagatgcaggacatgagatcaagacaccgcttacgatcattgatgcagatacatcgatcttagagatggaatacggagagaatgaatggcttgatgatattcaggtacagacaaagcggcttgcaggtcttacaaatgatctgatctatttgtcacggatggaagaaaaacagacaaaaacaacgatgatcgaattcccattttcggaagtaatatcagaagaagctcagtcatttcaaggacttgccaaggtcaaaggaaaaaattttatggtagatattgaaccgatgttgtcacttaaaggagatgaaaaaacaatccggcagctaatctccattttgctggacaacgcggtcaaatattgtaccgagcagggacagatcagactgacagctgcacataaagggaaaaatattattttatctatatacaatacctcacagccactgacaaaagaaaatattgatcatttatttgaccggttttacagaacggatgaatcaagaaattccaagaccggcggttatggcattggcttatcggtcgcaaaagctgtggttgaagcacatcatgggaagatcgtggcatcaagtgaagatgggaactctcttttgatcacggttatcttaaagatatgaaaaacaggaggatttatgacatacgaagagttttataaagaacagtatccggttttattaaaagcagaagaacaattgaagaatctgatcacccagtttgaaacaaacgaaaataagaaaaagatcgcatactgcagctctagaatcaaaagtccggaaagcatgaagcagaaactcttgaaaaagggggaagaaccaaatgctgaaaatgcggtttcaaaagtaaatgatgcagtaggaatccgtgtgatcacatcatttgtagatgatatttacaaagtatcagattggattactttacagaatgatatagaagtggttaacatcaaagattacattgcatatccaaagccaaatggatatcgaagctatcatatgatcattcatctgaatgacctgagcttaaatgcagagattcagatccgcacgatcgcgctggatttctgggcaaatcttgaacaccagatgaagtataagaaaaatattaaggacgaaataataatccgctccgaattaaaacgatgtgcggacgagatcgcatcgattgacttgttcatgcagacaatcaaagatttgattcaaaacgatgaaaaatgttgcaaataggtacatttttcataagaatttatgaaaaaaatattacgaaatggtttacatatgaaaaatgaggtagtaaactagaagtagtcggtaaaaaatggaactaaagggaggaaatatgaagagaaagactactggaatcctcatttcctgtgtagtaagtatatgttgtatggtggtcttatccatgagttcacatacacatgatgtatatgcttcctattcaagatatgtaacagccaataacgtagtggttcgtaaaaaagcatcaaataagggaaagatcgttggatcatacaagaaagcagcaaaggttcgctgctacaagaagaaaagatcttatacgaagatcaaatatggaagatattatcgatatatcgcaacaagatatctgtcaaagaagaaaccagttgttgtaacagcacagaaagcagcgaatataacaacagatacatatacaagatatgtaacggcaagttctttgacgatccgtaagaaagcgtcgacaagtgcagcaaaggcaggatcatacaagaaaggtacgcagatcacctgttatggagaacggtctggatggacaacggtaagatatagtggagtttattgttatgtaagttcacagtatctatctgagtcaaaaccggaagaagatacatgggaagtttatggaacggcaacaggacaaagtgttgtagactacgcaatgcagtttagaggcaatccttatgtatggggtggagaaagccttacgaatggagttgactgttctggattcacgatgcaggtatataaacattttggatattcactgccacacagttcaacagcacagagatatgaaggaacagcagtatcatggaatgagaagcagccaggagatctgatctgctatcaggtagtgaacggtgtaggacatgtagcgatctacattggagataaccagatcattcatgcaggaagcaaagacacaggaatcaatgtgcggaatgctgattacagagctgtatggggtgtcagaagaatcgttcagtaggacaagcattttaatttaatatgagataagaataaaacagccgtatcgatcatgatacggctgtttttctatacttataaaacggcatatttcaggatgaataatactgcaagtacgtacattaaaggagtgatcttctttgctttaccacaaactacattcaagatcacataagagatgatcccgatagagattccctcagagatactatagaataatggcattgcaatgatgcaaaggtaagcaggtacggcttctgtcatattgtcatctgtaaatttgatatcagagattgctccaaacattaagaacccaaccatgatcagcgcaggggctgtcgcaaatgatgggattgctgtaaagagcggtgcaaataatgttgagatcaggaataagaatcctgaaacaacagctgttaaaccagtacgtccacctgcagcaacaccagaagaagattcaacgaatgttgtaacagtagaagtaccaagaaccgcaccagctgttgtagcaacggcgtctgccattaatgcaggtttgattccaggaagtttaccttcctcgttaagcattccggcttttgtgctgacaccgactaaagt

SEQ ID NO: 700 - DNA, 701 bp, Unknown
  gut microbiota DNA sequence
ccagtttatccatcgccattgccatcagtgcaacagacatctgttctccaatggtaaagagcatatccatctctcttttcggcggcttctcattgacatcctttgccatagtgatcagttcatccgtatatttccccattgcggacagaacgacaaccacgtcatttccttttctgtactcttctatacagcggttggcaacattaaagatacgttctttatttgcaaccgatgtaccgccaaatttcttgacaatcaacattgttttacttcctccataataagtttacaggaaagagaagattctcatatcttccctttcctgttctgtttacagtaatcactgtacaaatatttatctgaagtattgtatcagtgtccaccttatcaggcacactatatgatacacgaaatctgtcagtttatcaatctttaactcgaatctttgcaagtacctgatctccgatctgagccagtttctcttcaaatgctccctgtgtcatttcatcagtgataaatgcacattcctgcggaagctgtcccaggctgatgatctcaacatcaccaaataccttcttcgcttcttctgctgcttcttttttaattctcacaaaaaatcttcctgtcacttcatccagtggtttcagtactgccggagtgctgttccagtttgtcacaatgttaacatggagatgttttgc

SEQ ID NO: 701 - DNA, 41222 bp, Unknown
  gut microbiota DNA sequence
ctcataaacaaatcctccatataatatttataatttattctaccaataaaaattataaaatccaacatatatttataattttttataagattattttaacagttaaacacctccttgtcatatctttatatttccctcattctccaacagacaaaatgtctcatagcctcccggctcccctcattcttatgacaggctgcactcacctccatgaccatgcagaagtctcattatcatatccttgttcgctccctgtgctcttcgtggtatcataaaagaacctcaatcctattgttcatggcataaaattcattgcccgcagatcatggcggaatatgtcctcccggactgtgccggaaaatggtcttattcaattgtcagcttcccttggattcatcatcattcgatcatcatatgtcgtgaatggatttgtcagatctgattgatctcatcttagatttatcttgttgatatgtttttagaattatctgatattgtattctcttccatttattccctatcttggtttatcataacattttcgtataaaaaaagcaacccattttcttccatgggttgcttttttatgattcattagattccaagaatcttcttcacttcgtcttccattgctgctgtctcacataccgtatcatgaagaactggtgcagttctgatctcttcgatcgcttttggaattgctgtcttagatactttgttaagttcatcaactaattcaaagtcatcttctgcatcgtatgctggatcgatcgcatccataacacttcttgtgaatttgtatggacttgctgtagaagcgatcactgttggagttttgtcatctcctgtcgctgctttgtatttgtcatatgcaactgctgcgactgctgtatgtgtatccatcacatatccttctttgtcatagacttctttgatcttcactgctgtttcttcttcacttccgaaagctccaaagaactcagataattctgctttcatggcatctgtgatcacatattcaccgtcttttgtcaatgctgccataaatttggcacactgttttgcatcatttcctgcgattctatagatcatacgctctaagttacttgagatcagaatatccatagatggagatgttgtaacatagaattctctgttacgatcgtattttcctgtctcaaagaaatcaaataatactttattcttattagatgcgcagacaaatttgccgattggaatacccatctgttttgcataataagaagctagaatattaccaaagtttcctgttggaacgactacattcataggttccccggcctttaatgcaccctgttttaataaatcagcataagcctttacataatatacaacctgtggcactaaacgtccgatgttgattgagtttgcagatgagaactggaatccgttgtcattcatcactttcgctaactctttgttagagaacatcttcttaacacctgtctgagcatcatcaaagtttcctttgattccgatcacgtatgtattgtcacccttctgtgttaccatctgtttttcctgaattgggctgactccagactttggatagaatacgatgatctttgttcccggtacatctgcaaatcctgctaaagccgcttttcctgtgtctccggatgttgctgttaagatcacgatctcattctttacattattctttcttgctgatgttacaagtaaatgtggcagaatagataatgccatatctttaaatgcgatggttgctccatggaataattccagataatatgctccatctactttctttgtcactgcgatctcttctgtatcgaatttgctgtcatatgcattattaatgcatgtctttaattcttcttctgtaaaatctgtaaggaattctttcatgactgcataagcaatttcctgataggacatctgtgtcagatcttccaacgatacatttaattttggaatgctgtctggtacaaataatcctccatcgcttgttaatccttttaaaatagcttcagaggcggttgctgtttcttcactatttcttgtactgtggtatactaaattcatatttccctaccttttcttctattaaatatacgtgtttctgttggtttttgattatatcatatgttgttcctgtctacaactgattttcatgaactatatcctatacaattacaaatgtcagcatgagacggacaccactgatcaatgctttttcatcaaaatcaaactttccatgatggtttgcagggtggtcgccgccaccgataaatgcaaaacatccatccatttcttccagataatttgcaaaatcttctcctaacatcattgcttcaacatgggtaaactctgacggatcaaagacttcccctgctttctccatgacatcttctacaacacccggatcattgatcagtgccccatggcttgattgttgaaaatcaaccgaaacatctactccatacatctgttcatgggctttcgcgatctctttgactctgcgctcgatcatctcctgagcttgtctggaaaatgttcttgcagtcccttcgatctttgcttcccctgcgatcacatttctcgctgtcccggcttcgacctttccgatcgttaaaactgctggatctaatggatttaaattcctgctgatgatgctctgaaaattcataaccatggaagatactgccactgcagtatcaatcccttcatgtggtttccctgcatgtcctgatcttccgtataaatgaactgccagccagtttgtcgctgccattcttgggcctgcttccagtgaaatcttgccagacggtataccgttaaaaatatggactccataaatgcgtttcacactgtccaaaactcctgtcttcaacatgaatctggctccttctgcggtttcttccgcaggctgaaatacaagatatactctgcggtcaagttctgattcatgtttcttcaatatctttgctgttgcaagtaagattgctgtgtgtccatcatgtccacatgcatgcatacatccgtgattcaaagatgcaaaatcaagtcctgtctcttcctgtacttccagtgcgtccatatctgcccttaatgcgatcgtttctttcttgccattgccaacaactgcaatgattcctgatggatcaaaaatcttataagaaatctcccattcttccagatgttctctgatatattccatcgtcatcgtttcatgaaatgctatctcaggacaacggtgcagtgctcttcgaaattcgaccacttcttcctgtatcgcatatgcttcttcatttatatccatattgattcctttctttgtttccttaccttcctgtgatcttcatgatcaaagctacgatcacaccgataatgatcacggggcctaacacaaccatcattgcactaaatacatgaaatagtaaataaatgataaaaataaatatgatcactgacagtagacatccaagtttgaactttgtagaattcatcgtaaaaatatgtgtgttaccaccaaacatatcttctggtgttccttcatcctgttcctcttcgtaatactctgtctgtacatagtcatcatcctcacctttggcatcaatgatcgatctggcgatcagtctcggacttcctaattcattcaatacatcctgttcgttctttccatttcggatctgctcattgatataatcctcatagtaattcatgttctcctgaatcactgcctgtgataccattccctctaaggaagatcttaactcctccataaattgtctttttgtcatatatcattctccatctttattgtagaaaatctctgattcctttaatacatggcagacaccatcttcaatctggatcgttgtcacaccacagttttcctgtcttggcgcatgccagtattccttaatctctctctgataaatatatgtaagtaaactgtggatccatgctccatgagaaaatactgctatatgttgatattttttctcatttggcaagatcatatcattgaaaaaatcagatgatcttgcgatcacctcttcgtgtgtctcacatccttcaatttttttaaattcttctggcgcatcaaagaatttgagaaatggatcctgtctttctctcaattcctttaacgttgcaccctcaaacgatccaaaacacgcttcttgaacccgtttatcttcatatagcggaatattcctgcctccaagaatgatctctgctgtttccttcgcacgtttcaacggactggtatatgcgatatcaaatggaatatgtctaagaccttctcgcgtaataaatgccaattctcttccatattcattcaattcgatgtctgaacttccctgaatcttaaattccttgttccaatctgtttctccatgtctgatcaaatataatttcaaaccaagcacctccaatttaccaatagcataccttattttttaaatcgagtccagtctttcttccttatgcaattttttgtaaaaatgtgaaaaaactatggaatttttaacgaactttgctatactaaagatatacatataaactaaaattttaggagagaaaattatgaacattcatgttggagacgaaatcgaattaacagaagaagtagttccagaaaacactgctgagaaatggggaagcggaagccttcctgtttatgccacacctgccatgatctctttgatcgagcagtctgcagttaatctactggctggaaaacttgatgaaggacagactactgttggaacaaatttaaacattgcgcatgtttccgcaacaccagttggtggaacgatcaaatgtcattgttccttaacagagatcgaccgcaaacgtctggtattccatgtagaagtaactgataacaaaggacgtgttggaatcggtactcacgaaagattcatcgttgccagtgaaccttttatggaaaaagcagctaaaaaattagaagattaatttttaactctgtgtacgcaaaaggtgccggaattcttattccgacacctttttcttatcttcttatctgtttgttccctttaagattggagaaatcttcttgtaaataaagaatgtgatcacaacactgcacattcctttgataaatgtaaatggcatattaaaccagatcaatgcatcccataatgtctttacattcttgttgatcgcctgatatgctccaagaattgcctgcattggcatgaagtttgtgtatactggatatacaacaaagtagtttgaaaatacactgactactgacatcaggactgctcctgctaatgctccgatcattgcactcttctgtgttttctttctcttataaataagtcctgctggtaatacaaagcatacacctaagataaagttagataattctccgactccacctgtctgtgtatgaagaagattgatcgcattcttgataaagcatactgcaattccagataccggtcccatcgcatatgctgccagtaatgctggaagttctgaaaagtcaaacttgataaatggtggtatcaacattggaattggaaattccaaaaacatcagcacagttgctaatgctcctaacatacctgtcactgcgatcgttctgatattgaacttcgttctcttcattgtcattgtgtctcctgccatgataattctccctttctgatttaaaatcttagatttatagggtctccctataaattaaaaaatcctgtccatttatctacataaacgacagggcttctgacttgatcacatatcttctatctgcataacatcttaagatatgtcatccaattacttctttcatccagactatactgttggttcaggattctaacctgatcggccaaacgctcgcggacttgcctctcttggagtatcaccgccagtcgagaattgatactttcgtatctcactctgccctgaagttggagaatcaatcttctctacttcaatattcaattaccagaaaatgaaagtgtttcctgtttataaattttattataataactcctgtctgttttgtaaagtcccatttcacatttccttatctttacacaaagattattatttgttaaaatatacacaagcaaatttgctttattgtatgaattgttaaggagaaaacaactatgggaatgcacaaaatcgctaaaatgccttctccagaggaactaaaagaagagatgcctctgagtgaagaagcaaaacaaatcaaagctgcaagagacaaagaaatccgtgatgtattcacaggcgcatctgataaattcttagttatcatcgggccatgttctgcagataatgaaactgctgttatggattatctcggacgtttagcaagagttcagaaagatcttgctgataagttactgatcatccctcgtatttatacaaacaaacctcgtacaacaggtgacggatacaaaggtatggttcatcagccagaccctgagaaagcaccagatatggctagtggacttcgttctgtccgcaaacttcatatggaagcattagaagaattccatatgcctgctgcagacgaaatgctttatccaggaaactggccatatatggaagatcttttatcttatgttgccgttggagctcgttctgtagagaaccagcagcatcgtttaacagttagtggatttgatattcctgccggaatgaagaacccaactggtggtgacttaactgttatgatgaactctatcacagctggacagcaccagcatgatttcattgcaaatggatatgaagtcaagacagatggtaaccctctgacacatgccatcttgcgtggatctgtcaaccgtcatggaaacaatattccaaactaccattatgaagatctgactcgtgttgcttatatgtacgagaaattccagttaaagaaccctgctgttatcgttgatgcaaaccactctaactctgggaaacaatgggatcagcagcctcgtatcgtacaggaagttcttcacagcagaagtttcttacctgagatcaaatctcttgttaagggtatcatgatcgaaagttatatcgaagatggcaaccagtccatcggtaacggtgtatatggacagtctatcactgatccttgtcttggatgggacaaatctgctgctctgctttaccgcatggcagattatatatagaaacatagaagatcctagatatatcacttccaaaggttcaggattcctgacatgatcgacggattgatgaaactttccaggatgcatcccagtattataaatgttatttcaaaccaaatactgaaacgaaataagaaggaatgtctctgttcatagagcatttcttcttttttttgggcataaaagtttcgcttgatcagcaacagcaaggtgatcacataacagataaaatgtggaaataaactcataaatacaagaaccagtcctttgatgcccatttgcacgatctgcaaagataacatggatccaaagaaaaatgccatacaaaatgcaaaactgtataaaaaaatccaaggttgcaaaagatatgcccccagataaataaatgcatattgttttccccttttaaacaaaatataaaaaaacagactaatacttgctttatatagatccgtattatttaaaaccagtgatcttacggtacctccatatgcgagataatcctggtatacaaaattcgtaaatacactcccaaagattaacccaatgatgatccataatcctgaaaagaatttctctttttccacaattttttcctcctgtcatatcttatgcagtgcctgtcttttatattctgttttcctgatctagtcttttatttctctatattcagatatccaagaactcctgaaattgtttttgcatcaatgatctttccagaaaagatcatatctttgatctcatcgattgtatattcttctacatcgataaattcatcctcatccaaatgctgtttagacagctttagatcagttgcaacataaatcggaatcttttcatcacagaaaccgatggctgtgatcacagtcattaggtgggtcatttttccagcaataaaacctgtttcttcttcaatctctcttgtgacacactccagaggtgtttccccgggttcaattccacctgccgggatttccagtgtttcctgatcaagggcattacggtattgtcttacaagtaagatcgttcctttgtctgtaacaggaacaacagctgctgcccctttatgtttgaccagatcccatgtgacaactttgccgcttggaagttttacaatatcctcataaaatccaacaacttttccctgatgtatcagatgttgttctagtttctcgtatcctttcataaaaaatctcctttatttatacttttgacactcacgttataaattggaaaaagcgatagatttctctatcgcttcttgttatttcgcatagtcaacaactcgtgactctctgatcacattgaccttgatctgtcctggataatccagattctcttcgatctggtttgagatatctctcgccagtaagatcatatcatcgtcactgatttgttcaggaactaccataactcgaatttctcgacctgcctgaattgcaaaagttttatcaacaccctggaaggagtctgcgatctcttccaactgttttaatcttgttgtataactttccagtgtctcgcttcttgcacctggacgtgctgctgagattgcatcagctgcctgtaccagacatgcgatcaatgattctggctcttcatccccatgatgagatgccactgcattgatgacaattggattctccttatacttcttacacagattcacaccaagttctacgtgagaaccttctacttcgtggtcgatggatttaccaatgtcatgaagcagacctgctctcttggccattctcacatcgacaccgatctctgctgctaaaagtccggataactgagcaacttccatggaatgctttaacgcattctgtccatagcttgtacggaacttcattcttccaagaagtctgacaagttctggatggattccatgaaccccaagttctaatgttgctgcttccccttcttcgcgcatcatagtttcgacttcttttgtagctttctcaaccatctcctcgatgcgtgctggatggattcttccatccacgatcaatttctctaaagcgattcttgcgatctcgcgtcgaaccggattaaagcttgacagtacaacagcttccggtgtatcatcgatgatcaattcaactcccgtagcgttctcaatggaacggatattacgtccttcacgaccgatgatccttcctttcatctcatcgtttggaagctgtaccagcgaaatcgttgtctctgccacatgatcaactgcacacttctgaattgcagttaccacatattccttggctttctttcgggcatcttctttcgctcttgtctccatttctttgacatacattgctgtctcgtgtttcacatcttcttttactgctgataataattgctcttttgcctgatcagaggtcaacccagaaattctttccagttcctgtagatgttttgcctgcagttcctgcaactgagctttctctgtatcgatgttcttttctttggctgttaatgactgttctttgcgttccagcacggttgctttcttctcgacagtctcttccttagaaagaactctctgctcatacttctgcagttctgccctgcgttcttttgtctctttttcgaagtcatgtctcgcttttatagtttcttcttttacttccaaagaagcttcacgtttcttcgcatctgctgctttgattgcttcatctataatctctcttgctttatcttctgcattcccgatcgtaatttccattgccttcttgcttcttgtattcgctacataggcagataccggaactgcgataaccagagttgcgataatggctataataataccaaccacaggtttcctccttattcaattttttgtgtattcacactcatttaattttatatgtttttaacataaaagtcaaggaagggatacctcttctgttcgaattatcattgctgtttttccttggatcgtaagtcccccgccaaaatcaacggaatctcctgtgatcagatcaatcccgcatcctgcctgagcatcaaaatgtgctgtaaattcgccatcaccacagttcattgcaaaaatgatgcggtcttcattcgttcttctctggaatacaagaacatctggtgcgatcgctaattgtaagtaatcaccgtattttaaagctggtgatccagctcttacttttgccaattgtgcaatatagtttgttaattcattttctactaaatcttctttatggattcttggacgcaggctgtcatcacttccctgttctttctttccttccattccccattcacttccatagtaaacacccggaactcctggcatcgcaaattccattgcgtagatcaatggtaaatgctctttatcctctaactgacttgcgattctctccacatcatggttatctacaaaattatataatggaagtcctttgtacaacgtccattcttctggtccaaactgacggtttagggaatatccgatctcatgcatattgtgtgtattgaaacttgaatacaaacctttataacattcataatttgtcacagaatccaacagctctggattcacaagctgtgtgtaatcaccatgaagcatttctccgatcatcaaaaattctggtttcttgctgtgaacaaagtcaaccaacactttcatgaaattgcggtttaacatataagcaacatccagtcttaatccatcaatccctaatttatcgatccatattccgacagattctaataaataatttctaacctgttcgttgtcaagatttaatttgaccagttcaaaatgtccttcccatccttcgtaccagaatccatcatcatagcagctattcccatcaaaattaatatagaaccaatctttatatggagaatcccatttcttttctctcacatcttcaaatgcaaagaactctcttccgacatgattaaataccccgtctaagatcacctggattccttcttcatgcatggcatcacacatctttttaaagtcttcattggttccaagtctctcatcgatcttctgataatcttttgtatcatatccatgatcactggatgaaaatacaggtgaaaaatatactgcattcattcctaattttttaatatgtggaatccagtctatcatctcgagaattccatgagatggctgcccatctgttaatgctcttagtggaaacacttgataaatcattaattcgttcattttcatagtctcttttcctttctgtcactctgtgctttttaacgattcaaccatgtcgatcttcttcaattggaaatacacgaaggcatttacaagaatcgaaaaagcgattgttagtaaaatactgtaaatatagctttgcacataaatctgccttccaaacatgatcaagtcaacttctgttgtgaagattacgtatttgtgtaaaataattcctaaaataattcctgcgatcgttccaaggatcgttaaaaggatattctctcgatacacatacgctccgacttcaccgtcatagaatccaagaactttgatcgttgcaagttccattctacgctcggaaatgttaatgttatttaagttatataataccacaaatgcaagaagtcctgcagatacgatcagaacaaccaccacaatatttaagttattgaccatatctgacattgtcttctcatcgtcggcacaaaaatgcagtgttgaggcttcatctcttgcaagaatctgttttccattttcctgcatctttttcttagatatattcttttcaatacaatatatacctgtcgtttgtgcttttttatgatacagtttctcataaagttttggtgtcatgtagactttatgctgcatgtaattttctgtgatctgacttatttttgctgtgatctgtttatctccagaccgttggatcttgatcgaatctccttttttcacaccaagcagggacgctgccttttctgttaagatgatcccatcatcatctaactgatactttgttttactctttcgatcctgaaggctgatatagccattcagatcttttttggacattggctggatcatcgttgcatcctgttttttcccattagcacggatcgtcactgcagattcgcttacttctatcaaatctgtcatatgttcttgtttctttgcatactgaatcagatcttctttctttgtctcgctgatcccgtctttgtgtgtgatcgagaaatcataagtaatgatctccccatactgcttttctgagattgccgaaatcgaatctttgattccaaatcctaagagtaataatgccatacatccaccgattccaaagatcgtcataaagaatctcttcttgtagcggaagaggtttcgcatcgttgctttccagataaaacttaatcgtttccagataaatggaatccgttctaacaaaatcctttttccttcttttggagcaactggacgcatcagctgtgcaggtttttctcttaattctttataacatgcagataatactgctaaaacaacaactccaaccgccagtccacctgccatcacagaatattcgatctctaatggcgtatagacatctcccagtcctgtatacatcattttataagcgttaatgatgatccatggaagcagtttttcaccgatcactgcccctagaatacttccactaagcgttgctgcgagggcataggtcacatatttcattgcaatatgaactccactgtatcccaatgctttcatcataccgatctgtgttctctgctcttcaaccatacgtgtcatcgctgttaagcttaccagtgctgcaactaagaaaaagatgaccggtaccactcgtcctaacgctgcaattctgtctgcttcctgtccgtattccacataagactgcatcttctcacggtttaagacataccatttccctttcttgatatccttaacatcctgtctggcatctgcaatcttctgctcggcttccttgaatttcttttctgctttctttcttgatctctttaatttttgctccccggatgaaagttttgattctgcttttgcaatctttttttctccggaggtgatctgttttcttgctgatactaattttgcttcatttgttttgatcgtttgctttgctttctttagctcgctgcttttttgatccaagattgtttcagcctttgcaatctttgtctttgccctgctgatctgttttttccctgcattgatcttgcttcttgctgtcttgatctgttcttttcctgcattaatctgtgctaaggaagctttcgcttcttcctgtgagatcattccagcctgcatggcaccctgaatctgctgttcttttgtctgtaagttcttctcctgtgtctttagctttgcctcctgtgtttttaattctttgctttttgaccgaattgtttgtttctgtgtctttaactgctttctggcattctgaatctgtctgatccctgactgatactgagcttttgcattcttaatctgctgctctccatcagagatctctttcttgcttttcgctaattttactttggaatctttgatcttttgtctggacttctttagctttttctcggcctgatctagtttcttatatgctttttttcgttcttttttgaatttcttttctttcttgtcgatcttctcttcggcttctttctgaacagatcttaaccgtttctcattttctattttggaaatatctttgatctcttcttccagctgttttactttgtttttgtaagcatcactgtaagctctctcttgcttcgctcccttcgcagtcagataaacttctgtatagatatctgaggaaaattctgatggttgcaccacaataaagcctgacaacgttcccgttccaatgccagtgcttcctctggatcttgaaagatattctgatgaacttccgattcctgtgatcttataggttgtatctttcagagtatccttaagatcatcttcatttccagaagataaatttaaaacatccccttttttcagatcattttgctgggcataccattcatctaccagacattctcccgatgcttgtggaagttttccatctatgatcgttatctggtttaatttatcagtcttccccataactttgatcgcatgttcttcgtcacttccctgcttccttgcgatcacatctacagaatgtcctccttcgaccgactgcacattttttaacttccgaagggctgtcagattctcttctgaaattccaagtgttcccatgactttgacatccatcagccgacttccatcaaactggtggtctgctgtgatatgcatatctttttgtgtcacacggattcctgaatagaatgcaacgcccagtacaacgataaaaaagattgataaaaatctcggaagggttcctgtgatcgttctgtatatatctttatgtaatgccgttttcttcatacgcatttcctaccattcaatcgtctccaccggctgagggtgttcgtttatcgtaatgttgctgatctttccgttcttcatctcgatcacacggtctgccatcggtgcgatcgcaaggttatgtgtgatcacaaccactgtttttcctttcttgtgacaggtatcctgcaataattttaaaatagattttcctgtctgataatccagggcaccagttggctcatcacagagcaagatctttggattctttgccaatgcacgtgcaatagaaactctctgctgttccccaccagataactgcgcaggaaaattattcagacggtgtccaagtcccacatcttttaatacttcttctgctttcagaggattcttactgatctgaagtgccaattctacattctctgttgcagtaagattgggcaccagattgtaaaactgaaatacaaatcctatgtcatctcttcgatatcctgtcagttgttttttattccatttggagatatcttctccatcaatataaacagcgccactggtcgcagtatccatacctcctaaaatgttcaaaacggtagtttttcctgcaccactggcgccaatgatcaaggcaaactcaccctgatccaccgtaaaatcgatcccatctacggctttggtgattacctctcctgtctgatatattttctttacattttctaaccgaatcaactccataaatatgttctcctttacgtacaattttaacatattttcattgattcgactagtctgctacttaaactgatttaatgattcatcatattcgtatccgatcatggaaagtttttgttttacttcattttgatcgagatcgagtgacttacacaggtcttcgtatgaatcgtaaaaatctcgtaattgtgtattgatgtagcttaataacatcactgggtcttttggtatcatgtctgtctcctaatgtctttgtctttataaaatgttatttaaaaaattggttgtagacccgccattgttgatcagtgatgataaaacaaactctttcaaaacaaaatatgatatgaatgttgcgaccaatatagtgatcaacacaacatacgcgatcatatctttcttcgtattcggatagctcatcattgcaacgatcatatagatcatcccaaggactcctccaactacaatgatcagaatcgcgaactgatacattcctaaaaacaatcctaaaattccaaggatccatcctagacttaatcccaaagatctcattcctgcgatctgacagctttgaaaccaattgatatccgcttctgccatcgctttcattaatcccatgacaagtgctgcgatcacaagtgatacgatgatcgcaataatgatcccatatccaaagaatcctccaagtgaaggtgtctgtgctgccgttcttgatgttccgaaaacactgttgatcccgctcattgttgcggatacgatcttctgtaatagaacatatagatataaacctgttaagactgcttcgattcccatcaggatcaatccgtttttactatccttgtctaatacagcttccacaaatcctgtacttggatgtttgatcatctctagtgcctgtgtaaagaaattctttgctttatcttttacttctttctgtacagatccctgcatatcattcactggctgctgtgtctgtgtacaactgcatggctgaccatcgatcagtcttcttccacatttggtacaaaactttgccataaatatattctccttttcttctctcatcatagcatctaataataatagtatgaaacgctgtcgatcacccattttccattcttcttgagcatcttggccacaccgttgatcgtacaggtttgtttctcataggaccctgtccatccatttttatatttgtagtctcttgttccctgaactgctactgggattccatctgcgactgtatagtaagatgatgttgcatcaacagcctgacattttgttaattttacattgcctaacgctttcgcatcctgtccataataataaatatatctgcacagacttgttccataagagtttgctttctgatccgatgtaaaataagatgtcaatcctgaatttccaagatttctgatctttgcttctgtgatctttggaagataattttttagctctttcgctgcctctgctttggctgaatcagaatatttgatcttgcttaatggattttcttctcctgttttaaatgtgtaacttgtctgatcaaacaagccgtctgctccatgaaatgtgatcttatgtgttccttcaaacatccttgtataatatgtatttcccgaagtattttctggaactttcgctgcgatcccatcaactttcactgtcactcctggcattgtaaataatttcacagtcttgatcgttgctgaagtatctgtgatacttgtcacctcatatttatcaaagaataagaaattcttctttgctgattttgctacatggatcgttatcgtgtctgaaccttttttcgtctggtagatgtactgtcctgcataagttccatattccgtatatcctccagttggtgcagataatgtctttgtctcactttgttccatagtctgctcataggcttcttgattgataaatgtatcttcttcaaaattatatagatcatagatctttgaccatctttgactgttataatctttgacaaattgattcgctgctgattctggactgctttttttatttccaagatagaaaaatgctgcgatcaatacaaccagaactgcaatttctgctatgatgatcttctttgctttatcactaaatcctgctgctgttcttactgattctgactgtggagccgcttctttttttacaggctctgattctggtacctccgtgcgctcaatcttagctccacattctccacaaaacagatcgtcgtcttttacttcacttccacaatttgggcaaaacatacttcttcatctcccttctttatctaagtccgcgtttctttaattctgctgccatggtatcaacattctttttctcatatttgttcaaagaaatatcattctgatcgtccacggttccaacataccattcttttttctcaaaacgctctttattcttcttcttagtgaatttcaacccatgtcttgcataaacctcattcactgcatattgaagttcttcatcagataatttctttacggaagatttgcttacgtaagaagtgtctgcatctgggaaaatatatccatcatccgcatccattacattgcttgctgtattattttttgcagctgttgttgcttcttctgtaacttcttctgttgttgtttcctgtgtcgttggctgctctgttgtcatattgtctcctgattcccctgcatcttcttcagatacagattcacccgcatcagattcactgacatcatcacttccattaccgtttgattcttgttgtacggcattttttaaagatgatgattgcccattatcactgtttccactcgtgatcatcatagcgatcagtgctatggctacgactgcgatcaccactcctaaagaaatgatgatctgtttttcatttttcttcattcttttctcctcttctctcgtaataccggtcaacaccatctgcaattccttctgcaagcattgattgataatgattgtccgataacttctggtcttcctctggattggacataaatcccatttcaacgatcgtcactggaatcttactccagttgatccctgtcatctcatctgtctgcgttacaccgcggttcactgccccggtccttctgcataatgtacttaccacacattctgagagttcctgactatctgccgcgatcgatctgcaatatggattcgataatgtcggactcattgtcaacgccccatttgcagactgagaatctgcactattgcaatgaatccttaataaaatatctgaaccactttcatttgccataagagcacgctttttattgctgagtgacacatcattcgtctcacggatcatatatacgtcatatcctctcgcaatcaatgcactttttagctttaacgaaacttccaaattcacctgatattctgttcgttttgtgacaacaccttcggttcctgaggataccatcggttttgtcttatcagaaccaggtccgattgcttctttttcactcatctgtttcttttggtgtcctgcatcaattgcgatttttatacgatcttcctgttgttttgattgttcctgatcaaccgttacttcattctttttttgtgttgtcttttgcttgatgatctctgttcttttttctgtcgttggttttggatgatcttcactgatcatttcatcatcattgctgcatccagcacagaaaaaacaaaggatcatacataagatcatgatcttccatatctttttcataccttttatccctctcatttataatgctgcagttgttctatggctctacaacatgaagctctcctgtcacagaatccatcacatatccagatatcttcacatcttttgggatcaatggatgttttctcaacatttccacagaatcttttacagaactttccacacagtcaaatccttccagccatgtatcaaaatcaataccacaatgacggatcagctcaatcttctcctcatcgactcctcgatccatcatatgttttatcatcatatcactattaatatgctgtacaccacagtcgctatgtccaatgaccatgacttcctctattccaagttcaaagattccgactaaaacacttcgtaccacacttccgaaggcatggcttactaccccaccggcattcttgatgatcttcacatctccatttctgatcccaagggctgccggcaaaagttctgtcagtcttgtatccatacaagtgataattgcgatcttcttgtctggatatttacttgtcttgtattgttcatacttcttttcttctacaaattctttgttatattttaagatttcatctatcataacttctactccctacctcaatgtaatatctgccgtttttcccttgcaggcttttaaataatcttcggtcgtaagttcaatctggattccatttttaccgccacttacaatgatcttctcctgtgcattggcgctttcatcaagcactgttggatagtctttcttcattccgatcgctgtgcatccaccgcggatatatcctgtgatcttattgatatccttgacatggatcatctccacagacttctcacctgctgccttcgctgctttcttaagatctaattcctgatcgatcggaatgacaaatacaaaataccctccactttttccttcagtcacgagggttttaaatactctttcatatggttcatttaacatatctgcgatggtaattccatcaataaattctttacattcataacgatgtacttcaaatgggatctttgctctctcaagcatccgcattgcatttgtttttggttctttctttgccatcttataatgtcctccttactgatcgttttatctggcaaaatttacttttgacactctcatcatattttatcttgcaaatactccatagatcaaagaaacataacatgcaaaatctccgattctttttctttgatatccaagttcatctctccattttgcttctttgccatgctcttttgtatatgctgccaattcatctaaagaatggatcacactatcgtgcatcacggtcctatcatcattgcttctgtctgtcttcggtgtgatcttccaatgtgcacggaggcttccataatcgatcatacaatgaagtgcatgatcccataacttgtcatagatttcatcttcttcaagattctcttctaacagttcttcataaaccttcatcgcctgctcaaattcaagatcatctggcatttttagataattctcatatataaaatctttctgcatagtggcctcctttatttctttggcatacatttttacactacttgtgcacattatatcatattttctcatatagtgagagtaaaagatcttccgaggatatttttatgccagaaatacaaactaacaatcttgtcgatcatggacagttaaaaatacaggtaacttcaggacaaagagccgtcccgatccctaacgctacgatcgagatttcttatactggtgatcctgattctgttcttgagactgtatctactgatgaaaatgggcagacacctgtcgttgacctccctgctcctcccgtggaatacagcatgtctccgagtgaaaatcagccttattctgaatataatctaaaaatacattctgatgaatataaacctgtcacaatctcaggtgcacagattctttctggtgtggaaggcctgcagcctgtttccatgattcctgaagaaacccacactccaacagaagaacacccgatcgtgatcggtccgcataccttatggggtaattatcctcccaagattgcggaatctgagattaagccagtcaacgaaagtggtgagatcgttttaagcagggttgtgattcctgaatatattattgttcatgatggtcctgtcggtgataaaactgcgcagaattattatgtccgatataaagattacatcaaaaatgttgccgcctgtgagatttattccacatggccaagggcaacgcttgaagcaaatattcttgcgatcatgtcatttactttgaatcgtgtgtatacagaatggtatagaaataaagggcatgattttacaataacatcttctacagcttatgatcataaattcattcctggaaagacaacttataattctattaatacgatcgttgatgagatttttgcggattatctatcacgtccaaatgtgagacagccgatccttacgcagtattgtgatgggaagaaggtgtcttgtccggaatggatgacgcagtggggttctaaatacttaggtgatcagggatatgctccgattgagatcttgagatattattatggagagagtatgtacatcaataccgcagaacagatttcaggaattccttcttcctggccgggatatgatctgacgattggaagcagcggagataaggttcgacaaatacaacaacaattgaatcgtattgctaaagattatccttctctgcctacgattgctgtggatggtgtttatggagaatctactgcgaatgctgttcggaaattccagaatgtttttggactgccgcagacggggatcgtggattatcctacttggtataagatcagtgagatctatgttggagttagccggattgcagagttgaattgaaatcttagatacaacaaaagccccacaaagttcgtccttgtggagcttttttcatttcttatttttcaccaaacaccgctttttataaaaagcaattccataacacaatacttcctcataagcatcttcaaactcttttgcatacatctttgtgttgatctgatctaacgccttttgacagtctttttccaaatcttctaattttcttgaatactttgcttcaaatactgcaacttgtcctgttacatcattgtagattacaatatcacttcgtccttctccatactctctattcgactctacactataacctgctcctgcaaagattcctgcaagaaatgcatgatagaaattttctcggtaatcataataactgatcgtcattcgcagtagtgtgctgatttcttttgttgccttatccgcatctttgttccacactgcatcaaataaatctttccgattcgtaactcttgcactgtcttcaaaccatttccttacggttgattcgaaaatttcttttacttctttgtttggaattcttaattctatctgaccatccttatcacgttctccgacttttgtaagatatccagtaagatagagaatactccataaattatcttctgatgaatgtagataatcatatgtgaggtcttcttctattttctggcagatgcttccacctgcgatcaatacttctagtttttttcgtatagcagctcccgtataatcaataaatgaacggatgatcgcattatcactggtattcttccagtagctgactggccttgcattcagattattttgaagatctcttagataattcatgacatcccatggacaatatacttcaaactctccaaaattatatccatcataccattctttaatcagctccgctttctcttcaatctccgcatctgctaaaagcttatctacatcctgttgtgtaaatccgtaatattcattgtatcttgtagatgaaatcgtatctgatacaaagttatttgttccagtgaagatactctctttggcaatctttaggcatcctgtgatgactgcaaactttaatgaggaattatcttttaatgccgtacttaacatgccttttataacttctaacatttctttgtagtacccattattacttgccttcgcaatcggcacatcatattcatcgatcaaaagaatcaccggcttttcatagtaactctgcatcatattcataatcgttacaattgatccctttatatctgtaatcgatgctgtttgacttctcaatcttgaaaatatatctttttcattttctcttatattttctcctgtttctaaataggaattctgactgcacaatgacgaaattacaaatttcagcatattaaatgcattctcaaaagttgttccatccacatcttttaatgacaaaaacaatgttggatattgattcatttctatttattcacttcaaaatgctgataatccttagagcttctccactcaccaccccagctgaatccatatttcttaaagatcttataagctgtgtcattcttatgaatcatatatctcttatattttcctttacattttgacgtctttctctgtttatacaccttaccatttgccggtgataccttatttcctttgacccacggattgatccttggattgatatcgatagccattccataagaatggttggacagctttgttgttccactgatcacacgataattaaacgcagaggtattatttgcagccatagacttctcatcattcgcaccataatcatcgatcaatctcattctctcaattctgtatttcttctgataaagagcataaaagaccttgaccgttttcttcgcgatcttcttgttaacgatcaactcaccctcttttaccttcccatcaaaaccataatgaagaacctgtacatatcttaaatcagacaatttaatattattattcttacgataagattttcccgtgatcctcttttcaatattcggagaaatcttctcataagtaaagccttttttataagtatatttcgaagctgcattcgcagattttctttgtaaacaagccggaatcacagccactgtaaacgctgtcaatgcaattatcgtagttaatttcaattttgatcgattcatttattctcatcctttccaaaacttcaatcatttatcttaatcggtttcattataacatatattccaaagccccacactccataccttgaagcatttcaaaacaacaattcaatatcctcctgtataaagaatattttaaatcataattgcccagtgaccgtatgaacacgcctgcacttagtgagtggctggtcgtaagacctgtcacgaacttagtacagctgcgtgagaattcgaatgcgaatgggtcactgggcaattatgatttaaaatattcattgaaagagtgaattatttttgatatacaagaaattgatactcaatatcaaagtaagtctcttcttcactctctttcacaagtttccactctggcatctcatccagatctggaaaataagtatctgcatcatatgcaaagtctgttcttgtaacataagctgtatcacaataaggaagcatcatgcggtaaatgctttctccaccgatgataaaaatatcttcatccttatattcttccagctcatctaacaattcttctttacttccaactacgatcgctccttttgcatcgtagtctttatcatgtgttaatacaatattcgttctctttggaagtggcattccatttggaaagctttctaatgtttttcttcccatgacaacgacttttcctgttgtcatctgacgaaacatcttcatatcatttggaatatggactaaaagttcattgttctttccaattccccagttcttatctgcatttacaataagattcatcttatcttctccttcttatattgcaattggaatatcttttatctgttctcctgcctgataatcttcaatcttaaagtcatctgttgtgaattcatagaaatctttgacttctggattaagcgttactttcggtgcaggatatgtctctcgtttgatcatctctttgatgattggaatatggcgatcataaatatgtgcatctgcgatcacatgaactaactctcctggttccatatcacatacctgagccatcatataaactaatgctgcatactgcacaacattccagttatttgctgctaaaatatcctgagaacgctggttcaaaatcgcattcaatgtgagcttatcatgtcctggtttctttgttacattaaatgtcacactatacgcacatggataaagattcatctcatgaagatcttggtggacataaatatttgtcatgatccttctactgtatgggttgtgtttcagatcatagatcacacgatctacctgatccatcattccttctttgtattggtgctttacacccatctgatatccataagcctttccgatcgaaccatcttcatctgcccattcatcccagatatgactcttcagatcatttacattatttgatttcttctgccagatccataataattcatcaatagctgacttaatatatgtctttcttaaagtcaatgctggaaattctttggacagatcgtaacgatttacaacaccaaactgtttgatcgtataggcaggctctccatctggccagtgcggacggactttctctccctctgtactagttccattctctaaaatatcttcgcacatagatataaatacctgatctgcataactcattctttcttgttctccttttcttcttcctcgctgttgatcgtaagcatctcaaatcttcgtttaaaaaatgcaatcttacggtcaaacactcctaatcggtataaattgatcacaaacattccaaggatcagagctaataacattcctcctaatcctccaaatttcagaccaacgtagatcaaaaagatcgttgtcagtgctgagattcccatactgtctcccatcatctttggctgtaagacctgtttcaataccagacagatcgcataaatgatcagtaagataactgctgttttgatatctcctgtgatcagcttaaatattgcccatggaatgatcacagtccctgttccaaggattggaaatatatcgacaattcctactaataccgaatagataaaagaatgtccaatccctgcaataaaaaatccgatccaaaggatcgctatgatcactatcatgatctttaactgcgcaaggcagtaacttactaagactccaactgagttcttcataaatacattgatcttatgcttcacaaatcctggaatacatttttcataccatgctatgagtttttctcgttccagtgaaaacatataagctgcaaataacataacaacaagccctaacagaccgcttgtcacaccctttgcaacaccacctgcatgtgctaccccataatctcctgcagaagatgccgctttcttgaaaagatctccgatcgatccgctccactgatcaaactgttttccaaaagatggtggaagaatacttaaaaattgctctatcttcttctgaaagatcattccttgtctcatgatctcatgacggatatctggtgcatcctgtataaatccgatgacctgcagtgcgatacctctgactgcaaaataaagaaccactatgattcctgtgataactgccgcgatcaagatcgcagaaccgaacttcttcggtaattttaccttcttctccagatattcgatcactgggtgggccatcattgaaataatccatcctgctacaaatggccataaaaatacgattgcttttggtaatacaaaaatcaaaagcaatgcacctgctaatatgaccaacagttccatgataatatccagataaatttcccaacgtttcataattttttcactccctgatgtaattagtatattcttgaattttcataccattttccatctcttaatgaactattatacgttacaaattcttacttggcaattctaatctcatctttctctctgtcgtaatgatatatgtgatctgataaaacttcttcctgatccacaaccatacggtttgtctctctaaccatttctcgtagttcctctgaactttgcacatattcatcatccagtaaaaggatcacttcatgaatactgcttggaagaatataaagatcatgtcccatataattcgcgaaatctctcagtggatctttataaagcatgacggatgctccattcatataatctccatttgataatacaaacaatggaatctccatatccgtgatctttactggtatcacagactgaatcttacgcatcactggtgggaagatcttctccgtgttctcctttgcatccttcatcatctgttcctttgtcacaccccataacagcaactctttgttcctcactaatgcactcgccatcccgtcatgattccggtatgctgcccaacgatatgtaactgccagatctaagaaccgctcgtatggtgtatactttaacatctctttattcttctcataattaaccacacgataaaacagattcttcttaatatgctcataatctgaaactttatcctcatccagataaaatccaacctgatgtcctcgataaattctggcgatatctttcatcgtatctgataattcctgtccccttaaataatttcgataaaatatctccagatacaacactggtaccagataattcttggtctctccgatcgacaaccccatcatcgatatctgattattcctcttaaccctctgcaccataactttctttccttccatctctggaagatagtttaaaatattcgcttctacatactgataaaattctttctcattcaacatggtcttctccttttctgtggatgaaaacgcatgccataaccccattttatttgtttccctcactcgtcttcatatgtaaataatttccatatcatcatacaatattttccagttaattgcaataaaaaaagaaatttatttttcaaaatttcttttttattcaatctctattttgttgctgtaaattcttttaagaagtcaagtaatgtttccatttcatctctcgtaccgatcgtaatccttaaataattattgattcttggctgatcaaaataacggacataaatctttgctttcttcgctgcttcaaaaatctctttggcaggtacgctttcatgtgtcgcaaagataaagtttgctttggaatctgcaaaactaaatccgatctttctcatctcaatctggaaccattctcttgtatcaatgatcttatttcttgtctcctggaaatattcttcatcttctaagatagctgttccaagaacaatagatggctcattcatcgtataagagttgtaggaatatttcacatcattcattgccttgatcagttccttgttaccgatcgcatatccgatacgaagtcctgctaaagatcttgatttggaatatgtctgaacgactaaaacgttatcatattttcttgtcagttctttcgctgtgtcgccgccaaaatcaatataggcttcatcaacaatcacaacaacatcctgattgtgttggatgatatcttccacaacctctaaagataaaaatgcgcctgttggtgcattaggatttgggaataccaccccgccattttcagcgtaataatcttctttctgaatctcaaatgcatcattgactgctttcttctcatatggtattccgaataattctgcccatacaggatagaaggaatatgtgatatctgggaagaagattggtttcttaccgttaaaaaatgtcataaatgcaacggcaagcacatcatcagatccaactccgacaaatacttcttctttatcaaatccatgataagaagcgatcgcttctaccaatttagttgctgcaggatcaggatatttgcgcagattcttgattccactcatcgcttccttgatcttatcggatggcggataagggttttcatttgtatttaacttgatcacaccttcttcttttggctgttcacccggtgtgtaaggttctacttttcgtacattgtctctccagctgttcattgaaagtctcctttatctatattggcttatttgcgatagtcatcgatcagtttcttaaataatggaagggctttttcgatacgttctgttggtacacagtaagaaatacgcacatatcctgggcatccaaagctgtccccaggtacgatcaacagatcatattctttcgccttctcgcaaaatgcattggcatcttcttctaatgctttcgggaataaatagaaagctccacctggttctacacattcatatcccatatccactaatgcattatagaataaatctttgttcttctgatagattgaaaggtcagaagttaaatctacacattctccaacaactttctgatataaggttggcacacagacgtaagaaagtaaacgtgcagatgcgataaacgctggcagtaactgttcaaaatcttctgcctcatttggtgctacgatataaccgatacgttctcccggcagtgataaggatttactaaaagaatatgctactaatgtattgttataaaaatgtggaacatatggcacttcaaatccatcatacgcgatctctctgtatggttcatcggaaatgatgtaaatgctgtgtccatattctttttgtttcttctctaataatgcagctaatttctcaatcgtctctctggaataaacaactccggatgggttgtttggagagttgatcaagattgctttggtatgctcattgatcgtttcttctaattcttcgaaattaatctggaatgctctggtatctgcagaaatgacctttaatctgcatcctgctccctgtgcatatactgcatattctgggaaatgtggtgcgaatgtgataacttcatcttctggcccatctactaatgtcttaaagcagataccaagggctgctgccgctccgatcgtcataaaaatattcgctgctgtataatttgtatcaaatcttttatttaaagacttggcaatgttttctcttacttccagtactccagcattgcttgtatatccatgaatatccactggatctgctgtttttaacaggcgaagtgctgtctcatcaatttcttttggtgctggaacacttggattcccgatactgaaatcaaatacattttctgctccgacttcttttgctctcttcattccatattcgaaaatatcacggataatagaatgctgtttcgataattctactacttcttttgataacatgatctgtctcttcctttctttgccattagttttattttacaaaaaaatgcagaaaattacaacaatcctcgctgattgctgtaattttcacgtaatatcatttgacgatcattttattcatctaatgcatctcttaagctctttgtaaactcataaaccttttcagaactttctttaccatattgactgatcaatttgacgatcgcacttccgacaatgacaccatcacagtatgtactcattttctttgcctgttctggtcctgaaataccaaatcccactgcacaaggaattgttgcattcttcttgatcacaccgaagaattcatcaaaatctgttgtaaattctcttcttgttcctgtaactccgatggaggatacacagtataagaatccttctgcttcttttgcgatcattgcgatacggtcatgagatgtcggtgttacaagactgatattgtcaactccgtgagctgttgccacgccctgaatctcgtctttttcttcgtatggcatatcaggcacgatgacgccctgaatcccacattcattacaaagatcaaagaatctttcggttccaaaacgatagatcgtattgagatacatcatcatgacaaatggtgtttctttgatctcttctcttaattcttttaccatctgaaagattccctttagtgttgtaccacctgcaagtgaatgctggctggcttcctgaatgacaacaccctcagcgatcggatctgagaatggaataccgatctcgatcacatctgctcctgcttttaccatagctctgatattttcttttgttgtttcgtacccataatctccagatacgatgtaagttactaatgctttttgcccattcttttttctattctcaaatgtctctctaattttcatctaactgcactcctctgtatcttgctacctgataaacgtctttgtctccacggccagacagacagataacgactgactggtctttactcattgttggaacgatctccattgccgctgcaactgcatgagatgattcgatcgcagggatcactccttctgttttggataaatattcaaaggctttgactgcctgttcatctgtgatactcatatattctgctcttccgatttcatgaagatgtgcatgttctggtccgattcccggataatcaagtcctgctgaaatagagtatacaggatcgatctggccttcttcgttctgtaagaacaaactcttcattccatgaaaaatacctttacttccttttgcgatcgttgctgcatgatctaacgtatcaatccctcttccagctgcttctgccccgatcagtctgacactttcatctgggataaagtcataaaacattcccattgcattcgatcctcctcctacacaagcaaatacagcatctggaagttttccttcgatttctttcatctgttcttttgtctcttctccgatgatcttctggaaatcacgaaccatcgttggatatggatgaggtcccataacagaaccgatgcagtaaaatgttgtctcaatatttgtagcccagtctctcattgcctcgttaatggcatcttttaaagttcttgttccactctctacagcatgaactttcgctccaagaagttccatacggtatgcattcagactctggcgttccacgtcttctgctcccatatatacaacacattccatgtcaaataatgctgcaacagtcgctgtagcaactccgtgctgtcctgcacctgtctctgcgatgattctttttttccccattctctttgcaagtaagatctgacctaatacattgttgatcttatgggcacctgtatggttcaaatcttctcgttttaaatatacttttgcccctccaagatcttttgtcatcttctctgcgtagtataaaagagatggacggtttgcgtaatctctgtataactgacgtaattgggctaagaattctggggcatttttgtatgtttcataagcctcatttaactcgtttaccgcgttcattacaatttctggtacatactgtccaccgtactctccaaatcttcctattttattcatgtcttcctcctgttatctgcatgatttctttcatttttttcaaatctttgtatccatccgtttcgattccactggaaatgtcgatcccgtatggatgaactttttctgtgatttcttttatatttttattgtgaagcccgcctgcaataaaaaatggttttctgattccttcttttggaatcaggtcgtaattcattacttttccggtacctccatacatatcttttccttctataaatgtatccagtaacagtttatcaactggaagctgttgggcttccttgatgtcttttgtatctttcactctgaccgctttccagatttctttatcggtctgctgtcttaactgttcaatataaataacatcttcatcgccatgtaactggatcacgtctaatggaacttcattggcgatttctgtaactttctcaattgtttcattgacgaatactccgacacttaagatcttttgatctaagttttgatcaagttctcttgcctgctggcctgtgacataacgcttgctttttgaaaagaaaatatatccaattgcatctggttttacttcatttgcatatgcgatatcttcttttctgcgcatgccgcacatcttcactttcagacttcgttctttgatctgattttgtatcataggcagctccgtaactgtttcattgtttctttgatgttatcggatctcataaatgtttcaccgatcaaaactgcatcggctccttgctctttgacatttttcatatcattttcatccttcattccactttcggaaactaatactgcttcgtatggaataagtggagcaagtttacttgttgtatttagatcaacatcaaatgtttttaaatttcgattattgattccgataatatcgcatccatatgcaacgactttctttaattctttttcgttatgaacttctaccagacaatcaatctctaagctttttgccagatcataaaattcctttatcttttcttcagaaagaattgctgcgatcagaaggattgcatcggctcctaagacttttgcttcataaatctgatattcatcgaaaataaaatcttttcttaacattgggatatctaccttagctctgatatccgcaaaatatttgctgccacctttaaaataatgttcttcagtcaagcaggaaatggctgctgcccctgcatcttcataggcaatggctatctctactgggcgaaaatcttttgcgatcacacctttggatggagacgcttttttaacttctgcgatcacggataatccagatttctttaaggcctctttaaatccatgatttttattcttagaatttaatgccatctctttcatatcctgcggctcgatattgtctttttctctttgtaattgttcttttcttttttctacgatatcatctaagatcatgttccacctcatttattttacatttgtgtatgcaataaactgttctaatttctcatttgcctttccagaatcgatcatctcggctgccagtttcactccatctttgatcgtctctgcttttccgatcgtataaagggctgctcctgcatttaataaaacgatgtctcgttttgctccctgttcttttccagttaggatatcttttgtaatgatcgcattttcatctgctgttccaccaacaatatcttctttcttggcaagtgttaatcctaattcttctggatcgatcgtatattctttgatctcatctccattaatctcacagacacttgttgtggatgagattgagatttcatctaatccgtcatctccatatacgatcagggctcttttaactccaagattcttcataacatctgccatcggacgaaccagctctttttcataaacaccgagaacgatgtagtttgtcattgctgggtttgctaaaggtcctaagatattaaatacagatcttaccccaagctgtgctctgactggtccggcatatttcatagatccgtgatgtgtctgtgcaaataagaaggctgctccaactttatccaaacatttcttgctttcttctggtgttaatccgatttttgctcctaatgcttctaagacatcggctgcaccactttttgaggatacacttctatttccatgtttcgcaacttttgctcctgctgctgcaatgacaaatgcagatgttgtggaaatattaaagctgtttgcaaggtctcctccagttcctacgatatcgattgcttctgtttcttctggcacgatcgctgcttttgctctcatcactttggcaaatcctgtgatctcttctggtgtttcatgattcatacgaagacccgtcaggaaacttcccatctgagcatctgtcgcatttccagacatgatgcagtccatggccttataagcttcttcttctgttaaatgatttccttccacgatctttgttaaaaatggttttaatgtttcctgattgactgcgctcatagtttcctcctttttagaatctccaagtctgattcctgcgatgtttgttaaaaagttttctaagatcctcattcccatttcagttaagattgattctggatggaactgaattccatagaccggatattctttatgacatactgccataatctgtcctttttcatctcttccgataacttttaaatcttctggaaatgtctcatcatcgatgatcagtgaatgatatcttgctgcatatattttatcttctaatccttcaaataaaggattcttgttattgattgtaatctcactcatttttccatgcatcaattcttttgctggaacgacttttccgccatatacttctccgatcgcctgatgtcccagacagattcccaagactggaatttcttttccgaatgttttaattgcctcttttgaaattcctgcactgtctggatatccaggtcctggtgagataacaagtgcttctagattttgtaagtttccgatctcatcaatcgttatttcatcgtttcttacaacctgaatctgtggatacaaagatccaatgtactgatatacgttataggtaaatgaatcgtaattatctatcattaaaatcataaccttgctgcctccttcactgcatttacaacggctaatgctttattctttgtctccataaattctttctctggaacagagtcattgacgattcctgctcctgcctgcacatatccttttccatctttaaatacgacggtccggattgcaatacaggtatcaatatttccatcaaatccaagatatccaacggttccaccgtaaacacctcgttttttattttccagctcatcaatgatctccatggcccttacttttggtgctccggataatgttcctgccggaagaacactcatcagtgcgttgatcggattttcatcatctcttaattctccctgtacatcactgactaaatgtgtaactttggaatatttttcaacggtcataaagttttttacttctacagttccaaacttactgacttttccgacatcatttcttccaagatcaactaacatcgtatgttctgctctttcctttggatcattgactaactgtcttaccaacatatcatcttcttcttttgtctttcctcttggaaccgttcctgcgatcggtttggttgctacaattccatttaagacactgactaacttctctggtgaagctccaaccacctgatagtcaatgaaatcaaagaagtaaaggtatggagatgggtttaatgttcttaagcatcgatagacatcaaatggatcaacatctgtctctacctcaaatctctgggataagaccacctggaaaatgtcaccgtctttgatatattctttagctttctttacgttcgcttcatattgttcttttgtaagattcgatgttacttctgtcttcacaggtgtaaatctatctttggaaagtgataccggacgttccatcttgtgaaggatcaattctgctttatcttctaattcttcatatttttgtttaatattatcacctttgtggatattctggatgatcacagctttgtttgccaaatgatcgaaggcgatgatctcatcgtacatgcataagtggcattctggcatcttcagatcattctctggtacatttgttaatttcttttccacctgacggatcatgtcatatccaaaatatccgatcaatcctccagttaattttggataatcttccataactggagatttatatttcttgatcagatcacttagatagctcatcttaaattcttcttcctgctttactccatcgacttctaattcttttcctgaaatcttgatctctgacttaggattgatcccgataaaggaatatcttccccactggtctttattttccacactctcaagcatgaaacatggcgttccttcttttctcagtgcctggaacatacggatcggtgtcatataatctgccagtacttcgtaaaatacaggtaccatctgatattcttttaatagttcttcaactttgtttaatgtcggatataacatatctgcctcctgatcaaaatttatcgccgtggtttcatttttcatagtttatatatctgtatactatgatttatagatagggccgttttgcatgaatggtaactttgttcatattgggggatttcatcgaaatttcctatgaaataaaaaaggcccatcgttcctattgctagggacgatagaccgtggtgccacccatattcaagaaatatcttctcttcttgttaaaatatcttagaaaatatctctcctcacttaagatactccgctttgttcgataataaaaagcttttatatctcgttcccgtaacgtgggataacggcgacagttactaagtttcataaacagttctctgtgctcctcacaaatccattcgcttatcacatatctatgaccttccagcaaccggtcactctctgtaagactgtttgatgagctacttacttttgttcatcggatttatcactttaacttgttaaatatttgtttatattatatgagtcgattttttatttgtcaagaattttctgattataatttttgatttgttgaaaattcgcatattttatttttctattttaacattttataaatctcttctttatcagcttctggatgctctttgattgcttttttaattctttattctatgaaaacttagcaattaatccctcatataccataaactgttccatagatgaaaatttcacatgatctactataaatttagattcataccaattgcttaaataaccattctcctcatctggattatgaaaacatataatttccattatatttccccaactttctgaaccgctaaatccaaatccagatcatgccatccgtaatatgatttttttagaaaatctacattaattttctgatttacttctgcacttggtatattgtaataccattgataatatgcatagaattctccaatccaatttggtataaaaccttccattgcttttccttgcttcaaagaataatgctctgtttctttaaaatattcccataattctttggcatccattgtatttacataggcttttgcttgatctatgctttgtcttgttttacttgtcatatatgcgttgataaagtcttctgtatccttatctggataagtatttgctacataatcaaacaattttccttgattttctactacgtctcctagatagacatctgaatatgctctcatcattctcacctcttacaacagggtactaaatacttttgttacttcgtttgcatctgaattgatcagatttctcatattctttctggctgttacatctcaatcattgtagcgttcattaaagaatcccaaatttcctctctggtcttctctggattttcctttacgatatcatagattttctcaatcacatctgcatcttctaacaaatcatctgctatcttcgctatagaatcgccattttcaatctttttctttaccatcgttattaattttaaaatttctccctgttttcttccttcttttcttccttcttctcttccttctcgtctcccacgattttccgcgcttcgcaactggctttccttatccctgattgccatttgttctctcagatataaatatctttcactctcatctcgactcatcttaatcatttcatccctcaccttttccatgtaatgatttccttcagattcttctctgacttcttcccaagtactggctgaaattaattttgcccatcgatataattcttgcttccttgcctttccttttgtactttttaatttacttaattctatcacatggaattgaaatttactactgtacaattcacctgttttatcgtcttgcagtaaaattctatgataaaacccaggactttttagataattaaaatcaagaattcctacatgaatacatggtggaagttcataatatgactccccttttttcaatccttctgtaaacattctgcaattataaaataagcttcgctctgcccaatcttcctgatatgtattttgcatttcaatgttaatctttttgccaccgtttaataccatctttacatctaaaattccctctttttcctctttaacttcaccttccacaaatggatctgcaacttctaacgtttcaatatctgtttctttcaaatgcaataatgccattaaaaatccttttacaatttcttcatttttaaatattttttgaaaggcataattatttgttaagcgtatatttaattcctcattgctagctgctctttttcttaactcttcgtcattaaaacttccctcgttgttattcatattttctccttatattacaatttatgtaaattcgtgtcatgtaagtattttatcaaatctttattgattgtcaattattttttgtaaaaatttgtaatatttggttatataaaaagacaggagccaaataaactcctgtcctaacacacatcattatatcctacgcacttttatttttccagttcttccgtctcaataataaacttcacactacccttcgttccactagctttcttcgtaaatgtctgatagttttctccttcatccatcactgcatcaactctgtctaagatatcttttgcatcatcattgatcgtattgacaagtttctcaataccgtcttttctgaaggttaacattcctttgttcaatgtaacagctccatttttcagagttgcgattcctgttgtcatctgtcccattccattatccagtgtttttgcacctttgcttaacttcttcgctccatttgctgctgtttttgttccactgtttaatgtcttggctccttcatctaacttcttgatggaagatgccagtgtcttagatgatgtctttaactgcccagttccttctgcgatctgttttaatgcagcttctaactgtgctgtggatgtctttgtctttgttagcagattctgaatctgggttaaacatcctgatacgatctgaaggtctgtctgtgtttcttgcaagcttgttccgatagatcctgcgtaggttcctaaattctttgcctgacctcctacggattgtgcataaccgcctaagttttctgcatctgtctttaaagaacctgcaatcgttgtaagctgtgctttctgctcatctgtaagagaactataattattcttgataaattctccaattgctcctgcctgatttccaacatctgctgctgatactccaatagactctgctaatgcacctaacgtcttcgctgacacaccaacactttctgtctgtgtcttaatattcattaattcttttgtgattcctgtctgtgcactctgtaagttagactgtaattttgcctgatcactttcgcttggtgtactattctgcagttctttgagaatctgtctcactccattatctaacttctctgtagatgatggtaaagcactggttcctttcgctaactgactggttccattctttaatgttgtagatccattgaccagtttgtcaagtcctgttgctaactgtttggaactgactgcaatctgttttgttcctgattttaattttccagaggctgtgactaatttttcaattccctttactaaatctccagaaccatcacataacttatctgtcgcattttcaaggtcctttaaggaatctgttaattcacttaaatctcctgcatcatctaaaccgaactctgataatgtatcggaattcgcaactgtcgctgtgactgtcatctggaagtcttctacatcagctgtaatctcgaaatcttctggaatatcgaagtttgacccaatacttgtattcttaaggtttaagctgtctgctaatcctggcattgcaactccgataacgatatgtttgttaccatcggagataacttttccgtttgttgctttgacattagagaagttatctgtatttaagatcgctgctgtgatcattgtaaatggtgtatagactgttgtctgttttccattgatcgttttggttacggcggaatgattttcatattcataacggatctttacttttcctgatttaccaacaagtttctttggtgaaatttcttttccatccagatagtatgtgactttcatagatactggaagatttttatcacttgttccttgatagtaaatatcttttccattggcattccatgtaatgttgtcctttttgcctcgtttatatgtctcatttcccttaacgttctcaacgtctgtcagatctgtagcatctttgatctttgcttcacctgagaagttctttaaccagtcactgacaataactgttttctct

SEQ ID NO: 702 - DNA, 141 bp, Unknown
  gut microbiota DNA sequence
gcgtgtcacagagaatgcagatttcttttccggacttccaagacagacagcacagcagatggtcaaacagtcagtcacagatttcaaaaactggcttacttctttaacagaatataaaaagcatccagaaaagtatctggg

SEQ ID NO: 703 - DNA, 13361 bp, Unknown
  gut microbiota DNA sequence
ttatatcactggaggttttttactgtaagcttaagcaatgctgactcaccggcctagccggtggtttattcgttcagcacagttccgtttctcagaagagaaacggaactgtgctgaacaggcttaaagcctaacaataaaaaaatcccaccttacaacattatcgaaatgccataagatggtatttatcattcttaagattaattatgcttcttttgtctgagcatattcgtttaatcttccaagcagttcatctaagtccattccatgaacataagctgcctgttcaatgctttctccctgagatgatgggcatccaacacatcccattccagatgccataaggattgctgcgtagtttggatctaatgcgatcagatctgcgatgatcatatcttttgaaattgccatttcgtttgttcctccataaaatttaataatattttcagaaaatatgttttgcaatacatgttttctaaaatagttcaaactaacattcatagtataatacattctgttcaaagtgtcaaaataactttataaattttccacttattattgttaaaaatacaacaaaattacttgatattccttcctaagtatattaaaatagaaatggtcgagcggggtttacccgctactaatgattatactatttatataaggaggatataactatggcatatgtaatttcagacgcttgtatttcttgtggagcttgcgaaggaacttgcccagcaggagctatcagcgaaggagacggacagtacgtaatcgatgcagatacatgcatggaatgtggagcttgcgcagacggatgtccagcaggagctatcagccaggaataatttccaggtacgtatattgttcaagcaacaaaaaagagatgcatttttatgcatctcttttttgttccatatattctcttacttgtttcgatgttggcagagattctattgccccttctgttgcaatagataaagctgctgtataattcgctatcgtcagcacttttccaatagaatcatccgtacagattcttgtacagaatgccccgataaatgcatctcctgcggctcttggatcgaccatttctacatcttcgatcgctttcttatagtaaaaacgttctggtgtgttcatgatcacacccttttcggctagcgtgatcagtaccgttggtactcctcgtccacgaatcaccgcagatacgactcttgcttcatcgagattaaatcttgtccattccctcttccaatcactatggatcttaatacctgtcattgattttgctgcctgctcattgacgatcaggtatgtaacgcactccataagttcttttgaaagcttctttgccggaataggattcaatactacatcaacttcatgtttatatgcatagcccgcaattgcttcattgacttccatcggtatcgcattctgaagcacaacgagatcatatttgtccatctcatcttccagatatgcgatctcatcaaccgttaattgtgttgttgcccctggtataacgatcgatcttttctttactttctgtcctggaacagtctctaataatacaatcgaagatcctgttgggagcacatcatcataaatgatctgttccgtgttcactcctgcttccttacatactttaaccagttcttctccatccctgtctcttccgatcttaccgatcagcgtaacatctgccccaaggcgagccatctgtactgcctgattagcccccttgcctccgggtgatttcttaatatcttcacccatcactgtctgtccttcttctgggatcacagatgtttctatgccttgattcatcataagacttccgactaccagaatctttggtcgtttcttcatattcgaattcctcactctatctattcactcctcatctgttacagatcagagctgataaatttattataatattgtctgaatccaaatacaatctttacttatctttcttttcgttttcttctgaaaaatcttcgtttttctctggatgctgcaatttcttctcttgctttttgctgatttctgatcatctcatctagtttctgaaatcttttttcttcttcagcttctcttagccgaaactgataatccatttcttttactactctgtctgaaaccttagaactgatctgatctgcaatatgatctttctgttccagaatcgcctgtcccatgatctttaccaacactttttgaaactgcatcattttatcagacgtattcatctgtttttcttccggaaatggaatgatatttccggataatttctgtttgatctcttcgctatctaatccagcatttctcatatcacggatctgttcaaatgtatgtatttctttgtctccataacaacgatatcctttttcatttcgagggatcgttaaggaaaattcttcttcccatgttcttaaatgatatgtttcaaggcctaactgcctagctgcttctgatatcatacgtcttttttctttcatatgtcccttcctttcctccccttcattataaggtttgaaaaggacttcaaacaagaaaaaccgtcctctaaaagatgacggtttctggcatttttctctttattttttactttttagattccaagatcatccatcggaccgctttcttcggattcatttgcgatctgatctaagcgcagtgcaagggttgtatacctccgttgctcattgacattctggatcatggaaaataacatatttctgtctcctacgatcgttaaacagttttttgctcttgtgactcctgtatacagaaggtttctgtgaaataatactcttggtccgcttaagatcggcatcacaaccgctgggtattcgcttccctgtgatttgtggattgtgactgcatatgcaagttctaattcatcaagacttgcatacggatactggacttccctcgtctcatcaaataagactgtgatcttctctgtgtaatcattgatttctgtgatgattcccatatcaccattgaatactccaactcccttatctacggtgaatcctttgttatttcgcatttcccattcaatctgataattgttcttgatctgcatgactttgtcaccttcccggaataatccaaaggcgatctctttttctttcttctcatcagatggtggattcaaatattgctgcatgacctgattgagcctctcaacaccaagttcaccttttcgcattggtgttaagatctggatgtcatatggtttcacatggacatatcctggtagtttatcccgtactaaatatactaaaactcctagtacatcctgaatattatttctctgtaagaagaaaaaatctcggctcttattatctaattcaactggtcttccctgatggatcagatgggcatttcttacgatatggctgccttcttcctgacggaagatctggtttaattccacgactttaaactgtcctgatgcaatcatatcttttaagacatttccagcaccgatcgatggcaactgattggcatctcctacaatgaccaatcttgttccaggcaccatagcttgcaggagtgcattcatcagatataggtctaccatggacatctcgtcaatgatgatcacatccgtttctaatggattacccgcattgcgttcaaacatggatgcatttccctttttcatgtcacgttccctgtcagcttccccattgatttctaacatacgatgaatcgtcattgcttcatatcccgttgcctctgtcatacgctttgctgctcttcctgttggtgctgccaaacggatatccaatccttcatgttcaaaatactggatcattccattgatcgttgtcgtcttaccagttccaggacctccggttaagacaacgatactatcctgtgccactgcatggatcgcttctttctgtttttcagcaaatgtaatctgctctgtctcttcgatcattgcgatcattgtctccacctcagaaatggaaacatcataatggatatttaaatccagcaacattcttgccgtattgacttccatatgatactgtggtgctgcataaactcttgtctcttcatcctcttcaatgacgatcttgcgatcgatcatcatttctaataaatgctcttcgatatcttctggtgttacccctaagatatgagctgcatttctgcacaaaatacgttttggcaaaaatacatggccttcatttagtgcccgcattaaggtgtaaaaaattccagaaatgatacggtaatctgagttgcttccaatcccgactttcttcgcgatctcatctgcgatcttaaatccgactcctgcaatatcatccgtcatcttatatggattttcctgaatgatcgtatacaaatgatccccatattctttataaatcttcacagcaagattattattgattccatatccagacagaaacatcatcgcctgacgcatttcctgcttctcactgaattccacggcgatcgctctggctttcttctcgctgattccttttacttctgcaagacgttctggctcctcttcaataactcggaaggtatccatcttaaacttctttgtaatacgttttgcaagtgcaggtccgactcctttgatcgctccggaacctaaataacgttccatgctgtcaatatcatctggagccacaatctcataagttctcatctgaaattgtggtccatgcactgggtgatcgacataatctccttccaaagatatgtattctccatcatttaagaaaggaaatgatccaacgacagtctcttcatctccatcgacatcaaggcttaatacagtatatccgttatcttcattccgaaaacgtatatgatctacgtatcctttcaaatatgccattgttttctctcctttcttctgatctacagtataacgtgaattaaggccaggatgaattgccatcctggcctctttgaatctctaatgattatttgttctttgattttttatcatcatctgctaaatattcgatatattttcctgtaccgattgctacagctgttaaaggatcttctgctgtcattgtgttgattccagtcttctcttcgatcagttcttctaatccctgaattaaagatccaccacctgttaaaacgattccacgatcagaaatatcagctgctaattctggtggagttctctccagtacattgtgtactgcgtctacgatctggtatgcaggttctcttaaagcttcttctgtttcttcagatgtcacagtcactgtctttggaagtcctgttacaaggttacgtccgcgaacgtccattgtaagattttctgggcgtttgtatactgtacctacattgatcttgatctcttctgctgtacgttctccaattaataagttatgtttcttacgcatgaaacgtacgattgcctcatcaaagtcatctccagctactttgatagagttgcttactacgactccacctaaagagataactgcgatatcagctgtaccaccaccgatatcaacgatcatatttccacatggttttgcaatgtcgattcctgcaccgatcgctgctgctactggctcttcgatgatggaaacttctcttgctcctgcctgatatgttgcatcttctacggctttcttctctacttcagttgcaccacttggtacacaaacactgatgcgaggttttcttccaaataaagacttaccaactgttctgctgataaaataacttaacatcttctctgtaactgtataatcagagataactccctgacgtaatggacgaactgccacgatattacctggtgttcttcctaacattaaacgtgcttcttctccgatcgctttgatcttgtttgtatttctatcaaatgccactacagatggctcttttaatactacaccttttcctttgacgtaaactaatacactggcggttcctaaatcaattccaatatctgttcctgctgccatagcaaaaattcccctttcgctttctcttatctatcattattatgttatttctactttatccgtatacgtgcagttctacacacgtacacatactctcttattataaacattttccaagaaaattcaacgattttttacatattctgcgaaatttcagtaaatcttaagaacttacttttcccagcgtccagatgccccacatggaaggaccaatccgttggatgaaactggtaatccaatctcatctgagactacttttccaccaaatttcgctgctacctgagtctctaacatataagttaaaactgctggctgtaaacctgttgtataggagtttacaaggaagaataatgggtcatcggacagaatctttgtacatagttcaatgaatggataaatcttctcttcgatcttccagatctcaccctttggtcctcttccataagatggagggtccatgatgatcccatcataatgattacctcttcggatctcacgttctacaaacttcacacagtcatctactaaccatcgaattggtttctctcttaatccagaaagctgtgcattctcctttgcccaatttaccatacctttggatgcgtcaacgtgtgtgactgatgctcctgctgctgccgctgcaagtgttgcccctcctgtgtaggcaaataagtttaatacttttactggacgatttgcttttctgattttatctgaaaaccagtcccagttcactgcctgttctgggaataatcctgtatgtttgaagctgaatggctgtaagtggaattttaattctttgtactgaatatcccatgtcttaggaagatcaaagaattcccactgtccgccgcctttgtgacttctgtgataatgtccatttggcttcttccactgtcttaacttctttggggtgtcccataggacctgtgggtctggccttaccagaaaataatctccccagcgttctaatttctcaccgtttgatgtatctaagacttcatagtctttccattggtctgctaaccacatattgtatattctcactttctgtttcttctataaaatatcatcttgtgcatgtatctacatacttatgtttattatagcctaaagacaaattctttcgcaagggttccatatagaaaaaaagaactttctgcatcttttccatgcagaaagttcttaaactatgtaattcctatgatttttaagcctgaagtcccattaaatgattaataaactgctgagcagtacgtccagagattcctccgtggcttaattcccatttatttgcttcgagtttcagttcatcttctcccatcttgattcctgctttgcgggcaagttcgaaaacgatctcgaagtattctttctgacttggttttgagtagttgatcgtcacaccaaaacggtttaccagagataatttttcttccattgtatcggatctgtgcattccgttgctgttttccacatcagatctgtcattccatgtctctttgataagatgacgacggttagatgttgcatagattaaaatgttttctggttttgtttccacgccaccttcgatgactgcttttaagaatttgtattcaatctcaaattcttcgaaagaaagatcatccatgtagatgataaatctgtagtttctgttcttaatctgtgcgatcacgttagaaagatctttaaactgatgtttgtagatctcgatcatacgcaatccctgatcatagtattcatttacaatcgctttgatacttgtggatttacctgtaccactgtcaccaaataacagaacattgtttgcttttcttccttctacaaatgcttctgtattttcaacaagtttctgtttctgaatctcatatccaacaaggtcagataatacgactttatccatgttgttgatcgcacggaagcggatgttgttgtctccacattcttcgatacggaatgctttgttaagaccgaacataccaactccataggctttgtagaagtctgtgaccatgtcaaagaattcattctcatctttggctgtctctaatctctcgcttaatgcctgaactttctcgctgacattcttattgtacattaattctggtttaccgattgcctgataatcagagattctgctgaagcaatctacacctaattcatcttcgattctgctaaagtcaaagtcaaataattctttaaatgccttaaaatcactctttgcaaagtggttgacacttccttcacttgctccgactttctcgcatgtgatactgaatggattttcatttgtgatcagtaagtatgttaaatagttgtgccacagattcttgtcaaatgcatagtctgttgcaacttctaagattctctttacctgtttaaatactcttgttcttaaaacatcttttgtctgtgatccttcgtccatgcagcggaaaatatcacttaactgcattaagatggattcttcgtccatgtcaccgtagatcagtaattttgatacgatattatacatctcttgtattcccccaaacttttttcttaaaatcattcttttgtaactgttagcaatcgttacgtttattttggtcttaggtacgattttataccttttggtttgtagttttcaatagttttgaaagattttcatgtaaaagtttatgtttttagaaatctgtcgtgcatcgttttacaatatcacatggcaccttaagattctggccgatttcttattctgtttttccaatcagccagtcaagcgcattgattcttctgattccttcataatccgcttctggatcttcatccagtgttaacaaaatcttttgataatggtcatggatcttttgaagcggcaataattctctctttaatgttttttcatcccgtactgtagcagctacctgataatagatggttcttttttgatccatacaaacaaaatcaacttccaaatcatcaagttttcctacatatacgtcatatcctcttcgaattaattccaaatatataacattttccaatatatgcccaacatccgttgatctgcttcctaataacatatatcttaatccaatatctgcaacataatatttctccaatgtttttaaatattgttttcctttgatattatatctttttgcctgatatataacataactttccataaatgcagccaaatatttttctactgctcttacatctatttttcttccatcggaagtcattgtatctgcgatctttttcgtggataattggtttcctatattatcaaaaataaatctcgtaacactttccaacatcatcgtatccgtgatcttatgtctttgtgcaatatctttcactataatcgtattataaattccatctagataatctctgatttctttcggatgtccagctaactccaatgcatatggaaaggcactattttcaagatatgttgtatattttctttgtagatcattctcattcccagtactttctacatattctttaaaggacaatggcagcattttaatttctacatatcttccagataataatgttgcaatttcagatgataacatattagcatttgaacctgtcacatataaatcaacattattctttatatacaaactatctacaactcttggaaaatcttcacattgctgaatttcatccaaaaatatatagttcatttgatctggcagtaatcgttctttgatatatgcataaagttttttaggatctctcaaatcgtaaaaatcataatcctcaagatttattgctataatctgcttctttgttacattcatttctttttgcaaataatcctgataaatttccataattgtagattttccacatcttcggattccagtaataactttaatcaactgcttatctttaaatgcaattaacttatttaaataatcatcacgactgattctcttgcttaccattttaccatcctccttttataagttttattatattttagctttttattttattattttcaatagttttatgcaattaatgtataaaactttttaattttatataatttctgcatttttttgctttattttattataattaacaaacttttgaaatatattttttgtaaaaagcaatatattcatacaaaaatagtgagaccagaatttttatttattcttatctcactattttttacttacgatatttttattttaatgcttttatcacacggaacacttgctctaccgtatctatcaaattctcctgtgcatttttcttcttcatagcatcttctaatgataccgcagatcttacaattggaaaatatgcatcaatccctgcttcattgcaagcagttgcacctttggtcactgcccctgagaatcccaagactaatttcccatatttcttcgcaagtttcgctactccgattggtgcttttcccatcgctgtctgggcatctaagcatccttctccaccatctgcaagaggttttatgactacttctgcttctaaatcgactttttttattcctttttctatagcttctcccgcctgaattgatgttaagcttccttttagtgaatcaatcgctaccactattttcatcataaaaacctcgcctattttctacaaccaaacagaaattttctcagacaatccacaggaatcatcgtcattgataacaatactgtaacaatccagccttttgctccaaatggaatacaactaaacatctttccgatccatataaatacttgaaatggaattgccgctgcgtttacgatcataatctgtaccagcatgataataaaaaatactttcagaaaatccgggttctcatttaatcttttgaaaatcccaaatcgttcatccctgacattaaatccgttaaataatgcactaaagataaataaaacaaaatatgctgttaaatgctgtgctttattgtcaaatagattcgtgagcactggtaattttaagaataagaaacttaatataaccagccatatccccataaatcctatctgcgtcatcatatctttgctgataataccctcatcacgtcttctcggtgcttctttcatatattttgaaagtgctggttcatttccaagcatcattgctccgagcccgtccatcacaaggtttacaaataataaatgtgtgacttttaatggttcttctattcccaaaaatggtgcaactgcactgacaacaactgctgtcacattgatcactaactggaatttacagaacttcaagatattatgatagatcgttcttccataccagattgcatctttgattgatgagaagttatcatccaaaataacaatctttcctgcctctttcgctgcctctgttccacttcccattgcaaatccaacatctgcacgtttcaatgctggggagtcattcactccatcacctgtcatacctacaacaagattcatttcctgacacaggcgcaccattcttgacttatctgttggcaatgctcttgcgatcacacggatctgcggtaaaatagctttgacttcctcatcactcatctgatttaactgtgcagaagataaagctctatctgattcattttttaacaatcctgcatctttcgcgattgctactgccgtctccaggcggtctcctgtgatcataacaacctgaattccagcttcctgtacctgcctgatggcatctttggctgatggtctgacatcgtctctgatcgccactagtccaatgatcacaaggtcgtcgttgatctgattcttcacaagctctttttctgaatatccaaaagcaagaacacgcattgctttcgctgccagagaatcaatcttttgatttaatgctttctgatcgatctctttgatctgtccatcgccatctaaatattttgttgcttttgcaagcaatcgttctggtgctcctttataaaatgtcttgcctatgctctcaattctcgcctgactgaacttattggaagaattgaatccttgatgggcactaaccttacatccgtcattcccatccaacatacaaaatgtctcttcaccaataaatttcaacaacgcctgatccgttgcatttccaccaatgaccttatgataaacatcaaacatcgcctgtgtattcttcccaatcgcaagatctaacagccctttcaccttcccatgatgtcttaattcatttgcagaaattgaagttccatccgctgtaaagaaatctacaacttccaattctccctttgtgatcgttcctgtcttatcactgaataaaatatttaaagatcctgctgtctcaattccttctgccttacgaactaatacattatgatctaacattttacttgtattttgcattaatacaagagatatcataagcggcaatccttctggtactgcacatacaatgatcacaaccgcaagtgacactgcatcgatcaaatcctgcacaacctttgctggtcccatagaaaaatatgcctgaaatccacctgccattataatgaaatatacaaaatacataactgcgatcacgatcgcaccgatatatccaaacttcgatatctgatcagcaagttttgaaagttttaccttcaatggagaatctggttcttcttcctgcatctcctcagccatcttccccatcatcgtatgaagtccaaccttctgaacatccattataccttcaccatcaaagatcacagctccacgaaacagagaatatgaatcaacaaatgtatctcctgtaatctcctccgcaagataaacaccctctccggctgctttcttctcacactcctctgcttctccatttaaagcagaattattgactttcaggtttcctgtatgcaaaataccatccgcaggaatcttatccccagactgcagtaaaacctgatccccaacaaccacgtcatcaacatcgatcactgcaaccacaccatttctgtgtaccttacactgatccttcttcgtactcttcttcaactctcggtactttgtatcactcgcaacccctgtcttcgccgtaacaaaagcaacgatcaacaccgcaatgatcgtccccatcggttcataaatctcagcatatccaaagaaaaacatcacaatcatcaacaccgcgatcgcaagcaagatcttgatcatcggatcttgaaatgtttccttaaattcctgccaaaacgtcgtaggttctgaatctggaatctcattggaaccaaacttctctctcgattccttaacttctttatctgtaagcccttttatgtccatgtcgctccgttactgaaaacttataaaaaattataaacctttatgtttcattcctacttcaacgagtatgcttttgtaacgaatcaattcatgtactact

SEQ ID NO: 704 - DNA, 691 bp, Unknown
  gut microbiota DNA sequence
tattctgtccgtcagtaagctgagtaccttatttcccataagtccgattcccggcgcaaagataacactgcagatcagaccttctacaccaagtgaaaagagacctctgtatcttggatagcccagtagaatcgtcagaaccgcaagaatcaggattgctgctcccgctgccacacggcacggcatagacaataatatggtataaagctttgcaacttttccttgcaccgtactggtatcgttcatattattatacaggtttgaagcatagctgttcagcacatcctgcacatcaaccagttcctctttcaactgctgtttcatcattgccagcatatcgtcatttaattccggattcgtatccttaatttcctgcatactgtcatccagaatccgattcagttcttttgttacatctacatctttgtacgcttttccgctggaaagatcctctgttatctcgttcatgaccttttgtgtaattgcctgtacttctccgtttttctcgatcttgttctgtatctttgcgatccattccgtatcatccgctcctgcataaccgaataccgcatccatcatccggtgtgaaattgcagtatcgactcctgcctgactgattgcatccaccaataccttttttgccagaaaacttgatcccaataccgttacacttatgataaacaacagtccg

SEQ ID NO: 705 - DNA, 180 bp, Unknown
  gut microbiota DNA sequence
gcgggtgtagttcaatggtagaactccagccttccaagctgatcacgtgggttcgattcccatcacccgctttttaattttataggtaacctataaaatttgagtctgtagctcagttggatagagcaacggccttctaagccgtgggtcgggggttcgaatcccttcaggctcgttttt

SEQ ID NO: 706 - DNA, 333 bp, Unknown
  gut microbiota DNA sequence
agccaatctcttcatttggagagcatggtgcgatcgtacactacacatcttcaccggagacagatgtagagttaaaagaaggacagttattcttaacggatacaggagctggattctatgaaggttccacagatgtaaccagaacttacgcactcggcgaagtgccacagatcatgaaagaccactttacactggttgctatcagtaacttacagctcggaagtgcaaaattcctggaaggatctaccggtatgattcttgacattcttgcaagaaaaccattctgggacagagacctgaacttcaaccacggtaccggacacggagtcggat

SEQ ID NO: 707 - DNA, 970 bp, Unknown
  gut microbiota DNA sequence
ttaaaattacattggctaaatatttcttatctactcccaaagcatctccgcataaactccatcagcaatcaatcctctaaaagcttcctgcacagtctctttatcttccttatatgtaactccaaaccaacgatcctgtgtctccaacaccttcacgttcgctctttcttctttcaaaagcttgtccacgatgttcggtaacagatattcactctttaaatctccttcttccacattcccaaggaaatctttgaaatcttctgctaagaaatccaaaaattccggatatcctgcccacatgttcatggatactttatcttctggactgatccattcctgtacttcttcgctgtcgcatttgatctgtccgtcttctcccatctcaattcctgttgtctcatgtacctggcttaataaaccattcccatcgacaacactgactcctctggtcactgttccattgtcgcttaatgtgttctttaaaatgaatccgcccattcccatggtaaattctcttccaaggttttctccggatactaagaaatcatgcagttttacaaatgcttcttttccataataatcatctgcattgatgatcacaaatggctctttcactatatctttgcagcataagactgcctgtcctgttccccatggttttgttcttccttctggtacttcaaaaccttctggcagatcatcaagctcctgaaatacatattcaacatcgatctgttctttgatcctgtttccaatgatctcctcgaactccttgaaaatatctttgcggataataaagactactttattaaatcctgcttcttttgcatcatgaatggaataatccatgatgatctctccatttggtcccatctgggctaactgtttgattccttctccaaatctagatccaattccagctgccatgataattaatgttgtattcataaatctctccccaaaataatac

SEQ ID NO: 708 - DNA, 385 bp, Unknown
  gut microbiota DNA sequence
aggcttaagtggaggtatatatgaaaatattaactgttgaagatgataatatgataagagagggaataagtgaatatctttcagaatttggatatactgttattcaagctaaagatggaagagaagccttgtcaaaatttaatagcgatataaatttggttatcttagacattcagataccttttataaatggtttagaagtgttgaaagaaattagaaagaaaagcaatttaccaattctaatcttgactgcatttagtgatgaagaatataaaattgatgcatttactaatttagtagacggatatgtagaaaagccattttcattgccggtcttaaaggctagaatagatgctttaattaagaagaattatggacatttaga

SEQ ID NO: 709 - DNA, 747 bp, Unknown
  gut microbiota DNA sequence
tatggggaataaagacattacagatttcaatgaagcgcaattaagaaagagagcagcaagtaaggaagaattaaatatttgtttgaccaataattatgcatttcaaaagatatttaagaatgaagagatagtaaaaggatttttaatagcattgttgcatttaaaggaaacagatattgaagagttggaggttacggatccttttgtggaaggtgaagtaaaagaagaaaaagagggaatactagatgtcaaattaatcttaaatggtggcaaaaagattaatatcgagatgcaaaatacgtatcaggaagattgggcagagagaagtttattttataattgtcggatgtttacagagggattaaaaaagggagaatcttattatgaattacctccatgtattcatgtaggaattcttgattttaattatttaaaaagtcctggattttatcatagaattttattaaaagatgatacaacaggtgaattgtatagtagtaaatttcaatttcatgtgatagaattaagtaaaatagcaacgacaaaaggaaaagcaagaaaacaagatctttataaatgggctaaattaatttcagcaagtacttgggaagaaatcagagaagaatctgaaggaaatcattacatggaaaaggtgagggatgaaatgattaagatgagccaagatgagagtgagagatatctttatttaagggaacaaatggcaatccgcgataaagcgagtcaatt

SEQ ID NO: 710 - DNA, 314 bp, Unknown
  gut microbiota DNA sequence
atctttacattatcttgataaaaagatggtatagaaaattttcggcttttgaatttaggaaactttgaacatcctttgaaaaatctcttatatgcatgacaagcatctttgatcgcttgttttgttacattatttgaaacttcatttaaccaggaatattcctctgttttctttaattgtgtaaattcttttctcagatcactatccgataggaacttaccaccatttttatagttttctttttctcttcctaacgcccagttataagcgaatctggcagtattggcatatcgaaaaagttttgtattctgttt

SEQ ID NO: 711 - DNA, 185 bp, Unknown
  gut microbiota DNA sequence
gaggcttcaacgggaagatttccagaattctttggaaaaccgtcgaaacatacactggactatatcatccaggaaacgggatacgaaccggacgagatcgctattgtaggggaccggctgtataccgacatcgcagttgcagatcaaagtgatgtgacatcaatcttagtgctaagtggagagag

SEQ ID NO: 712 - DNA, 141 bp, Unknown
  gut microbiota DNA sequence
cccagatacttttctggatgctttttatattctcttaaagaagcaagccagtttttgaaatctgtgactgtctgtttgaccatctgctgtgctgtctgtcttggaagtccggaaaagaaatctgcattctctgtgacacgc

SEQ ID NO: 713 - DNA, 13874 bp, Unknown
  gut microbiota DNA sequence
ggatatatattgtttaataactgctgcaattgcataaaaccctgtatcttctttaatggttggatgttttaaaaaactaaacaaattagctggtaatttattaaaaatctgtcgatatgttccagtatctccaatattctcacgaaatccagatacaaatatcaaaacggcacaagccatccccgcaaatacagcatttgcacgaaagactctttctccttttacgtatttatattttccattcactcttgcaaataaacacaagaaatatgtactaaataatgttatccaccagactgtcatattccataacctcttttactgttgatccatcttttttacctgttgctttatataaaatgtccatgcgattccaaatggaattgccagaatcgttaatcctttttctggagtttcttttaaaaacttcttgtttttaccgatgatactgcttgatacatagtgaatgcagttcataaattttctttttagtgtcttatcatatttcatgtagacggttcgtaagaatgcaaatcccttcggattgtttaaatactgccggaacatattagcacttgatccatctgcttggtattccacattgcataatatttcatccataacaagcagttcatattcctgatcacaaagaagatatttataattgagtcctacatatttctctccttcaaacactgggtattctggatattttgtaatgatatctgttcgatatactaattttttgtctccagacccacctgcttgataataaccagataatgttgtacattttaaatctttgggaaatctttttccaatgatcttcccattgaaatctgcatctaatcctatgattcctgcatatttgctacttccatattttttccagaatgtaataatcttctctgctgcatcatcagcaagataatcatcggaatcaatacacacatttaattctgtatcaatcaattgatatgcagcattatgtgcagtatgcattccgccattttctttataatgatagataatctcaaaaccgttatctttctttaaccatccctcaaccaattctcttgtattatcacttgatccatcatctatgatcagccatttaaactgcttacatttttgtctacatagactttcataacatctatgtaaagtatgtgctctgttgtatgcaggggtaaatactgttaatatgatttcattttccattcgtgtaaaactcctctaaccatcttgcattctctacaatatcatattttcctctttgaatttcctgtaacatattctcacgagtactatttttgtattttaaaatacagtcaatccatgtatttatatcttcatctaaagatataaattctatcaatttcgtaattgctacttctcttgttacttgatctgatacaatacaatgtaaccctgctgcctgtgcttccaccaaagttactggaagtccctcgtaaattgatggaaataaaaacacatcaaatgcctgcattagatcaggcacatcatttcttacccctgtaaatataattttatcagctatttttagtttttctgctttttctttatattgattactgttatttcctcctccaactaaaatcaattttacttttttattctttttacaaatctcatgaaataaattaattataaatgtgtgatttttaggtaatgtaaaatttccaacatgtcctattacgtattcatcctccgaaatatgaaattcttttctgattttttctctggtttctaaacaaaataaatatttttttgtatctattgcattattcataatttgaaatggttgtccttcaaacatccatttccctgctcgttgtccacatgcaaataaatttgttgcatatttcgaaatcttttttttagaaaacaattttatgtatttttttaaatttgtatcaactagtgtcgtatgtgcatgggcaattcttactggcaccccatttttcttcgctgcttttaatggatatgcactcagacaatctaaatgagaatgtacaatcttatattctttatgttccttaaagaatcggtccagacttttcatataacttggactaaaaggattcaatactggcatatggtagattttaccgcctaaacctctgatttcatcgtcataatctttcttttcattttctggtctgtgtgtcagaaaatcaaactgaactttattcctatctatatttcgataataattcataagcattgtttcaagtccaccacggttcatgtgagtgacaacttgtaatactctgattggttctcccattttattaattcaactccctaactatttttataacttattagttactatctaaataatccttccaaagtcatctcaacaaccttctccttatcaaacctcttctccatcacttcccgtgacttctctcccatctgtttcttctcttcataggaaagttcaataaattccatcatcttctcttccaatcccttaacatccttcacatccaccagatacccattctcgccatctcttacagcttccatacacccatgaatcctgctagtgatcagtggtcttcccatcgctccacattctagcagtgtatttgccatgccttcatgatacgatggtaatacaaagcagtcacatttcttaatgaatggtttgacatcttcctgatagccataataataaatgatcccatttctgaccaatgactgaattcgttccttgtaatcatcttccattggtcctacgatatcaaacgatacttctgggtagatcttcttaatattctttgctgctttgaacagttcttcgactcctttttctttcatcactcgtccaataaacaagaacctgatgtttcttgactcttctgggtatggtgtcatcttgtattcatcaaggtcgatccctgctcctgggagagtacatgatctggattctttgataatattattttctataaacacctgcttatttccttcattttcaaagaagatcgtttttgcctttttgcaggatagtttatataaaaatacgacgagtttcttgatcatattttcattctgaaatgcagttcctaatcctgtgatattgactgcatatggaattcttttgaatcttgctgcgatccctccgtagatgtttggtttaatcgtgtaggtgatcacaaggtctggctttatcttgcctaagatgttaaagtatctcatcatcagtttaagatctgttgctggattgattcctcttcgatctaccggtgtttcgataaaatgacatcccatttcttttaaattctgtactaacattccttttggcagggatatatagacttcatttccttgatctatgagctttttgatcagtgcttttctgaatttgtataatcctacgtctaggtttgctaaaattaatgtcttcttattcttcatcgtttactcttctcactggtactccaacataagttcctgcttcgttgatatcttcgatcactgtacttcctgctcccatgatcacttcgtctgtgatatgcagtccttgtatgatctggcttcctgtgccgatctctgtctcagtctttaaatggacatctcctgacagtaaaactcccggatacagggtattataatctccgatctcgtcatcgtgtccgacaatacttcgattgcagatcaggttaaaattaccgatctctatattcgttgtcataataacggatgtacaaatgatatttccttgtcctagatgcactctttgtgatgtgatcacggatggatcgatcagattaggataccataagtttggatttggcagacattttaaaacgagtttttcacggacttttgcattgcctatagcgaaggcgacggcaagtttttgttctttgtcatattcttcgaggtatttcattcctccaagaatcggataaccatctatgatgctgccttgctgaattccatcgtctatgtatccaagaatctcatatgttggttcttcttcgttgatccgttcgatcagccactgagtatctcttcccataccaccggctccaacgatcacgattggttttatctttggttctttactcatataacccatcctcattcttcttccaatagcattccattcctaatgctttcggtgcaataaaatctttctcgatatcatctccgacaaatgccatgttcctgcatggtatttctaatcgttttctcatgatcagaaatggaagatcatttggtttcctgaattccatgacatttccatgtcctgcaagttcgtctgtgatcagtatctcgtctgccattttatctaaccccagggcttctatcttggctcgctgtacttttggtgttccatcgatcaagatcccaatacttcgcttttgcgtgtgtagttcaaagaataattctttgactccttcatacaatgaaatctctggtttatggtccctaatggcttctctgcattttaataataattcatccgaatacattcctgcatcttttaataccgtttccagtggcggctgccctttttccagtgctgcacataacttattaaagatattgttcacttctggaagcattcgttctaccactcggaaactgcttcgtacataatctttctctgagtataatgtgtcatccagatcaaagatcaccgaaccaattccctcatctaaatgatacaggtctttaaaatcatgaatctctacaatcggttcttctcttgtatttaaacatacacttttttcaaatcttgtgaaaataacattgtcatcggctgcatcctctttgtattccattggttcacctaacatcatggagagtgctgcatatggtgcgtcggctcctgccttgatcgatacggtgtttgcctgatgataccatggttccattcggataaaataatctttgtctgtatgttcttcacgaagcataaagatcgtcatccatccggatggccttaatttttttatcactttctttgcttcttctacgatcttgtgatctcttacaactctgtatcttgaactttcttttccctcgacttcttcctttgcccttggtgtgatgtaaaccgggcttccgtctagattgcagaatacgtcgatctcatacatcttcccatttaaaaatggacgtatcgtgtaattcgcgtattttgatgcatgaaaacttaattcttgttcatcatggatcatgatgcttttctccagattatccatctcatccaatactgcaaacattgctgggaatccttgtgtatagtcattggcactgcttacgacctgtggtgcgttaagaccacattcttcaaagaaacgagctgtccagcgtttgttgctgcacagcagagctaattcttcatttgcaatgagaacttctgttccaacagcttcaaattcgctggctctttgtgacaggataaaaacgtcttcttctgttcttggaatgagcagagcgatcttctcctgtttacagatatgtaagagttctgtgacataaccttcttcccctggctgtggaacctgatagtgcttatggcagcgatataatgctggcgcttccagtgaatgatcgcagccgacaaatgttactttcacccctaatctgccggcagcatagcggaaggtatcgataaattcgacctgatctgccacgcttgaaaataagatctttaagtgtcctgctttcttgtatttggaaaactggtctttctttgttccctgaaaggcatacattgtcacagattcctgtgcactgatccctgctctttttaagactttggtcacagtctttaatatgatcttgatgtcggtaagaaatgaaatattatccacatattcaaggtcgaattcaaacttttcttcccagctgatggcatttctcccattcacctgtgcaagtcctgtcagtcctggtcttacatctgcacgtcgtttctgtcttgcactgtagaaatctatgtattgtttcaataatggtcttggcccgacaaaactcatatgtccaaataagatgttgaagaattcaggtaattcatcaagactcgtggatcttaacatctgaccaaatcttggaagacgttctttgtctggcagcagatcaccattctcatcgacggcgtctgtcatacttctgaacttgtagagtgtaaatatttcgttatgatatcccggtctttcttgtttgaagatcacagggctccctaatttgatccttactaacagtgctgtgacaagcagaatcgggcttgatacaatgatacagcacagtgacaatatgatgtcaaaaaatcgtttgatatatttgtgatacatctttatatatactccgtttacattttgttcttatcggtccagtatggatcttatgattcctatgatccgatccatatcttcttttgtattcttaatatcacttggaagacataatccgcggtcaaagatatcttctgatactggtttcttatcatcttcgtagtgagaatagaattcgcaccctttaaatactggttgttgatgtaatggtttccagatcggacggctttcgatattctctctttccaaagcttctatgatatctaatggttttgtcttactgtcttcatcgatcgtcatgcatgataaccagaaatttggttcactgcatgtttcatatggattcatatgcacttgtttataatccttgaaagcatctttgtatgtctcatagattgcttttttcttcgcaatgtgttcatccagatgcagaagctgtcctcttccaactcccgctgtgatattagacattcggtagttatatccgatctccttgtgttcataatgtcggaccggttcttttgcctgtgttgccagaaatgtcgcatgcttaatgtattcttcattctctgatgcgatcattccaccgcctgatgtcgtgatgatcttatttccattgaatgaaaatcctgccatgactccgaatcttcctgtctgaactcctttatatgttgctcccagactttctgcagcatcttcgatcagtggaactttatactcttcacagattgctttgatctcatctaccttggctggtgttccataaaggtgtgcaacgatcactgcttttgcctctttatgttcctctaaggctcttcttaatgcctgtggtgacatattccatgtctctggttcagaatccacaaatacgatcttgcctttttcataggcgactggattcactgttgcagcaaaagtcagtgaaggacatatcacggtatctccttccccgacttctaataatttcaccgccagatgcagtgctgcggttcctgcgcttagtgcactgcagtgtgcgattcctgtatacgcttccatctcacgttcaaagccattgacatttggcccaagtggtgcgatccagttggtgtcaaatgcttcctgcacaaacttctgttcttccccatgcatcgttggtgatgccatatatatacgttctttcatgctgtctcatccccctgtcattttgtctgttgatttgtctgtttatatgtatactctggaactaatctttttacaacttcacgaatattcggatcttcggaaaatgccgcatgatctaattcagcgatcagttcactaaattgttctgtctccatcatccttggacttccaatgaaaattcgtttgttctttgtctcttttttattctcctcatcgatcagaagttcttcatacagcttctcccctggtcttaagccagtaaactggatttctatatcttctcctggtgtaagtcctgataaacggatcatattcttcgcaagatctaagatcttgactggttctcccatatcaaagataaatatttccccgccttctgcgtaagctcctgcttctaacaccagactgacggcttctgggatcgtcataaagtatcggatgatctctggatgtgtaactgttaccggaccaccattggcaatctgcttcttgaacaacggaacgacacttccgttacttccaagaacatttccaaatcttacagcaacgtattctgtatcgtataagctattcatgtattgaatgaccatctcacagattcgcttggaagcacccatgatatttgtcggtcttactgccttatccgtggagatcagtaccattctctttacaccgctcattcctgcttctttggctatgttaaatgtgccaaatacattgttcttgatcgcatcatgcgggctgtcttccatcaatggcacatgcttatgtgctgctgcatgaaatacgatatcaggcttataatcttcgaaaatattgtgtattcgcagatggttctggacagatacgatcaatactttcaaatctagttctggatgtgttctctttaattccatctgaatctcgtaggcattgttctcataattatcaatgatcactaacttcttcggctgatatcttgcaatctgtctgcagatctcacttccgatcgatccgcctccccctgtgacaaatacgactctgtctttgacatagctcatgattgatggaagattggctttcactggctctcttccaagcagatcttcaatctctacttctcttagagcagatactgtaacttcactgttgatcagctgatataagcccggaagaatactcagacggcatcctgtctgcttgcagatctcaaggatgtccttgcgatccttgggttctattgtcggaattgccaaaatgatctcttcaacatcaaatttaactgcattgcgcaggatcgtattacgattgccaaccactggtatcccagataaatatgttcctttcttcgctggatcatcatctatgatgcaacggatcgttttagtcacatatgtactctttttgatctcatttaaaatgatgcttcctgcttctcctgctccgatcaacattaccggaactttcttcttgccaatgtcattcactttgagtggttcacttccctgaatcaatcggacaagtaatcggataaaaaacattcccaacagcagatataccaactacaagaaatagtaacttcttggtatctcccattgtaacatataaattccgatcagctggaaagctgctgcgatcacagctgctttaacgacattaataaaatcggagactcctgcatacttccattgcgttgaatacaatcgatatgccataaagatcacaatactgcaaaagagattcaacggcatgtattttgcagcatttttcaaaaaaatcgatgcgatctgtgatggatagaattcaaatcgcgttaataatgcaagatatgatgctatgatcatcattatgatatctgaaatcccaagtatcatattccatttttttctttggatgattgtttttaatttcttcatatactttcccctaacatatgctctcacatatttgttttaaacctattataccattccttttcttaatttcctatatctactcctgcccatttcctgctttttggtaattttttcttaaaatacagcaaaaagagatggaaaaatctatattgttttgatctttccatctctttctatgttaaaattttatctttttatacgttgatctcagctgttaatccaagtacttctttattctcttccagaattggattgatcacttcattcacaaattcttctgtctgctgtggtgcacgtcctacgaagttctctggtttcatgatcgcctgtaactgctccatgttcataccaaatgctgggtctgctgcgattctctctaacagatcgtttgcttttccttcttctttgacaacttttcctgctgccatagaatgtacacggatcttctcatgaagttcctgtctgtctccaccagcttttactgcatccatcatgatattctctgttgccatgaatggaagttcgcttcttaagcggctttcgataaccttagggtatacaactaatccgtctacaacgtttaagtaaaggtctaagataccatcgatcgctaagaatccttctggtacggataaacgtttattggctgagtcatctaatgttctttcaaaccactgtgtagatgctactaatgctgggttcatagcatctgacattacgtagtttgctaaggaagcgattctttcacttctcattgggtttctcttatatgccattgcagatgatccgatctggttcttttcaaatggttcttctacttcttttaagtgctgaagaagtctgatgtcgtttgagaacttatgagcagactgtgcgatctggcttaatacgttgatcacgcgggaatcaacttttctagagtatgtctgtccagatactggctggcatttgtcaaatcccatcttcttggcgatcattccatcaatcttcttgatcgtttcgtggtttccttcgaataactctaagaaacttgcctgtgttcctgttgttccttttgatcctaataatctcatgttagcgatcacgtgatcaagatcttctagatcatatacgagatccatcagccaaaggcttgctctcttacctactgttgtaggctgtgctggctgaaaatgtgtaaatccaagtgttggaagatctttgtatttcattgcgaatttggataattcgttgatcacatttaataattttactctgacaagctttaatgcttctgtcatgatgatgatgtctgtgttatcaccaacatagcaggatgttgctcctaaatggatgattccttttgcctttggacattgtactccgtatgcatatacatgagacataacatcatgacggactaatttttcacgttcttttgctacatcgtagttgatgtcttctgcatgtgcttttaattcgtcgatctgttcctgtgtgatatcaagtcctaattctttctctgtctcagcaagtgcgatccataactttctccatgtcttaaacttcttgtctggagaaaagatgtactgcatctctttgcttgcataacgttctgataatgggctctggtaacggtcgttcataaaaatctccttatccttatctttcaaaatttccacgaatatctcttgttggcggtttcattggatactcacctgtgaaacatcctttacagatcggtaatccctgtaccatctgtgaaagtctctcttctcctaagtatcctaaactatctgctccgatcacttcacagatctcgttgatcgatctgttatatgcgatcagctgttctctctctggaatatcagttccaaagtagcatggccacaggaatggtggggaactgattcttacgtgaacttctgtcgctcctgcatcgcgtaacatcttcacaatgcggtcacttgttgttcctcgtacgatggaatcatcgatcatgatgactctctttcctttgactgcttcttttaaaacatttaacttgatctgcacgcttgattcacggctgctctgtcctggtttgatgaaagttcttccaacataaccgttcttgacaaacgcggttccatatgggattcctgactctaaggaatatccaagagctgctgcatttcctgattctggtactccgacaaccaagtctgcttctaccggtgaatcctgtgcgaggtatcttcctgcctgaattcttgagtggtataccccaactccgtcaatctcactgtctggtcttgcaaaataaatgtattcaaagatacatcttgctgttttttcctttggaagacataaatcacagtctgactgaattccatcctttgtgatcgttacaatctctcctggattcacgtcacggataaattctgctccgatcgtatctaatgcacagctttcagatgctaatacataagcattatctctcttaccgatacataatggcttaaatccatatggatctcttgccccgatcagtttccttggtgacataacgatcagggaatacgcacctttgatcttctgcattgctctggctactgccttctcaattgatgatgtatttacgcgttctcttgcgatatgatatgcgataacttcggaatcgatcgttgtctggaaaatagctcctgtcttttctaattcttcgcgaagttctattgcattgatcagattaccattatgtgcaagtcctaaagtaccttttacataatttaaaaccagtggctgggcattctcaggaacactctctcctgctgttgaataccttacatgccccacaccgatatctccctttaatgcctgaagggaatctggtgtaaacacttcattacataatcccatacctttttgagatgtgacattacgttttggaccattcgtatcagaaactgcaattccgcagctttcctgacctcgatgctgaagtgcaaacaatccataatagatcgttgacgctacatcattgccatcgaaatcgtagataccgaaaactccacattcttctcccaacttatcaaagttctctctgctcatcgtgatcttttgacctttctgttatacaatctttagtttcgtttgtaaaatacacatttttgatagtaacatattcattttaaatctgcaagcatccctgttattgattctcttttaataatgtagtatccggagggatctctcctcgcttaagctttgtatatatgatccttcttacagatttatcgattcttgattctttgatcttgccactttttagtgccttcttaattgccttgtatgcttctttatagttatccggcatcacgatcaggtcaactcctgcctgaattgctttcactgctgcttctccggaactatagttatctgtgattgctttcatgttcatcgcatcggtcatgataacgcccttatattcaagttcatctcttagaatatctgatacaactctgctgcttaggcttgaaggctccttctcatctgtcacattagacagcatcagatgtgacaccatcactgcatcagcttttgccttgatccctgctttaaatggtttaaaatctgtatctcttaatgtattgatcgtctgatcggtctctgtgcttccgcggtgtgtgtctcctccagtctgtccacttcctggaaaatgctttaatgtcgctgagatctgttgtttctgcatgttctttaccagtgttgtaataatatcagcaactttctttgagtctgtcccaaagcttcggtctccaatctctgtgttattcttattcgttaaaacgtctgcgactggtgccagattcatgttaaatccaagctcttttaattcctttccctgtgtctttcccatctgcgcgatcttcttgttattgtaagttcttccaacttcctgtgcagatggatatactgtcatcttcatcttgggatttgatgcgactcttgaaacctgtccaccttcctcatccactgccataaatagtgggatataggaggcatcttgaagctcatccgtcatcttctttgtttgatcaggtgtgttgatattcttcgcaaacatgatcactccacctgctggatacttcttcaatgtcttcttcatctgactcgtcacacttgtctgattcttgctttctgcctcatctaattgataaacagataccataaatagttgtccgatcttattctttaaggacatctcctttgtgatatcttttgccattccctgcaaggttgtttcatccagatcttctgtcttgagtttctttgttgtactcttcttcccgcatcctgctgtcatgacaagcatcaatacaaggacaaggctgattaaacgtctcttcattctttcgtgtcctttccgtgcatgctcttttctttttattataccagaagcatttgtttgtatcaaatgctcagactgtagacaaagtcccggtatttgccg

SEQ ID NO: 714 - DNA, 42151 bp, Unknown
  gut microbiota DNA sequence
gtattatttgaagagataaatagctttatggttggatggtttaatgaagcacaagtagagctgagctttgtgtcatatatgaaaataatgtggcctatgcttcaaagctattttggaaaagaatgaaagatagtaacagtaaacacagttttgtatacagttaaacccagtaaaatcaacgcatgaggggaactggctacattttagtttccaatctggtggtatgtggctccgacaatcatcaatacatttttagaagcttacgatttcagtggtaaaaagattgtgctttttgcaacatccggaggaagtggattcgggaatactgtgaaagaattgcagccatctgcaccagatgcagttattacagagggcagactgttaaatcatggaacaaaacaggaaatcagtgcttggataaactctttataaacaacagtattatggaggtatacagaaaatgggaaaaataatacagacagcaggaagaaatgcacttggtgaatttgcaccagagtttgcacattttaacgatgatgtgcttttcggcgaaaactggaataaccaggatatcgacgtaaagacaagaagtatcatcacagtggttgctctgatggcttccggaattacggattcttctttaaaatatcatcttcaaaatgcaaaaaatcatggtgtaacacaaaaagagattgctgcagtgatcacacatgtcgcattctatgcaggttggccaaaagcatgggctgttttcaatcttgcaaaggaagtgtgggaggcaggcgaaggagatttaccatacaaagaggatgcaatgcgtgcgcatgcaaaagagatggtatttccaatcggtgcaccaaatgatgggtttgcacagtatttttctggcagaagttttcttgcaccgatctccacttctcaggttggaattttcaatgtgacattcgaacctggatgcagaaataactggcatattcatcatgcgaaaagtggcgggggacagattctggtatgcgttgccggaagaggatattatcaggaggaaggcaacgaagctatagaaatgaagccaggtgactgcattaatattcctacaggtgttaaacactggcatggtgctgcaccggatgaatggttttctcatctggcaatagaggttccgagcgaaaatggttctaatgaatggcttgaaccggtaagtgatgaagaatatgggaaattacaataggaaggttaacaacaaacggctaatccgttggaaatccaaatattgaataacaacttaatatcatgtatagcaaagctataagatttcaaaaatggagtcttatagctgtttttttgcatttgatcactgtattttaccctctgagcgatagtcccaatgcagaatatctgttgtggaacgaaaaccgtgtgcagatcaagaaagatttgaacgatttgtagatacacttagtgcaatataaaaagacaaagatgaaaaaataaaaaaaggagatgttcgaggtggagacaacgtgatatactaacaatatcatgttgcgtccccttggaggtagaatatgattttaaagagacgtgtatgaatgctggaaagccagtatttacaaggctttgagaagatataaggagataaaatgagcaagataaaagtgttattcatctgtcacggcaatatctgccgaagcacaatggcccaatttgttttccaacacatggtaaacaatcaaggactaaaagacaaattttacatcgactctgctgcaacgagcagagaagaaatcggtaatccaccacattatggaacggtaaataaactaagacaggaaggaatcccagtcctaaaacaccgtgccatccagatgacaaaacaagattacaaagaatacgattatattatcggtatggatgcatggaatctaagaaatatgaatcgtattacaggtggtgacccagatggaaagattcatctgttattagactattccaaatatccaagagacatcgcagatccatggtatacagggaattttgacgatacatacagagatgtagtcgaagggtgtgaagcgttcatgaaatatttaggggaagaacaattataaaactgaaaattactgaaattctgtcatatgtttccgataccacaatggcatcagattcctctgacactgatgattttctcgttctttaattccgatcgtattgaaaaagtctttccatagattaataaacggatcgtctgtctgaatggacagccgatccatttcttcttttgaaagtattgttaaataataatcttgatctgcaggatgaacgacagcgatgaagcgtttatcatcaatgatcatccagttttcagaaggcagacgatcagaaaaatgtggtgcaaccagagttaatacattactctttggctcaatatgacttaccaacacatccccaggcatattcgcaaatcggataaattccacatgaaaatgagcttcatttccaactttacgtttcaattcaaacatccgtataaccacaggttcctgaagaaaatccacaacatgagcaccataatggaatccagcaaccataaaacgataaatcgtatctaatttatcctcggcatcagacattgcagcttcatagatcataatataagcctgataagaaatcttactcttgatagaacgaacgacactggcagttttctccggatcagcatccacatgccgataatcacagaataattccagatttccaatcggttctgtcttcaatttaatattggaatgaccaagtcttgatgcccaggcctcataaacacaagtcatcatcgcatcaaaattatcttcacaggtaaaaacagtcataatagcctccagaataaaaaataacgaaaattacatctgtccaaacaaagttttcgaagaatcttctacagtgacttcagattgaaaattaaaatcatcaaataaagaaagctgtcgataggtctgtggatgatcgatctcccaattttgctttccatcctcaccaatcagctgcctggtaataaaatcttcctcaatcggtatccgatacatcatcttcccgctgcaggtgataaaatacttcgcacgttttaatacaatccccattttcttcaaatgctcaaaattaagagttccatgtttgcgtgcctttacaatacgaaatgcagactttgtcccaattccaggaacacgaagcaacacatcataagaagcacgattgatctcaactggataaatatcaaggtgacgtaacgcccagtcacactttggatcaagcatcgtattaaaattcggccgatctacagaaagtaattcatctgccttaaatccgtaaaaccgtagcagccagtctgcctgatacagacggtgttcccgaagaagtggcggtgcggttccaagagctggcagattagaatcctcattcaaaggaacataggcagaataaaacacacgtttcaagtcatactgctgatataatttctgcgttgttgataaaagctgcagatcactctccccagttgcgccaatgatcatctgtgtactttgaccggcaggaacaaaagaagctggtttcccattattttgcaaacgtaaagtattcttaagagaaggatctgcaagtgtcaatggggaagaaccagtctgaatccgctgataaggattctcttgaaagatcgtatgcttcaaatacttattactttgagaacgttccatagaggcatttttcccgatcatcaaccgatgatccacgattccattctgaatctgacgaattggagcaacaagtttcttcggattcttatgaggagccagtctcttaagcccgtcaattgtaggaagttctagattcacactcatacgatcgacaagatatcccatattcgtgatcaattcatccgaagtgccaggaatcgctttcacatggatatatccattaaaatggtactttgtacgaagcagataaatcgcctgatacatcaattccatcgtataagtcggactctttacgattccagagcttaaaaataacccttcaatataatttcttcgataaaattccacaacaagtgtacagatctcgtccggagtaaatgttgtacgaaccctgtcattacttactcggtttagacaatacttacaatcataaatacattcattgctaagtaagattttaagcaaagacacacagcgtccatccgaagaaaaactatgacagattccagcagcttctgtattcccgagcattcctttctttccacggcgggaagaaccactggaagtacaggcgacatcgtattttgctgcatcagctaaaatcttcaatttttcatttaaagataaatcttttgatgagatttccatattaaacagctcctttcgaatgtatgttctagtttagcataaataaacgtaatttacaaattgtattttgatctgatcattacatatatttgaaaaaaaccaccacattagtgaccattaagatcataaatgtgatggcttttttctagccaagaatcttcttattcgatacagttgcatcctgataagaatatgacttggttgtaagagattctaaaatctgctcaggatgaacaatggcatcttctaaagatgtgacataaagctttttattaccgaagcgggaagcttcgtcgatcgcaacatcagcagcgatcacaatataatcagcttcatcgatctgttcaggggaaaactgattttgaattcccatagctccctgtgtttccacagaaaggtcaatgccaagtttcttacctgcctgttctagtttctctgccgcaacataggtttgaaccattccagtcgggcattttgttacacacaaaattttcatgaaatcctccaatcgtatattactccttcttgatagtcagtatagcatgagatagtagaaaaggaaaagcagaatgatagaaaaaatagtttttgttaaaagtgcatagaaattaagtgaaaatattgttaatattgaccataaacaataacttgtaaagaggaccgtacaagttttaaaataagaaccataaggaaggaggatgtcaaacatgggaaagaacaaaggagaaatgaaatatcacacattaaaggaattactgaagaatgatattttatctggtgtctatcaaccgggagataagatgccgtcagagaatcaactagtacaggaatatgatcttagccgccataccgtacgtaaggcgctgtcaattctggaagaagaaggttatatcattgcagttcatggaaagggaacgttttgtacagaacgggcacttcataaaaaggaatcaaagaacattgcagtggttacaacctatatttctgattatatattccctagattgatccagggaatcaacagtgtcctttccaaagatggctacagcattatttttaagacaacagaaaatagcagacgaggagagacagcatgtcttgaagatattcttacaaaagatattgatggcttgatcattgagccaagtaaaagtgagattgtatgcagacatccaaaactttatgagaatcttgataaatatgaaattccctacatttttattcacggagtctatgaggagatgaaagacaaaccccacattcttatggacgactgtaaaggaggttatctgcttacaaaatatctgatcgatatgggacatcaacatatcgtaggagtttttaaagcagatgatcatcaaggaagagaacgacataaaggttatgtgatggcacttcaggaagcaggatatcaatatgatccagatatggttgtctggtttcatacagaagatcgtcagacgaaaccagtaacatcggttgttcagatgataaaggatcaaagaaagatggatgcagttgtctgttacaatgaccagatcgcattttcaatcattggaggattgcatcagattggtgtttcaattccagaagacttgtcgatcacaggatatgataattcaatgcttgcacatcagcatccactttctttaacgactattgctcatccacaggaaaaacttggcgagatggcaggacagttgttgctagaaaagatacaaggtggatcagataaagacatgaaaacagagtatttgatcgaaccgaaattggtgatcggaaactcatgtaaaaataggaatcaagaatagatataaaactgggaggcaaaaaatggaacttaaaaaaaattacaaattttggtttgcaacaggatcacaggatttatatggagatgaatgtttaagccatgtggcaaaacatgcacaaatcattgtgcagaatttcaatgaaagtggtatcttaccatttgaagttgtatggaaaccgacattaattgatagtacttcgatcagaagaacatttgaagaagcaaatgcagatgaagaatgtgccggtgtcatcacatggatgcacacattctccccagcaaaatcatggatcgcaggattacaggcatttaagaaaccattattacatcttcacacacagtttaatgaagaaatcccatatgacacgattgatatggattttatgaatgaaaaccagtcagcacatggtgacagggaatttggacatatcgtaacaagaatgggaatcccaagagaagttgttgttggatattatgaatcaaaagaagtgaaagaaaagatcgcatcttggatgagaagtgcaatcggaatggtggaaagtaaaaatatccgtgtggtaaggattgcggataatatgagaaatgttgcggttacagaaggtgataaagtcgaagcacagattaaatttggatgggagatcgatgcatatccagtcaatgaagttgtagattatgtcaatgcagtcagcaaaggtgatattgatgcactgacacagttatattatgaaaaatacaatcttttattagagggcagagatccgatcgaatttaagaaacatgtagaggtacaggcaggaatcgagatcggactggaaaaattcttaaaagaccatgattatcaggcagttgttacacactttggcgatcttggtggattaaaacagcttccaggacttgcgattcagagattaatggaaaaaggttatggatttggtgcagaaggtgactggaagacagcagcaatggtacgactgatgaaagttatgacagcaggaaagaaagatgccaaaggaacatcatttatggaagattatacatacaattttgttccgggaaaagagggtatcttagaagctcatatgttggaagtatgcccaacgatcgcggatggtcctgtttcaatcaaagtaaatccattatctatgggagatcgtgaagatcctgcaagacttgtatttacagcaaaagaaggagaaggaatagccacttctttgatcgatcttggacatcgtttccgtctgatcattaataaagtggattgtaaaaagacagaaaaaccaatgccagagcttccagtagcgacggcattctggacaccaaaaccagatctttataaaggagcagaggcatggatcttagctggtggagcacatcatacagcattttcttatgatcttagtgtagatcagatggttgcatgggcagaggctatgggaattgagagtgttgtcattgatgagaatacagatatcagaatattaaagaatgaattaagatggaatgaagtagtttatcgttagaaaatggaggtagtatcatggaaacaaagcaaatgatcgcagatggaaaaacagcattgggaatcgaatttggatcaacaaggatcaaagttgtactgatcgacaaagatcatcatccgatcgcatccggaagccatgactgggaaaatcgtctggagaataatatatggacttatacattagaagacatctggagtggactacaagacagttaccaaaacttggtaaacgacgtgaaagaaaaatatgatattacactaactaaggttggaagtatcggatttagtgcgatgatgcatggatatatggcatttgataaagatggagaattgttagtgccattccgaacatggagaaatacaatgacagaagaagcttctgagaaattaacggaagcattttcttatcacattcctcaaagatggagtatcgcacatctgtatcaggcaattttaaaagaagaagaacatgtaaaagatattgattatctgacaacactggcaggatatgtccattggaaattaacaggtgaaaaggtgctcggtgttggagaagcgtctggaatgttcccaatcgatatcgaaacaaaagattataaccagacgatgatcaagacatttgacgacctgatcaaagataaaagatttggatggaaattagaaaatatcttaccaaaagttttaatagctggagataaagcgggtatcttaagcgaagaaggagcaaaattattagatccatctggtaatctggaagctggaattcctttatgtcctccagaaggagatgcaggaactggaatggttgcgacaaacagcgtgacaagaaaaacaggaaatgtatctgcaggaacaagtgtttttgcaatgatcgttttagagaaagaattaaagaaagtttatgatgagatcgatcttgtcacaacgccatcaggtgatcttgtgggtatggtacattgtaataactgtacatcagatctgaatgcatgggtcaacttatttaaagaatttgcacagaactttggtgtggaagatgtagatatggatcagctttatggaactctttacaataaagcattagaaggtgacaaggattgtggtggattacttgcatacaactatttctcaggagaacatatcacaggatttgaagaaggaaggccattatttgtaagaaaaccagatagtaattttaatcttgcaaactttatgagagttcatctatacacagcacttggagctttgaagacggggcttgatatcttgatgaaagaagaagatgtcaaagttgataaaatgctgggacatggtggattattcaaaacagaaggtgttggacaaaagatcatggcagcagctgtgaatgcaccagtatcagttatgaaaacagctggagaaggtggtgcatggggaatggcgatccttgcagcctatatgctggataaagcagaagatgagacgcttgatacctatctttctgacaaagtatttgcaggggaagaaggtacaacgatcgctccagatgaaaaagatgtggaaggatttgatgaatttatcaaacaatatcaaaaaggtcttgcacttgaacgagttgcaattgatgtcatgtaaaaaggagacgaaaaatgttagaacaattaaaaaaagaagtctatgaagcaaatatggaacttcctaaaagaggtctgatcacatatacatggggaaatgtcagtggaattgatagagaaagtggtttatttgttattaaaccaagtggtgtggattatgataaactttctccagaagatatggttgtcatggatcttgatggaaacagagtggaaggagatttaaatccatcttctgatacaccaacgcatattgaattatataaagcattcaaagatttaggaggaattgtacatacacattccccatgggcaacatcatgggcacaggcggggagaagtattccatgctatggaacaacacatgcagattacttctatggagaaattccatgtgcaagaagtctcacaaaagaagaaattgaagaagcctatgagaagaatacaggattggtgatcattgagacatttaaagataagaatccagtttatgttccaggagtgctttgtacaaatcatggaccatttacatggggagctgatgcagccgaggcagttcataatgccgttgtcttagaagaagtcgcaaagatggcataccgttgcgagcatttaaatccagaagcaaagccagcaccacaatatctgcaggataaacatttcttcagaaaacatggggcaaatgcttactatggccaaggcaaataatgaaaatggatcaataaagatatcagataaaatttaaaagaaagtgttgtaaaatgatgaaagtaaaaatgatcgaaaaaagacaaaatggagtctgcttatttgaattacaaaatgatgagataaaagtgatcacgagtaaccttggttgtcatattttatctgtgttcacaaaagacagagatggaaattatggagatgtcgttcttggatatcaagatgtggaagattgtcataaagatgataaatttttaggatgtatcatcggacgtgttgcaaacagaattgcaaatggagagtttcagttgaatggaaagacctataaacttgcagtaaattccggaccgaatacgattcatggaggtataaatggatttaatcagaagatttttaactatgagattttagaagatggaatccgttttatctatctttctccagatatggaagaaggatttccaggaagtctttatttaaagatagtatatcgtctatctggaaatgaattaaagatggaatacgaagcaatgtcagatcaagacacactgatcaatatagccaatcattccttttttaatctttcagcaaaagacagtaagatctatgatcatcaattgatgatcaaatcagatcagattgcatgtgcagatgagaatggtcttccaacaggtaagtttttggatgtagagaatacaccatttgattttaaaagttttcatgagattggagaacggattcatgatgatgatgaacagttgagatttgttggaggctatgatcattgttttatgttaaaggatgagaaagatcaggcagtcttatatgataaagaaagtggacgaaaattaacgatcacaacaacacttccatgcatgcagttatatgcaggaaactttctggcaggaggaagtgatggtaaatttggaaaaccatatgagaacagagatggtgttgcattagaaccacaattcttgcctaattctatgaatatagagaaaaagccaagagttatcttaagaaaaggcgaagagtatgaagcagtgacaacataccgatttgaaacagaataatatagattgaaattaaaaaataagaatcatatccatacaatatccccttcccctttttatttgtatggatatattcttgtttatttctggaatataattctataagagagtataataatattttagaaaagaggaaggtaatatgatcaaagtatttttagtagaagatgaaaagatcattcgtaagagtataaagaataacgtaaaatgggaagaaaatggttttgaatttgcgggagaagcaccagatggtgagatggctcttccaatgatcgaaaaactacatccagatatcgtgatcacagatatcaagatgccatttatggatggacttgaattaagtgatatcttaaagaaaaaaatgcccaaaatacagatcatcatactttctggatatggggagtttgactatgcaaaagaagcgatcaagatcggtgtaacagattatctgaccaaaccagtaactggtgagcagttattagaagcactaaataaagtaaaacaaaagcttgataagaaaaaaagacaggaagaagatataaaaaaattacaaaaaaatataaaaacacaaatgaaaaatatgagatatcaatttttcgggaatctgatccgcggaaagatatctgtatctaaattaatggaacaagggaatgaacttggaatagatcttatggcaccggcatacaattttatgttatttaaaatattttcaaagaatgagaatgatacagaggcagtatatgatcttcgtaccaaagaagatgcgatcgtagaagaagtaagcagccagtttgaaaatatgattgtttttcaccgtgtaacagagggctatattttaatgatcaaggcacagaataaagaggaaaccatacaagtggcaaaagattatgttgcagcattgacaaagcgtatgaaaaaagagaaagaactacaatggtttgcagggattggacgtgcagtggaacgattacataacctttcggaatcttacgacagtgcaagcaaggcttttgcataccagtatcagtcttctgggaatgaagcggtgttttttgataaattagataatgaaaagatagaaagagcagaagatctgcagcaagtagattttaccaaagtaaattcagaatcgctggaagagtttttgaaaaatggaaaagaagaagctgtacatttatttgtagaggattataccaagacattaggaaaatctaatatggattcctttatgttttgtcagtatatgctgatcaatatacaggtaggtgttatgaaattcgttgagaaaatgggagttgagaaagcaaatatcgatcgcacgtttaaggattacaaacaacagatcgctgcagtttcaacaggagagaaagcagcggagtatatcgaagaacttatcagacaagcgatcagaatgagaaatgaaagattagggaagaaacattcttcgttgataacggaggcaaaagaatttattgtgaaaaattatcaagaagaaacattatcgttgagtgatgttgcagatcaggttggattaagcagcagtcattttagtacaacgtttaaacaagaaacagggaaatcttttgtggaatttttgacatcagtcagaatggataaagcaaaagaaatgctttgttttacagatatgaaggcatcacagatcagctatgaagtgggatataaggatccacattactttagctacctgtttaaaaaaacgcaaggatgtactccgagtgaatatagatcaaggaggatgtaatgaaaaaatatgtgagagaatttattgctcgatttcggaagttctcaatagaaaaaaaactaaaatggttaaggatggtcgtgataattcctgcgttagtggggattatcacgcttcttgttatcatgataaattttaatgaaagttataatgaggcggtaaaaaacgtatcagtagctagcaagtttaatttctcattttcagaagatatggattataaaatgtatcgtattgttatcggtgcagagagttttgatgcgatgaaaccatatgaggagattaaggaagcgaaggagctggtaaaggaactgaataaaaatgctgtaacagatgaaagtaaattaagaacgagacagataggaaaactgttggataatctgaagatttccattgaagaaattgaacactcagatctaaaaaacgattatatggaaaataatcagagattaagattaaatgtgaatgtatttacagagatcattaaagaaaaagtatccgaatacatttactatgagattgggaatatggagagtatgcgtgtaaaactggaaaaagaaatcatgcatacgatcacgatcacattgatcgctgtactgtttttgtctctgataacatggaaattatcgaaattgatttcgcaaagcattagttatccagtcagacagttatgtgagatgacaaaggaagtggcgcagggaaattttgatgtacatggacctcaaaatacaacagaagagttgcagatcttaacaaataatttcgaacatatggcacaaaaggtagagagattgatcgaagatgtaaaagtagaacaacaaaatcttcgaaaaaaagagctgcagttactacaagagcagattaatccacatttcctttataatacattggacacgatcatgtggcttgccattgatcatcaggatgacaaagtggtagaaatggtagctgccttgtctggctttttccgtacaagtttaagtcacggagaagataagatatcgatcagggaagaattagagcatgttgaaaattatttaaagatacaacaattaagatacggggatattatggaatattctattgatgtcccagatgagatcaagaaaaatgatattgtaaagatcactttacagccattagtagaaaatgcattatatcatggattgaaaaaacaaagagaaaaaggaatgataaagatttccagtgtagatgatgaaaataatatattcctgatcgttgaagataatggagttggtatgcagcctgagcaggtagttcagatcaataaagaaatgtatgaagatatatgggtaaacaggacaacagggtttggaattgcaaatgtaaatcggcggattaaattatattatggagaagaatatgggttgatccttgaaagtgaaccagatattggaactaaggtgatcgtagttgtaccgaagactagacaagcagagaaaaaataatcaaaaatcaaaaaaattcaaaccattatcaaaaaaaatcaaactttaaacagacaagataaaaatttcataaaataatccaccgaatgcaaaagaaattgcattgaaagaaatacaatttcaagtaaaatataacttgtaattaaggaaaacgaaaaaatcaaaaaagaaaaaggaggaaatcataatgagaagaagtattaagaaggtggctgcaggtttacttgcaacaatgatgattggaacaatgcttactggttgtggtggaggaaacaagaaagacagtggttcttcaaagaaggaaacttcagagatcaacatcggattttcacaggttggagctgagagtgattggcgtgtagcgaatacaaagtctatgaaatctgcattaacagcaaagaacggatttaaattatcatttgcagatgctcagcagaaacaggaaaatcagacaaaagcggtcagagaatttatcacacagggtgttgatgtgatcgcaatcgcacctgtaacagaaacaggttgggaaacagttttaaaagaagcaaagaaagctgacatcccagttatcacagttgaccgtcagatcaaaacttctgatgattcactgatcacagcatgggttggatcagacttcaaaaaagaaggtgtgaaagcggctgaatggttaattaaagaaaagggaaaagaaaaaggtgacgtaaacatcgctgtattacagggaacgattggttcttctgcagaaatcggacgtacaaaaggatttaaagaaggaatcaaagatcagaaaaacttcaagatcattgcttctcagacaggagaatttacacaggcaaaaggtcaggaagttatggaatctttcttaaaacagaacaaagacattgatgttgtagtagcacagaatgataacatggcattcggagcaatcgatgcattaaaagcagcaggaaaaacacctggtaaagacgtaacgatcatttctttcgatgcgatcaaagcagcattaaagaaagttcagtctggagagatcaatgctgaatttgaatgtaacccacttcatggacctcgtgtagctgaattagctaagaagatcatgaaaggtgaaaaagtagataagatccagtatgtagatgagcaggtatttacaaaagataatactacaaaagaagttattaacaaacgtgcatattaataaacattgttgaaaatccccttaagtacacacatgtaactattaacaatcgcactacaaataaagattgcaggctctgggtcaggacaatctgacttatcctgtaatttttatgccaaaaatcagggcattttcattaaaatcggctcaaaaatcatgaaaagaaaggagaattgtcatgagtgatgaaaagaagacagttctatccatgcgacatattaataaaacattcccaggagtgaaagcactgtccgatgcacagcttacattgagagaaggagagattcatgccttaatgggagaaaatggtgcaggaaaatctacactgatcaaagttcttacaggagttgaggaatttgagacaggtgagatcatcatggatggaaaaagtattattaacacatcccctcaagaagcgggaaacaatggaatcagcaccgtttatcaggaagtaaacctgtgtccgaatctaacggtagcagaaaatatttttatcggaagagaaccaatgaaaatggggaggatcgactggaagacgatgaatacacaggcacagaagatccttgataatctggaattagaaattgatgccacacaggaattggaaaactattccgtagcgattcagcagatggtggcgatcgcaagagcagttgacattcagtcaaaagtattgatccttgatgaaccaacatcaagtcttgatgaaggagaagttgagaaattatttaaggttatgaatatgctaaagaaacgcggaacagcgatcgtattcgtaacacactttttggaacaggtctatgcagtctgtgacaggatcacagtacttagaaatggacattttgtaggcgaatataagacagaagagcttccaagatttaaattagttgcaacaatgatgggaaaagaatttgatgatctggcagacatcaaaggaagtggaacatcatcaaagaaacaaagcgacgaagttgtgatcgaagcaaaaggtctttatcataaaggaacgatcaaaccatttgacattaagatccataaaggagaagttgttggattatctggattattaggatctggacgttccgaacttgtaagagcgatttatggagcagataaaccagatggaggagaattatatgtcaaaggagaaaaattagatgtcaaagcgccaattgatgcaatgcataaaggaatggcatattgtccggaagatcgtaaagtagaaggaatcattgcagatctttctgtaagagaaaacatgattttggcacttcaggcaaaacgaggaatgttcaaactgatgagcagaaaagaacaggaagagttgacagataagtatattaagatgctgcaggttaagacagcaagcagagaaacaccgatcaaatcattaagtggtggtaatcagcagaaagtaatcctcggaagatggctgatgacagaaccagatttcctgatccttgatgaaccaaccagaggtattgatgttggaacaaagacagagattcagaaattagtcgtaaaacttgcaaatgaaggaatgtctgttgtatttatttcatccgaagtagaagaaatgcttcgtaccgtgactcacatgggaatcttacgagatggtgagaaagtcggagaattggaagaaagtgaattatcacaggaaaatgtaatgaaagcaattgcaggaggtgacaaataattatggataaattaaaaaagatgacatcatatcgcctcttctggccaattgtatgtctggcacttgtattattatttaaccttataaaatccccatcattttttgaaatctcaattaaaaatggtgtgttatatggatatctggtcgatattttcaaccgatccagtgaattgatcatcttagcagttggtatgacactttgtgtagcatccagtgcaggaactgatatctctgtcggagcgatcatggcattatcaggagctgtatctgtttatcttcttggaagtggagaaacatatgcaattccttggatcgcagcaatcctgatcgggcttgtggtatctgtattatgtggtatgtggaacggattcttagttgcgaatatgaagatccagccaatggtagcaaccttgatcttatttaccgcaggacgaggaatggcacagttgatcacaggtggaaataacttatatgtcaaggtggacagctttaagtatttaggaggatttctgccacatattccagttccaacaccgattctggtagcgatcatcgtagtcattttagcaacattattcttaaataagacagcaacaaaattgtatattgaaagtgtaggtatcaacccaagagccagtcgtttgtttggactgaattctacaaagatcatctttatcacatatgcagcctgcggactttgtgcaggaatcgctggaatgatcgcaacatcaagaatcacatccattgatgcaaataacgtaggaaacttgatggaattagatgcgatcttagcagtagcacttggaggaaactctcttgcaggtggtaaattctcagtcgcaggaagtgttattggagcgatcacgatccaggcattatctacaacattatatgcaatgaaagtaactggagatcagcttccactttataaagcgatcgtggttatcataatcgtgacattacagtctccagaatttaagaaatacttaaatcgtattaaagcaaaacgtgcagcaaaaactgctggagagaaggtggcataatggcaatggtagagaaaattaaaaataaacttagaggaaatggatttttgcttgcagttacgatcgtattattcttcgtgctctatattgcaggtgcgatcctttacggagatcgaaactttacaagcccacaggtgtttttaaacttgttcattagtaatgctggattgatcattgcagccgttggtatgacatttgtactgatcacaggaggaatcgatatttcgatcggttccgtcatcggtgttgtttgtatgatgcttgcatggatgatggaagtgaagcatatgagcgcagttgttgcaattattctggtattagcatttggtgtgattttcggattggttcaaggatttttagtagcttatttaaaaatacagccattcatcgtaacacttggaggaatgttctttgccagaggtcttacagcattgatcagttccgatatgatcagtattgaaaatccaacatttttaagccttgcaaactatcgaatttattttggatttattacatattacaacaaccgaggagttgcaatgcatccttatatctacctaagtgttgtcattgcattgttggttgtagcgatttcttttgtgatccttcgatacacaaaatttggacgtgccgtatttgcagtaggtggaaatgaacagtctgcattattaatgggattaaatcctaaagttacaaaattaaaagtttatgtgttaaatggatttttagcatcattagctggatttgctttctgcttaaactcttgtggtggattcgtagagcaggccagaggatttgagatggatgcgatcgcagcagcagttattggtggaacacttttaacaggaggtgttggaactgtcgtaggatcactatttggatcactgatcaagggtatcattgaaacgatcattacattccagggaacattatcatcctggtggacaagaatcgtgatcgcattacttctttgcttcttcgtaatcttacagagtgtatttaaatcaattcgtgagaagcgtcttgcacaaggtaatgaaaagtagatagttatatttggttgatgtattaaaggaggaaaacaatatgaataatatgccaaaaacaaagatcgggatcgtagcagtcagtcgtgactgcttcccagaaagtttatcagttacaagaagagaagcattgataaaagcatataaagaaaaatatgatcctgaggacatttatgaatgtccagtctgtatcgtggagagtgagattcacatggtacaggcattagaagatattaaaaaagcaggatgtgatgcattagttgtttatcttggaaactttggaccagaaatctcagaaacacttcttgcaaaacactttgatggaccaaagatgtttgtggcagcagctgaggaaagtggtgataacctcttagatggaagaggagatgcatattgtggaatgttaaatgcaagttataatctgaaattaagaaatataaaagcatatattcctgaatatccagtaggaacagcagaagaatgtgcagatatgatccatgaatttttgccaatcgcaagaacagtaaaagcattaagtgaattgaagatcataagttttggaccaagaccactgaacttccttgcatgtaatgcaccgatcaaaccattatatgatcttggaatcgaaattgaagaaaactcagaattagatttatttgaagcatttaatcagcatgaaggggatgaaagaattcctgcgatcataaaagaaatggaagaagaactgggtgcaggaaataaaaaaccagagattctttccaaacttgcacagtatgaactgacattaaaagactggatcagggatcataaaggttacagaaaatatgtaacaattgccggaaaatgttggccagcattccagactcagtttggatttgtaccatgttatgtaaacagtcgtttggcagcacagggaattccagtatcctgtgaagtagatatctatggtgcattaagcgaatttattggaacggttgtaagtcaggatgctgtgacattattagatatcaacaactccgtaccagcagatatgtataatgaagaaattaaagataactatgactatacacaaaaagatacatttatgggattccattgtggaaacacagcaaaatctaaattatctttctgtgagatgaaatatcagaagatcatggcaagaacattaccggaagaagtgacacagggaacattagaaggtgatatcgcaccaggagatattacattcttccgtttacaaagtacagcagatacaaaattaagagcgtacgttgcacaaggagaaatccttccagtagcaacaagatctttcggatctattggtgtatttgctatcccagaaatgggaagattttaccgccatgtactgatcgaaaagaatttcccacaccatggagctgttgcttttggtcattttggaaaaactttatatgaagtattcaaatacattggtgttgatgtcgatgagattggatttaatcagccaaagaatatgctttataagactgagaatccattttcataaataaattttacctattaactttttactccttcttgggaaaaactgcatgcggttagcatgcagttttttctatgcttagaaaaacaagtaaaaatattactaaatattatgactgtttgcgcggagcagcacaagagttacggacaataagattacatggaagtgtcagacgaatcggagtctgctgctccagagaatcttcttttgtccgaagtaaaatataatgagcagcatattctcccataaattcagccggtgtatgaatcgttgtcagcggagggtttgaaaaacttgcaacgctgatatcatcaaaaccaatgatggatatatcatctggaattttataaccattctcatataaagcacgcattgcaccgattgcaagaggatcactggcagagaaaatagcggttggaaggtcgccatcagcaatcatttgttttgtcatgttatatccggattcagcagaataatctccctcataaataaaagattcatggtcaatggaatgttcctggcagaagttgatgaaggtatctttacgttcttcaaaatatacactgttatcagcgagaacttccttcccgccaagataagcaatctttcgatggccaagatcatacaaataatctagtgcttcagtaactgcctgttggaaatcaagattgatcgtatcacaataaatctttggtgtcttcatatcaacaaaaatagtgttggaattaagtttttgaaaagacttaatctgagatttattaaatttaccaatacaaatcagaccttgaagatccttgagtgtgtcaggataattgcaatcgctctggaaagcacggacaacgtggatattatgatcggcacaatatttttcaataccgacacggattgcctgataataaggatcttccagttcctgaaagacagaataccattgaaagataccgatagaaatcgatttttcaacggtattttttagatgctttgtataatttaattcctgggcaacctttaaaacgcgctgttttgtttcgtcggttacactcagggtatcgtcttggtttaaaattcttgatacagttgcagcagaaacagatgctttctgtgcaatgtctttgattgttgccatggagataaaatcctttctcataaatattaatttatctcattataacagagaaaagcacaaaagtaaatttagtaaaataaaagtaaagaatttagtaaaaatatattgacaattttactaaaaagttttactataaaagtatcaaagacagcttactgaaaacaggaggaaagaaaaatgggaacaactaatggaaaggttccaggcagagtaaaatatacttttgcatttggagcattgggaaaagatttaatttatggaatgatggcgacattcgctatgatctactttacggatgtgttgaaagtatcaccgggttttgtaggaatcgttttctttgtagcaaaactttgggatgcatttaacgatctgtttatgggaatgatcgtagataacacaagatcacgctttggaaaattcgtaccatggctagtgatcggaactttagtcaattccgttgtgtttgtcgcattatttactgactttaaattaacaggaacttcactttgcatcttcgttgcagtgatctatgtattatggggaatgacttatacgatcatggatattccatactggtctgtaattccaaaccttacatcagatccacacgaacgagaagttgtttccgttttacctagaattttcgcaagtattggacagtcattagtcatcgcaggattcggtgttcagatcattgcagccttaggtggaggatatatcggatatcatcgttttgctatgatcattgcaggaacatttattcttacgatcggagttgcagtctgcaacttaaaagtaaaagaaaacaatgcaccaagtgagaagatttcttttaaagatgtattctcaatcattaagaaaaatgaccagttacagtcagcagtaggactgatccttctatataatgtaggaattcagtttatcatgggtgttgcagtttactactttacatatgtatgtggaaatgccaacatgttatcagcttttatgatcagtgcatctatcgcagaagttgttggattgatcatcttcccagaagtagcaaagaaattatccagacatacatcatttttactggcttgtatcttaccgtttattggcttagcattattattagtcgttggatttgtatgcccacagaatatcgtattaacagcagttgcaggagtgatcgtaaagacaggaacaggattagaacttggatgtgcgacagtattcttatctgatgttgttgactatggtgagtacaaactgggaacaagaaatgaatccgttgtattctctttacagacattgatcgtaaaatttacagcggctttaacatcacttttcattggatttgcactggaacgtacaggatatattccaaatccaaacgctgtacagtcagcactgacattgaattctatcagatttttaatgtgtgcgatcccagcggtgtccatgcttgtagcctatgtagtttataaaaaagcatatcatctggatgacagttttatgaagaaagttattcagacaatcgaagaaaggagagcaaaccgccatgccgaacagtattaaaaaattagaagaagcttttaaagaaggaaaatatgatcagttattaaaagatatctatgtagatgaaagtgttcttgcatatcagcaggaacgctacatcaaagcattagaatcctttgaaaagatttatggagaaaaagaagtagaaatctatagtgctccaggaagaagtgaagttggaggaaaccatacagatcatcagtttggaaaagttcttgcaacttccattaacttggatgcgatcgcaatcgttgccaaaagagatgacgatgtgattgatctgaaatcagagggatatgaaagaatcatagttagtcttagttcttttgacccagccaaagcagaaaaaggaacatcacaggcactgattcagggagttgcttctaaattaaaagaagaaggatataaaatcggtggatttgaagcttatgtaacaagtgatgtattaaatggggctggaatgtcatcttctgctgcatttgaagtattgatcggaaatattttatctgggttatataacgatatgaagatcgatcctgtatttttggcgcaggccggacagtatgcagagaatgtatactttggaaaaccatgtggattgatggatcagatggcatcttccattggaggtctgatcaatattgattttgaagatcctcaaagtccaaagatcaaaaaggttgaagtggattttgaagaatatggacacagcttatgcattgtggatacaaaaggatctcatgcagatttaacagatgattatgcagcaattccatacgaaatgaagaaagttgccaattactttaatcaggaagcattaagagaagttgataaagatgatttttacttaaatctaccaaagattagagaaatcttaggagatagagcagttcttcgtgcaatgcatttatttgaggaaaataaacgtgtagatcagcaggtaaaagctttagaagaaggagattttgatacatttaagaaattgatcaaagaatctggtgattcatcctttaaatatttacaaaatgtatattcaagccatgacctgacaaatcagagtgtatcaatcggattggcgatcagtgatatttccttaggagataaaggagtcagccgagttcatggcggaggatttgcaggaacgattcaggcgtttgtgccaaatgatattgttggtatgtacaaaaagaacatggaacatgtatttggtgaaggagcatgtcatgtcttaaaagtacgcccatacggaggaatgaaggtattataagatgatgaaagtaagaatgatagaacaaagagataacggagtctgcttatttgaattaaaaaatgatgagatcaaggtgatcacaagtaatcttggatgtcatgtgttatctgtatttacaaaagaccgagaaggaaactttggagatgttgttcttggatttgagaatgtggaagattgctggcatggagatggaagttacatgggggcgatcgccggacgtgttgcaaatcgtatcggagatgcaaagtttgaattaaatggaaagacatatgaattggcagcaaacaatggaaagaattctctccatggaggaatcaaaggatttaatcaaaagatatttaaatatgaattgctggaagatggaatccgttttatctatctctcaccagatatggaagaggggtatccgggaagtctttatctgaaagttgtgtaccgtttatgtggcaacacattaaaaatggaatatgaagcagtatccaatcaggatacgctgatcaatatcacaaatcattcttactttaacttatcggctggaaaagataaaatttatcatcatcagttaaaggtaaaagcggatgagattgcatgtgttgatgaaaactgtcttgccaatggaacatttttaaagatagaaaacacaccatttgactttaaagaatttcatgagatcggagagcggatcaacgatgatcatgaacagttaaaacttgccggaggttatgatcattctttcatggtaaaagatgaagatgaccagttagttctatatgacaaagaaactggaagaaaaatgacgatgacaacaacacttccatgcattcaggtatacacaggaaactttctgtctggcggatgtaatggaaaaggtgggaaaccatatgaaaacagagatggtgttgccttagaagcccagttcttaccaaactccatacatatagaaaaagaaccaaaggtaattttaagaaaaggcgaagaatacgaagcagtaacaacatatcgatttgaggtggaataagatggatttacaaaaagatatcaaaaaacttgtaacatatggacttgataaaaaactgatcatgccagaagatgaaatctatacgatcaatcaatatctggaactgtttcgattagatgaatatgaagatcctgatattgaaggagaagaaatcatcctgccagagattttagatcgtctgacagatacagcttatgatcgctatatcatcaaaagtgatgatatcgtgacaagagatttatttgacacaaaattaatgggaatcctgacaccaaaaccaagccaggtcatcaaagaattccgtacctattacgaagagagtccaaagaaagcaacagagtttttctatgaattcagccaggataccaactatatccgaagagaccgcgtcaaaaaagatatgaaatggaaagtaaatagtccatatggagatattgatatcacgatcaatctctccaaaccagagaaagatccgaaagcgatcgcagcagcgaaaaatgcaaagcaaagttcttatccaaagtgtcagctttgcatggaaaatgaaggatatgcaggaagaatgaatcaccctgcaagacagaatcacaggatcataccgcttacgatcaatgacagaaaatggggattccagtattctccatatgtatactacaatgagcattgtatcgtatttaatggacagcatgtaccaatgaagatcgatcgggcagcatttacaaaactatttgattttgtaaaacagtttcctcattatttccttggatcgaatgccgatcttccaatcgttggaggttctatcttaacacacgatcatttccaaggcggtcattatgaatttgctatggaacgagcagagattgaaaaagaatttacaatcccaggatatgaagatgtcaaagcaggaatcgttcactggccattatctgtgatccgtattcagagtaaagatgaaaaacgcctcattgatcttgctgatcatattttgaaaaaatggcgtggatacacggatgaagaagcatatatttttgctgagacagaaggagaaccacataatacgatcacaccgatcgcacgtaaaaaaggtgatatgtatgaactggatctgacacttcgtaataatatcacaactgaagagtgcccattaggactttaccatccacacaatgagtatcatcatattaagaaagaaaatatcgggctgatcgaggttatgggacttgctgttctgccatctagattaaaggcagagatggaacatttaagccagtgtctgatcaaaggagaagatattgtttctaaggaagatttaaagaagcatgcagcatgggttgaagaaatcaaaggaaaatatacagatatcaataaaggaaatgtcatggatatcttaaaagaagagatcggacaggtatttgttaaagttcttgaagacgccggagtttataaatataatgaagaaggaagaaaagcattcgaccgatttattgcagttttataatgacaaggtcatagaaaggaaagcaagacaatgaaaatattagtattaggcggagctggatacataggttctcatacagtatacgaactgatcgatgctggagaagaagtcgtgatcatcgataatctggaaacaggacatatcgaggcagttcatccacaggcgaagttttataaaggagatttaagagataaagactttgtagatagtgtactagatcaggaaaaagatattgatgcagtcattcattttgcggcaaactccttagtcggagaaagcatggttgacccattaaaatattacgataacaacctttgtggaacaaaaacaatggtgcagtctttagtagaacatggcatcgataagatcgtattttcttcaacagcagcaacttatggagaaccagaaaaggtaccgatcgtggagacagaccgcacagaaccaacaaatacctatggagagacaaagctttccatggaaaaaatgttcaaatgggttggacgcgctcatggacttcgttatgtatctttaagatactttaacgcctgcggagcacatgtaagcggacagattggtgaagatcataatccagaaacacatctgatcccattgatcttacaggtgccaaatggaaaaagagaagcaatcagtatctttggaactgattatgatacaaaagatggaacttgtgtaagagactatattcatgtaacagatcttgcacaagcacatattctggcagtgaaatacttaatggaaggtaatgaaagcaacatcttcaatcttggaaatggtgttggatttactgtaaaagaagtcatcgaaacagccagaaaagtgacaggaaagccgatcaaggctgtggaagaaggaagaagagctggagatccggctgtcttgatcgcttccagtgaaaaagcgaagaatatccttggctggaagccagaacatgcagatcttgaagaaatcattgcatccgcatggaaatggcacagcagccacccacaaggatattgttctgttcaaaaggaagacaaataactctttttgaaccataaatcatccccgtaccgtttagagcatattacctggctctaagcggtacttttttgttttcgtaaaatatctggtacgatgttcaaataaaaaataaaatggtgtatactaaagaaaatagtaagataaaagaaggagtacgaatcgatgaaacggttactaggatatttaaaggagcatctttgtgttacgattcttgcaccattatttaagatgctggaagctagttttgaactatttgtaccattggtcgttgccagcatgattgatgtaggaatcggacatcacgatattggatatttgtggaagatgggaggattattgatcttacttggaatcattggattttcattttctatcacagcacagtattttgcggcaagatcggctgtgtatacaggaaagtcgatgagaagtgatttgtttgcacatatgaatcaattttcttatcaggagattgatcaggttgggacatcaacgctgatcaaccgcatgagtaatgatatcaatcaggtgcaaaatggagttaacatgttcctgcggttgtttttaaggtcaccatttgtcgtatttggtgcgatgttcatggcatttacggtggatcataaggcagcagtttcctttgtatttacgatcacagcattggcagtagttgtcggactgatcttatggatcacgatgccaatgtataagaaagtacaaaaacaggtcgatggagtattaaaaagtacaagggaaaatcttcttggaattcgtgtgatccgtgcatttaacagacaaagaagcgaagaagagaatttcagagtacaaagtggacagctttatagcaaacagatccatgttggaaagatttcagcgttactaaatcctctgacttacatgatcattaatttggggatcattgcaatcctatggtctggtggaaaacaggttgatctgggttatttaacacaaggacagatcattgccctgatcaattatatgtcacagatccttgtagaacttgtaaaacttgcgaatcttttgatcattttatctagagcgtttgcaagtcttgaccgtgtggatcagatttttgcattagagccatccatgaaggaaactggaaaaacagatatagaagagaagaaagatacacctattcttgagtttaaagatatatcgtttgtctatcatggtgcaagaaaagagacgatccatccatttgattttgcggtgaaagaaggcgaaacgatcggggtgatcggaggtacagggtcaggaaagagtacttttgtatctttgatcgcaagattatatgatgtgacatcaggaagaattctataccgtggagttgatgagaaagaattaaagccagaatttatccgaggaaagatcggatttgttccgcagaaagcatctttgtttgaaggaagcctaagagataatatgaaatggggtaaagaagatgccacagatgaagaaatctatcaggcattggatatcgcacaggcaagagaatttgttgatcagaaggaacagggattagactttagaattgaacaaaatggaggaaacttatctggcggacaaaaacagagactaacgatcgcaagagcattagtacgtaaacctgagatcttaattcttgacgatagtgcatccgcacttgactttgcaacagatgcaagacttcgaaaagcgatcaaagaaaatacagataatatgacagtatttcttgtatcccagagagtatcaacgattcgtaatgctgaccatatcttagtgttggatgatggaaagattgcaggaatcgggactcatctacagctattaaaagagaatcaggtatataaagaaatctgcgcatcacagatggcaggagaggaggcataagatcatgaagaaagacaaaaaacaaaagacattacaaaggatcatggaatatatgaagccttatcgatttttgatctttgcgtctttagtgttggcggtgatcagtgtggcactgacactttatgttccgattctgacaggacaaggtgtggattgcattatatcaaaaggaaatgttgattttgcaagattgataagtattataaaaacgatcgtgatctgtatcgtattgacggcagcagcgcagtggctgatgaatcatgtcaataaccagattacatataagattggaaaagatttaaggattcaggcatttgagcatttgcagaaactgccattatcttatgtagatgcacactcctcaggagacttgatcagccgtatcgtaacggatattgatcagtttacggatggattgctgcttggatttacacagttatttactggtgtgatcacgatcattggaaccatttgttttatgttaggaatcaatccatggatcacattagtcgttgttattttaagtccgttttcgttttttatcgcaagttttatctcaaagcgaagttttaatatgttccggaaacaatcacagactagaggaaatatgacaggatttgtcaatgaaatgcttggaaatattaaagtggtcaaagtgtttgatcatggagaaaaagcacaggaagagtttgatcagatcaatgatgatcttgcatattactccttaagagcgacatttttctcatctatcacaaatccggcaaccagatttatgtattcaggaatctatgcaggggttgcgatcgcaggatgtatgagtgttattcgcggaagtatcagtgttggtcagttatcaagttttttaagttatacaaaccagtatacaaagccgtttaatgagatcacaggggttatcacagaatttcagaattctttagcttctgcggcaagagtttttgaattattagatgaggagccgatgattcctgatgccaaagatgcgaaggagttacaggatgtgaaaggaaatgtagaattagagcatgtggacttttcttatgtgaaagaagtacctttgatccaggattttaatctgaaagtggaaccaggacagcggattgcaatcgttggaccgacaggatgtgggaaaacaacgttgatcaatctgttaatgcgtttttatgatgtgaatgtaggaatgatcaaggtggaaggaaatgatatccgggatgtcacaagagaaagtttacgatccagttatggaatggtacttcaggagacatggttaaaagcaggaacgattcgtgaaaatatctgctatggaaaaccagatgcaactgaggaagagatgatcatggcagcaaaagaagccaatgcacatggatttatcgagcgaatgccagatggttatgatacgatcattacagaaggtggcggaaatctctctcaaggacagaaacagctcctttgtattgcaaggatcatgttaagtcttcctccaatgctgatcttagatgaagcgacatcatcaattgatacgatgacagagatccgaattcagaaagcatttgaaacgatgatgaaaggaagaacaagttttatcgtagcccaccgactttcaacgattcagaatgcggatgtgatacttgttatggaaaatggacatattttggagcagggaacacatgaagaacttttggagaaaaatggtgcgtatgccagattatataacagccagtttgcaccagtataaatggtaagatttttgactggagatgtcatatggaagaaaaaggaatgaaaaaaaagaaaaaattattgaggttgtttatagaaacattttatttaagtgcatttacctttggtggcggctatatgatcgtatctttgatgaagaagaagtttgtgaatgaatatcattggatcgaagaagacgagatgcttgatctggtggcgatcgcacaatcagccccaggagcaatcgcagtgaatggagcaatcgttgttggctataaattagcaggtatcagtggtgtgatcgtaagtgtattcggagctgttctaccgccatttttgatcatatctgtagtctctgttttttatgaaatatttcgggataacaggattgttgcagcgatgctttctggtatgcagatgggtgttggtgcggtgatcatcagtgttgtgtacgagatggcaaaagggcaaagtaagaaggaaaacagaatagaacttgcgatcattatggttgtggcatttatggcaagttatgtctttaatattagtgtgatctacattattcttgcatgtattggagttggaattgtacaatatggtatttcaagaaagaagacaggaggcagagaatgatctatttgcaattatttttaagcttcttaaagatcggagcatttagtttcggaggcggatatgcagcaatgccaatgatacagcagcaggtggtagatgcatatcattggctgtctgtatctgaatttggagatctcgtgacgatttcacagatgacaccgggaccaatcgcaattaatgcggcgacttttgttggtataagggtagttggatggcaaggagcattatgtgcaacgatgggatgcgtattcccggcgtgtgtgatcgttacagtgattgcttatttttatgtaaaatatcgtcatatggaaggactacaaatggtgttaaataccttacgtcctgcggtgatcgcactgatcttaacttctggaattacgatccttacgcaggcattttttcaggaaagtcatatagatcttcaacagatcaactggatacagggtagtatttttatcatttgtatgtaccttttattgagaaagaaaaaagatccgatcattgtcatgctgtttgcgggtgtgctaaatgtgattggaagctttttcatttcgtaggaaatttcaatgaaatcccctatgaaataaaaaaatgggaatataaacgatgagagtggtaaaagtataaataaaacaataggaagtgatagatttgagtaagatgcaagaagcgaagaaactattaaaacaatactttggatacgatgaattccgccaaggtcaggaacaattgatcgaggcagcattaaatgggcaggatgtcttagggatcatgccgacaggagcaggaaagtctctttgttttcagattccagcattgatgatggatggaattacacttgtgatctctccactgatctcgctgatgaaagatcaggttgggacactgaatcaagccggaattcatgcggcatttttaaatagttctctgacacagggacagtatcataccgcattaaaatatgcgatgcagggaagatacaagattatctatgtggcaccagaacgcttggaaacagaaggttttatcaattttgcgctaaatagtggagtgaagatatcaatgttggcagttgatgaggcacattgtgtgtctcagtgggggcaggatttcagaccaagttatctaaagattttggaatttttaaagaaacttccgtatcggcctgtactgactgcatatacagcaacagcgacagcagaagtcagggatgatattatggatattttgaacctgagagatccatttgtattaacgacagggtttgatcgggagaatctttactatgcagtaaaacgtccaagggataagtatagagaattactaagttatttaaaagaaaaagaagaaaagatgccaggaagcagcgggatcatttactgtttatctaggaaaaatgttgaggaagtctgctatcagttaagagaagatggattctccgtgacaagataccatgcaggattatcggatgaagaacgaaaggaaaatcaggaagattttatctatgacagaaagcagatcatggtagcgacaaatgcctttggaatgggaatcgacaagccggatgtccgttttgttgttcattataatatgccgaagaacatggaaagttattatcaggaagcaggaagagcaggacgtgatggagaacctgcggaatgtatcttatattatgcgccgattgataaccgaaccaatcgttttctgatcgaaaatggagaggagaatgaggaattagatgcaatcacaaagcagatcgtgatggaaagagactgggaaagacttcgtcagatgacattttactgctatacgaaggaatgtttacgtcattatattttaaattattttggagaacagacaagcggatactgtggaaactgcttaaactgtctgaccgagtttgaaacggttgatgcaacaatggaagcgaaagctatcatccaatgtattagagattgttatcgagatttcggactatccacgatcgttgatattttaaaaggttcaaagagccagaaagtattaagccgtcatttagatgagaattcacaatatggagcattggcatcagaaagcattgcaaggatacgacagatcatcaatgaaatgttagtctatggatatctggaaatgacagctgatgaatatccggttttaagcgttgcagacattactaagattgatgataactggaactttgagatcaagattccaaaagaagtcgaaaaagagaaagaagaacgcaagattcagacgaagaaacgtaagaaagcaggggctgtggcagcacttgctgaggaagatacagaattgttcgaagcattacgtgtacttcgaagaatgatcgcatccgaacagaaaatcccgccatatatggtattttccgataagacactggtacatatgagtacgatgaaaccttctaatgatgaggaaatgttagaagtcaatggagtcggagaacataagcttcagaaatatggcgaacgttttttaaatgaaattcagaaatataaataaaatacatagataataggaaaaggaattccgtatgaactattttgaaacaaatttagaagaaatatcaagatccatacagttgcttgcgcagatatttgaatatcaggtgtttgaacttcaagtcgaagaaaaagatggaaatcaaacaggatatgttccatatatgatgaacgatgcaattgagtgttatctaagttttcatggactttgtatctctggaaaatatgacaaagactatgaaggagagatgtgggcacaactggaagaacgagaaggtcgttatgggttgatcgttcatcagggagaagaaagtgtttttacaatgtggtttgatgagatcatggaacatacgaactgttaccggtatcatgagatcggacatttctggagagatggagctgagcagtggcgtcagctagtctatatgattggaacgatccgtgagaaatatcgctttttaggggaagaagtgtgtaatgatcaagagatggagatcatgtcactgattgaatttgcaccattttattactattttccgatcaatgaagatccagaagaatggtatgacaaaaccgaagaaggattaaaatgtatgagaaatcttgctatgcaggcaggtgataaagattatttaaaatggatcgataaatatgagaagcacccaaccaaacgaatggagatgacgcttgcaaagaaactgcaagatccaaagagacaagatttatatgaattgatctgcgagaaagtctgcaatgcttctgatccatatccagcaaggaattatggagaaagaatcgatcagaagattcaacgatacagggaacaggttgataaaaaactgaaagaacaaggatttacaggaacttatccacaatatgagagtgaacatttatcggtttgtgtaacagaagaacatccatttacgatcttggaatctgaagattttaaatttaagattcagttgatgatctcagaatgcagagaaaaacatccgagaaaaaatgctggattttttaaaggatatcaaagaaaaggcaaaataaaaagactcgatttttaattatgaaaatcgagtcttttctttcactgatttatttattcttcagccgcttcttcgtcttcatcttcaggaacagcttcaggttctgcgatgttaacgaccagagtatcttctggtgtaacaagagagattttgctgttagcagctaatggcaagtctttgacatggatcatatcaccaatattgtactgtgttaaatcaatctcaaccttttcaacgatatcagctgggaatgctttgtattcgatttcagataaggactgttcaacgataccattctgtacagcatcttcgtttaataattcgatcgcagcagttgtgtggatcttttcgtcagcaactaatgcctggaagttaataaacattgtttcgtttttcatggcattgtagtcgatttcttttacgatggcgtctacattttctccgtcaacaagtaaagtaatatgagctccttttttgttatcctttaagaatttagcggcttcacgggaatcaactttcaatggaatggaattttcgatatctctgccaaacagatttccgataacataaccttcttttcttaattttttagcctttgttttcaaatctcttttttctgcagttaatgtgttcataaaaagttcctccttgaaaaaacattaagatattatgcatgttatggtataacaccggaagtactttgtgtataaaatatataaatacacaaaaagagctcccagtgtagtggaagctcttgctgtattgtaggtgtttctatgcacttgagtttattatatcactactttttaatttttaaaggggtaaaattgatgtatttttaaaagaacaaaatgaataaaaatcacatatattaaatagaagaaaaaagaaaggaaaaaagactgtgatttatgattttgccgttatcggcggtgatatgagacaggtatatttagccaactatctaaaaaatcaaagatatcaggttatcacatatgcaaccaaaaaagaaggctcagaatgcaaggaaggtaaatcttttgaaaatgtcataagagaagcaaagtgcattattggccccgtcgttttttcaaaaaacggggaaatcacaggaagttctatcaacaaaaaaatgtcagtagaaacactgcttcaagaaatgacgaaagaacagattttatttgggggatgtatcaatgaagaaattcgacatgaatgtgaacaaaaagaaatcaaagcatttgacttcatgaaaatggatgatgtcgctatctacaatgcgatcgcaactgcagaaggtgcgatcatggaagcaatcaagatgcagccgattaatcttcacaaaagtcgttgtctggtccttggctatggaagatgtgcaaaagttcttgcagcgaaactaaaaggaatggatgctcaggtaacagtctgtgccagaaataaaacagcaagaagtcttgcaaaatcttttggacttgaggttatggattttacggaactaaaacggcggatctgtcagtatgatcatatttttaataccgttccaaaacagatcctaaaagaagatatcctcaggaagatctccaaagaatcctgtatcatagatattgcttcctatcctggtggaacaaaccatcaaatggcggaaaaactaggaatctgtgcaaaactatgcccaagtcttccaggcatttattccccgaaatcttctgggatcatgcttgcaaaaaaagttttagaaatcagtggagagatcaaacatggtattgaaaaataaaagaatcggagtagcaatgacaggttccttttgcacttacacaaaagcctttgaacagatcgattgcttactagaagaaggtgcgatcctgcagacgatcttttctgacatatcccagcatatcaaatgcaggtttggaaaaggtgaggaatttgtaaaaagagcacacgatatgacaggaaatgaaccgatgaaaacgattgaagaagcagaaatcatcggtccgacagggtgtctggatatcctgattttaatgccatgtacaggaaataccatggcgaaacttgccaatggaattacagataccccggttttaatggcagctaaagcgcagctgcggaatgaaaaaccagtcgttatctctatggcgagcaatgatgccttaggtatgaatcttaagaatatcgggaatcttttaaatcataagcatatttattttgtaccattcggacaggatgatccggtaaagaagccaaactccatgatcgcggatacaagactgctcattccgacaattttgcaggcattaaaaggcagacaataccagccggttctcattgatcataaaaaataaaaagaggtagcgtgtatgtgtggaattgcaggatttctaaatcctagaaacaatgataaaaaaacagagaaagaaatatatcagatcttaaagaaaatgaatgaagttcaaagacatcgaggtccagatgatgaagggatatttttggaaaatggctgtgcattagggcatgtacgattgtcaatccttgacctttacaggggacatcagccaatgtgtaaaaagaaagaaggaaatacctacgcaatcatcttaaatggcgagatttataacatgaaaacgttaaaagaacaactgatcaaagaaggagaaatgttttcgacaacgagtgacacggaagttgtattaaccgggtatatcaggtatggaatttcttatattgaagagttgaatggaattttttctattgctctgtgggatgggaaacggaagaaattatatttgatcagagatcgtgttggtgtgaagccattattctatacaaaacggggagatacattaatctttgcatctgagatcaaaggcttgtttgcctatccaggagtcaaaccagtgatcaacagagaaggactttgtgaaatctttgggttgggacctgcaaagtcatatggaaaaggagtgttcaaagatatttatgaagtccttccagggcatttcttggaatacgatcgtgaagggctgaaagatcgtgcatattgggaattgaaagcgaaagaacacacagacagcgaaaaagatacgatcgagcatacaaggtggctagtaaaagatgccgtggaaatgcagatgttatccgatattccaatcagtacatttttatccggtggagttgacagtagtcttgtcacagcaatctgtgcaaaaaagcttcaaaaagaaggaaaaaatttaaacacattttcctttgattttgtaaataatcataaatattttaaatcaaacgccttccagccaagcgaagaccgcccatgggttgacaagatggttgatcatgcaaagacagatcacagatatttggaatgcgacaatgaaaatatgatcgaaaatctatacaaagcagttgatgccagagatcttccatgtatggcagatgtggagtcttcgatgctatatttttgttcgaaagttgtaaaatataacaaagtaacattaacaggggagtgtgcggatgaaatttttggcggttatccatggtttcataaagaggaatgcttcaaggcagagattttcccatggtctatggatatgcagccaaggaaaatgctgttaaatgatgatatcatacagaaagtggatttagaatcttatgcaagaacagcttatcaaaagacgatcaatgagacgccaaaactttatggagaagatcagatcgaagctagaagaaggcagatttcttatctgaatctaagatggtttatggtaaccttaatggatcgcatggatcgcacgagcatgcattgtgggttagaagcacgagtgccgtttgctgatcacaggatcgtggaatatctttataatgttccgtgggagttaaaatgtttaaatggtgtggtaaaaggattgctaagagcagcaggggaaggaatcctgccagatgaggtattgtatcgaagaaaaagtccatatccaaagacgtatgatccaaactatgaaaaaatcttatccaaagaacttctgaaagttatggcaaaaaaaggagcaccgatcaaagaactgatcgatgcatataaactaagcagattcttagacagtccgaaagactatggtaaaccatggtatggacagctgatggcaggtcctcagatgatcgcttaccttctgcaagtcaattactggctggaaaaataccagatcacattggatctaagttagctagattaacataaaatgtcttaaaatatatagccatcccgtaactgtaaatgcactaaacatcgttgttaacatgacaacactggaagaaagagttccctcatgtcccatattcttcgccataacaaaactacttactgttgttgcagaaccaagcatgataaggatggcaaccaacttatcggtacggaatccaagtttcactgcaattggcaggaaaatggcacaaagaccaataagtttcataaaagcagcaatggcagatggtttgatctttccaaaagcttttttgatatcgaaggtagcgcccatcgccatgagtcccattggagtggcgacatttccaatgcttgaaataacctttttagggattgcaggcattggaatttttaatgcagaccagacaagtccagcaacaattccgataaggatggggtttgtcacgattcctttgagcgtttttttcacaacagtacggtcaagcccactctgtccaggtttaaatacagataagataacaacagccatcatattatataatggtacacttccaatgatcatcaaaggagccattccggcatttccataaatgttttggataaatgcgattccaaggagagcagcactgcttcggtaagccgcctgaataaattctccacggaccgttttatcacctagcagacaagaaatcagaaaagaaatcgtaatactgattatggtaacgataaaacaaaacaggacaaacttaacatcccagacttttgaaaaatcaaccgttgcaagatcctcaaataccaagacaggcaaaggaaccataaaaacaaacttattcattttcgaagcaaaaatatcatcaatccatccaatctttttaaagacaagtcctaagatcatcatcaaaaagacaggaactgtagcgtttaagctaaagattaaattttccataattactcactttctgtagtataagctgaacttttctttggtgtgatcagatagtggtagacaaaatgtttcactgcaacaaaatgttttctcgtccacacaagacaaaaaccactgaaaacaggcagaaaacatacaagagaaccagtatgtccaaagtttttgcaagatagataagaaatgataacaccaaaatggaaacaaagcaaaacagaagcgaaaaatttccattttcttaaggcatcgggatctttactgcaaagatattctgtcatagatgtcgtaaactgacgtaggttattcgtagaaaaaattgtagagcaggtaaatccatccccacccttaaaggaacaccactgaattgccattgcaaaatacaacggatagagggcaatgaaatcattcagatccgatggaagaaaagcaacgatcaaggctgccattgcatctataaaaagactgacataaggaagatgtagtcttgtaaattttggtaagatcacagtcagtgacaatgcaaacatataaataaagacaccaatcagacgcacaataaaatttgcatccggatgtcctgcaaagtctgcaaacacagagatcagattcgaagtctgtgcagaaccgaagagttcatgatgattaagaattgcaaaaccaccaagaaatcccccaacgattgccatattaaaatgaatccaacgatccatatccctactacacatgaaaaaaccagctttctttaaaatatttccaaaatattatatatccatccagaagaattgtaaagatgaggaagagataaaaaagaagcaa

SEQ ID NO: 715 - DNA, 478 bp, Unknown
  gut microbiota DNA sequence
aataaaccaccggctaggccggtgagtcagcattgcttaagcttacagtaaaaaacctccagtgatataattatgttggttcgccaaccacataaaatcaaaggaggttatccaaatggatataaacagtttagcacatacgaaatggaattgtaagtatcatattgtttttgcaccaaaatatagaagaaaagtagcgtatgggaagatgaaacaggatattgcgaatattttaagtatgctatgcaaaagaaaaagtgtagaaatagtagaggcagagatatgcccagaccatgtgcatatgcttgtaaagataccaccaagtttaagtgtttcaagttttgtagggtatttgaaaggaaaaagtacacttatgatcttcgaacgccatgcaaatttaaaatacaaatatggaaatcgccatttctggtgcagaggatattacgtagatactgtagggaaaaatgcaaagaagata

SEQ ID NO: 716 - DNA, 549 bp, Unknown
  gut microbiota DNA sequence
gcattaagtcatttccttcagaatcatagatcttgttccaccatccgaagtggtttaatccatagtatccatactgcatttcttttctggattttaatccgaccatgtctgccatcttttccattaaatcgatcggcatatcacagatatttaagatcttggaatctggtcttaatcttcttgttgcttctgcaacgatcgctgctgggtttgagtagtttaacatccatgcgtttggtgaatatttttccatgtaatcaaggatctcaataactccaccgatggaacgcattccgtaagcgattcctcctggtccacatgtttcctgtccgagtactccgtattttagagggatcttctcgtctttttcacgcattgcatattttcctacacggatatgtgctaatacgaagtcgatgtctgtgaacgctgtttctgggtctgttgtataatcaaatgctacttctggtgcattttcttttaaatagatctcacatgcttttgcaactgtttcctgtctctctgcatcgttatcataaaacttgatgg

SEQ ID NO: 717 - DNA, 2004 bp, Unknown
  gut microbiota DNA sequence
cgattttatttatttcataagaaatttcctaattattaaaactttctaatggattattccgtatataataatgtacagtacaaaaaaccaagaaatgagtggcatgcatgctaatagaacaaaagttgatcaaaagaataaagaaaaaacaagataaagaggcagccaacgcactgattttatattattacaaggaaatctatgcatatgtatatcggcaaacaggaaatgaagaacttgcaaaagatctgacacaggatatttttatacagatattgcaaaaaatcacaatgtttgatcataaaaaggcttcatttcggacatggatgtatagaatcgcatcgaataagatatgtgatcattatcgaagcaaggtacatcgtttgtcattaaaacaagaacagattgatatgacagatgagaatctggaacttcacagtagtaatttaggaacagcgattagggatttgtccgagttgatcatccataaggagttgatagaacaaattatggaaattgtttcgctatataagcaggagtggcaggagattttttatatgaaatgttttgaagaaaggacctttcaggacatatcgcagacattaaatatttccgaaaatacagtgaaatcaaggttttataaaatgatacgacaaataaaaagcgaggtggactatcagtaatgaaaaaagaaaataatcaggaattttatgtagaacagatggatgttcattatccgctgcagtcagagatacaaaatgaaattgaagacatcattttaaaaggtatgcctcaaaagatttcatttctaaaaagaatgaaaaagatttatctgggacctggattaagagtcatttattataaaaatctttctgtattttttgcgacgttcataatttattttgctgtgtgtcttggattagtactttcctttgaggaggaaatcagacaatttggggcagcttttttaggaatgcccgttttctttctgttgttttcttattttacttgctatatggacgaacagacgcagatcaatgaattaagaaatacgatgtattattcgatgaattatattgtgagccttcgtctattttatacagcagttgtattatctctggtgaataccagctttttattccttagtgggattagggagaaagcaatcttatcggttggagttgttggagtttcaagtatgctggtctttgcgatcattgctgtatacatttatcacagatggaataactataagtgctttgcgggtcttggtgcaatatgggtattactttttgcagcgatcatgcgattaccggaaacaaagattttatttctttttgaatatattccattaggaattcagattgcaacaatgatcgtgtgttttgtggctttatttactttggttggaagaatggaggagaaggatgcttacactttcgcatattagaaaagattatggaaaattcacagcagtggaagatattaatctggaacttgaaaatggtttatatgccatgctcgcaccaaatggtgcagggaaaacgacattgatcaaaatgatcacaacacttttgtatccgacaagcggagagattttatacgatggaatggatatttataaaatgggagaaacataccgggatgtgatcggttatttgccacagcattttggatattataaaaataatacaccaacgcagtatcttgattatcttgcagcgttaaaaggaatttccaaagaagctgcaagagaaaaaattccagaattattggagttagtaggattaagcgatgtcttcaataagaaaatgaaaaaattctctggtggaatgattcagcgtgtagggatcgcacaggcaatgttaaatgatccaaaaattcttgtattagatgaaccaactgcaggacttgatccaaaagagagagtaaggtttcgaaatatattatccgtattatccaaggatcgaatagtgatcctttcaacgcatatcgtatcagaca

SEQ ID NO: 718 - DNA, 16650 bp, Unknown
  gut microbiota DNA sequence
gaattatttgtataataatttatgttcatatatttctccttaattgtacatcatatttgttgtatttacaatgtatttttttcttattatactatcattatcatttttatcaatattttacttgtaattattttacattacagattcatataaaaataaacaaacaccggcatagtaaccaccgccagcaatgtcgtcattacattgatcgcgcttgcatatttcgaatcgtttccgtacacctgacacatctgtgtgatcgttgaggcgcatggtgtgatcgctgccatgtatgtaatcaggatgatgttttctgcctgtgggtgccagtttttcattcctaacagaataatgactgcaagtgctatgatcggttcgatcactaatcggatgaatgtgaccaggtagattcttttgtttgtaaatactttctttagatcaacgcctgcaatcagcattcctgtgacgatcatacttaatggtccgatcatacttccaacggatgacagggtatttcctataatctctggaaatctgatcttcgtgaagaataagaatactcctgcgaatacagagatcatgtttatatttaacaggatcttctttaaactgatttctgtttctccactgatcttacatttgcagtgggtccagatgaagaataattgaacactcatgaagacacagccgtagatgacccattcttttcctaagatataggtgactaatggtacgatcagatttcctgagttggaatagtaggcagatgtgtattccaccgtgtttaaatgaaacatttttcccatgatccatgtgacaaacagtaataaaaactgcaggatcacagatgcgatacatgcaactgccagtcctttcataatgcttggggtatagtctacctgaaatgcagtgatgatcacagatggtacgatcagatagagtatgatctttgagattactttgctgtcttcttcttttaaaaatttgatctttaccataatgtaacccatgaggatcatcaggaatagttgtacgatctgttttagcagcagaatgctgatttgcatggtgttttccttctttcttttgtatgttttcttgatatctcatcctagtatatcattctgctttttttatacaagaaatgtttcggatttgatacatctttcttcgttgtttttcctggaatcatcttgatattcttcccaaaaagtattagaatctgtatagttttttgaaagagggtattgtatatgaagaattcttcgaaacagtccgtgaagatggatatgcttcatggaagtttattcgataagatgttaatgtttgctatgccgcttgctgcctgtagtatcttacagcagctttttaattcggtcggtactgccgttgtcggacggtttgcgagcagcgaggctttagcggcggttggtagtaatagttctgtgatcgctttgatggttacattgttttctggaatttctcttggttctaatgttgtgatcgccaattatatcggacagaatgatacgaagcggatccctcgtgtggtacataccgctgtctctcttgcactgcttagtggtgtgtttttgttgattcttggacagtttgtggctcatccgatccttttgctgatgggtgcaccgaaggatatcattcatcttgcaacgttatatctgcggatttattttcttggaatgccattttttatgttatatgatttcggtgcttccattcttcgcagtatcggagatacacgtcgtccgatgtatgctttgatcgtgtctggtgttgtaaatgtgatcttgaatcttctatttgtcgttgtatttcatatgggtgttgcaggtgccggacttgcgacggttggtgcgaatgcaacaagtgcggttcagatcctttattttctgacgcatgaagaacttccgatccgcttgtcttttaagtctttgacgattgatcatgatgccgtttctaagatcctgaagattggggttcctgcgggacttcagggaatggtgttctctcttgccaatgtctgtatccagtctgggatcaacagttttggagctggcgggatcgcgggttctgctgtggaattaaattatgagtattttgcttattatctggtcaatgcctttgctcagacggtggttacatttaccggacagaattatggtgcgaaggatgagggacgttgtaagaagatttttcgtcttggaatgttgtgcagtgtgatctcttgtggaatccttagtacgatctttgttgtattccgtacgttctttattggattatttacaagtgatccatctgtctatcattatgctcagcttcgttttttgatcgttctgacattcgagtgtctgacaagttcttatgagatcagtggtggctgtctgcgtggatttggacgttccatgactcctgcgatcctaacagtgtttggatcttgtgtattacgtttgatctggcttgcaacggtctgtaactggttccatgattataagcttttgatggcgatctatccgatctcttgggtgttgactggaacgatggttctggtggcttattttaggacacgtaagaagctgtttttataatttgatgatgtaattaaaatgtctgttatacctatttgtttcataatagatctaacagacatttttctttgctattttattgtatagtatctctgctgcttacttcttggtttctctggcatcgttaattgtaatcttccttctttcaacaatggctgaatccattgtttcataatgtagttccatgtttttaatttcagaaatttcttgatgtcatccctgcttcttggcgttttgcaatactccaaaatgctctcttcttctgatctcatctctgatccttgcatcttctgttcattatataagataactacaaattcatttctccgattctcaaatactggttctggcaaagagtatttcttcatctctcttcgtatcgtcggaattcctgaataacgattttctgctttggtcatactctctgccataactgctaatactggattcctaagatctggtttggcgattcctaattgatccactgtcattcttccatataaatttccagggctgtgaatttccaaacgatctgagaaaaaatcgatctgtattggagtcccttcggtatgcacgctgtaatctctatggatcactgcatttaaaattgcttccctgactgcattcattggatattctgtacggtcctttctgagtccagttgcgggatcaatgattgttttaactttcatatttcgtttgcaaaataataatgcgctttctaccatttctgaaatcgttccttcaatccgcttattatcaataaaacgttcccctgctgatccaagatctcctatttcagtccctgatacggtaatggctgtgattgctaactgtggataaattccttgtggataaattccaaaattcataattgctgcaagtgtcggtattccacccttagtaattccaagcaattcgtatatttgattttcatctaatttagaaaattgtgggcgttctaatttcttatctaacacatacatatctagtttgtctttatctaaaaaagagatatctcctttgtcagccactctttcatcatcatgaacatgctttctccacgcatcataactatagatttcataatcagtcattccaatatccgcatctccaacacgaatatacgatcctcgaacttttcctgctcctttataatagcaaggacgttctgtcagatcaatggatggtatttctgcagaaacgatccagacaccttcatattctgcaaatgtaaaaactgcacgaactggaggttccatctggttgcattgctctgttaccttcttctgcaagtcctgcagatcataaactcccactgctttaaaatcttgtttttcatccaaaccaaagatcaaaattccacctgtatcttgatttgaaaaacttgatagtgtatcatacagtctcttcgggcaatctatatgtgcagcttttacttctattttttgttcttctgctcgctgttcttgaattgatcgtgctaattctttcaattcttctactaacataacattttctcctttctttttttagtttaacgttcttatcatttgttatgttaatattaacatatttatgttatttattcaatattttcgttatttgcacaattccttctgttatttttaatatttaatacacaaaaaccgaacaatttacgtaaatcaaaatcatatttacgtaaattgttcggttttatttcacatatttacttcctattcatcttcttgcaatgcatatgctctttcttcgatcgatttcttctttgtttcttcatagttctttaactctttgatcgcttgtcctgacattgcatacaggatgaagatattaaagatcgtcattaacccaattccgacatctcctaaatcccatacgaatgtataggtctggattcctccgataaataacatcacaagtgctaatactttataggctgtctgccatccccatttgtcaccgaacaggtaggcgacgttggatcttgcatagaataagattccaagaaatgtcgagaagctgaacatccagaggatcactgcgataaatacaactccgaatcctcctaaatggtagttcattgctgtctgtaacaagttcataccggttaatccattggtcagattctgtggtgctaataacatcaacattgccgtacagctgcagatcacgatcgtgtcgataaagactcctaatgcctgtaccagtcccatctgtgctgggcgttcacagtctgctgctgcggctgcacatggtgcggatcctgatcctgcttcgttggagaataatcctcgtttcactccgttcataagaactgctccaaaccctccggctgcgacctgacggattccaaaggcttctttgaagattcttgcaaaaacccctggaatgcttggcagattcgtgaggatcacaaaaatcgtaatcccgaagtaaatgactgccatgatcggtaccacgatatctaatactttgacagttgcattcttccttagtacgatcactgctgccacaataacaagcacgatcgttgtataaagtgttggaatatggaaggcattgtggaatgattctgccacagaattacttaccacctgactgatcccacaccagcagatcaatcctgaaatcgcaaataagacagcgatcagcgtgtgttttttcttctttccttgtctctcttccataaagtggtgaatataataggctggtcctcctcgatatccaccatacagggggtctttttctttatgtaactgtgcaagagttgcttcgataaaggctgtcgatgatccaagcaatgctgtgatccacatccagaatacggcccctgctccacctgcggatattgctgcgacaactcctgtcagatttcccattccgacacgtgttgctgttgatacgatcaaggtctgtaaagaagaaagactacttttttcatcttttccattcttattgtttgctgttagtgctttgaccatatccgggaacagacggattggtaaaaatcttgttttgatcgtaaaaacgatacctgctggaagcagcaatataatgagcagcgaaagtcccaggcttccacctcctggtaacggaacatgaatccattctccccataaaaactgatatatattttctattagctgaacaatcattgacttgcctttcctttcattgttttttccaaaaaagaaggcatgcagttttattctgttatgcatgccttctttttattatataaaattttctgataaatgtcaaaaaatttacttcgtatacctgcttatcagtgcaagaatcaggaaacataccacctcgagcagtacgatcgttcctcctggcttaagacctacataataagacagtgttaatccgatcactgttgtgaccaatgctgtgatcacaccgatgatcatgactgctttgtagcttcgtcctacctgcattccgcatgcgatcgggatcacaagcatggatgagacgatcagtgttccaaccgttcttgatgcgattgataccgtcaatgcggtcaataaagtaaagataaaattgatcgtcttgacaggtacaccgctgatccttgctgcattttcatcaaatccgatatagaatagttctttatatagaagcaatacacagagcaatactaacacactgatcacacatacgatcttcagttcgtctttgctgatggatatgatacttccaaataagaaactgttaaagttcgttccgttttttacgaatccggataggataccagcaagtccgatccctgttgacataatgatcgatatcgccatctcagaatatcttgggatctttcttcggatcgcttcaactcccagggctgcaaacagacagattcccattgctcctaagattggattgatccctaataacaagcccagagcaacacctgctagggatgcatgagagagtgcatctccgatcatggacattctctttaagacgatcgtgattccgatcaatggtgcgatcacggccagtaagattcctgtaataaatgcgcgctgcataaatccgtattgtaacatctcgatcattcttccacgatcctcccttcatccattcttaaaatacgatcacatcctttacattcctgcagtcttccgtgtgtgatcataaaaatggtcgtattatattttgtattaatctcatagagcatatcgtacaagatctttgttgatcttgcatctactcccgttgttggttcatctaaaatcagaagtttcggatctccgatcattgctcttgcgatcattactcgctgctgctgtccaccagataattcaccgatccgtctcttaaggaattcttccattccaaaatcccttagtgtctctttgatcttattcttatgttttttatgtggcagatgaaacaagccaagttcctgataaagtcctgtgatcatgatctcttctactgttgctgggaagctctggttcttactgatcccattctgtgacacgtaaccgatccgtttctttaatcttggatcgttattcatcaggatgatctctccttcatctggtttcatttcacctaagatcagacgcataagtgtactttttccgcttccattttcaccagtcagaacgacatattcgccttcatggatcgtcagattgatctcttctaagacttccgtatcactgtatccgaattttacatgatttaattgtatcatctgttttgtgtttgattcactcattcgcttaatgcctctttgatcgcagcgagattttgtttcattacggaaaaataatcttctcctgctttgatttttttgttacttagtccttccaggggggttaacatctttgcattggctccggtctcttttgcaatggttttcgctactttcggactcaccagttcttcaaaaaagattgtttttacctgatgttcttttgcaaagcggatcacttcgctcatctgtttgggatctggttcatcatctgcggataatccctcaattcccatctgttctaacccatatgcgtgacatagatagccaaatgcttcatgtgccacaacaagttctttctttgtaagtttggatgtttcttccttatataatgtatctaatttgtcgcattcttttgcgtatctcttataattcgcttcgtaataatctttattctctgcatccactttgatcaatgctttcttgatcttgttcatctcatactttgcattctgtggatctaaccagacatggggatcattctcactgttatgttcgtgatcgtgttcatgtgcatcctgatcttttagtaacttgatccctttggatgcttcaacgcttgtaagttcttccgtatcaaggctttccaaaacgtcatctacccattgttccatgccggctccattgtaaataaagatgtctgatttctccatctcgatcagatccttcgttgatggttcccagtcatgaggttctgttcctgctggtactaaattgatcacttctactttgtctccaccgatcttctttgcaaaatcatacatggtgtaaaaacttgttgtaattcttatcttgccattcgatttcttcttgcttgtattgccagtacatcctgccatgccaaaactcatggatatgatgcataccaggatcatccaaatcttttttctcattcttctctactccaatttctgcggtttctctctggtatttatagcaaatctttcttggtcgtgtcaagcgtggttcacgaatgatcgctgaaaatagacgtgcgaaatgcattctgtgaccataattcattcccatagatgatcctgtaacatccagtatacatcagggctgcgagcactacgtccaccacactgtgttgttttaagaacatcgtcgacatgataattaatatcgttaagacaacacatgctgtatcggtgcttttcttatattttctctgattcttcaaaatcgcaccacagcatgccagagagttaaatacatggatacttggaagtacattcgtcggagtatccgtgtgatagatcatctgtactgctttgataaaaatgctgtctccagtaagaactggtcttagatcctgtccattcggaaatactaatgagatgatcaaaaacagggtcatgcctgttccaagtgttatgatcagctgataatattctttccattgattcttattaaaaaacataaaataaaaaactgtaactgctacaaataagaaccataatagatatggtacgatgaaatattcacagaatggtatctgatcatctatcgttgtatgtatgatgtaatgatgcacatctcgatcttcaatgtaggaaaatgtgatcatataaactataaaaaatactgcaatcataccaagatgcccattttttatgatctcatttaattttgttctcaattgtgactcctttcttcaaaatcattgcctgttagaaagtgtatacatatagtagtaccacgattttgtagaaatttcaaatcttttatcgaaatagttgtggcgggatcttcttaactagcactccacttaacactccgatgatgatccctgcgatcgttcctgtgatcagtaatactggtgcataataataaatctttgtattctccattaagaaaacagcgacactgagctgcccgatattatgcgctactccgcctccaacgctgattccaatgggtgagaatccttcgatcttctttagaagtcccatgatgaccagacttaagatccctcctgccagactgtaagcgatcgtcattggatttccaaacaagaatcctgccagtacaactcggatcactgagatctcaagtgttcttgtccatgttgtaaagaataacaaaaccatgatcactccattggcaagtcctaatttcactccgggaattccaactggtaccgggatcaatacttctatataggatacaacaagtgccaatgttaaaaacatcgcatctgtcgctaatctttttgttgacatatattttatttctcctgttgttttctatctcatctgatgtttattgtgttaccccatctaattcctgttctttgccatcttctgattgaatctcgatcactactttatgtggcagacatacgatcgtttctcctgatttctcgattgctttatggtctgcacagatctggtctttacagtctgcttttttcattataacttttccatctttgatctgcatgacgttcgtgccatttttctctggaatctgataaatttgatctttcttgatggatgttttgtacacttcttttccgtcaactgtcacgatcacttcttttccgtctttttgtgtcatcttgatcgctgcaaaactgatcagcgaaattgccagtactgctacgatcaagatcatatcctttttcttcatctttataccctgattcttcccagtacttctccgattgggtctgtaatgcacagatctgcctgtttatctctgcttgtcgcatcacgattcagtactgcaagatattttcctttaaaataatcgatcattccagcggctggatagacaaccagtgatgttcctccaatgatcagcatatctgccttggaaatggctctgactgctccgttggtcgtctgagaatctaaaccttcttcatataatacaacatctggtttgatgattcccccacattcatcacaatatggaactcttttggcattcacgacataattcacatcgaagaacttgccgcatttctggcaatagtttctgtgaacactgccgtgcagttcaaagacatttttacttcctgctgcctgatgaagcccgtcgatattttgcgtaacgatcgcagacagttttcccgcctgttccatctctgcaagttttaaatgtgccttattcggttttgcatccaagaagatcatcttattcttataaaaatcataaaattcttccgtatgctgtgtataaaatgtatggcttaccataacctcgggtggatatttataagtctggtgatacaaaccatccgtgcttcgaaagtctggaatatgactctctgttgaaacacctgcgccaccaaagaatacgatatgattactttcatcgatcatctgttgtaatttttcaatcttttcgttatccatgactttttcctccttgaaatctaattgatcaaaaatcatctgcaaagttagttgcttataacttatttttatatactttatcttttattgtacaagaaaaaaaggcctcttgtaaagaagccttttcatttttttaatcattgctttgttcttgaatcttactgatctggtgtaaagtctcaaaaactgctgccatatcgtctttgatcagttttctttgttgttcataaatactgcgatagtattttgttcttattggatcaggttcataaattttcttgatctttctcgttttttcaaatacctgacttggatcttccagatctcctaccgcatatgctgcgatcactgcatctgtaagaactgctccttgtgcattttctaatgtggcactcttacatcctaacatatctgctttgatctgattccagacttctgaattgcttccaccttctgtgatcgtcataaattcaagtggcacgcctgcttttttataaatatctgtcacactcatataatcgtaaccgatcgcttctaaaactgcacgccactgtactccctgatctgtgtccatcgtcatattcaggaaacaggcacttgcattggatgtttctccaaatcctcctgttaaatatggaaggaacaggactcctttggatccgcatggcacattttgtgctttctcatttaattcatcaaaatatgctccatttcctgcttcgttgcatacattatctcgataccaacgaagtgctaatccaccggttcttatgaatccccaataaaagtatgtattttctaaagttccgctgttaaagatcagttcattttctggtttgcttaattcttcattgatcccatcggttgcgatacaaaacatcgcacatgttcctgctacgtcggctgcctgatctggtttgatcactccgcatccgatcatggactgcatcgtatctccggctcccgcacagattgggattcctggtttcaatccggtttcttttgcaaatgtctctgataatgttccaatgatatcccatggtttttgaatctttggcatcatttccattggaattccaaggatctctaattgttctttggaccattttttctctgttacacggtatcctagtccccatccagacattgttccccagtcgataaatgcatcttctgcagacagtcctgcaagattggccaggatatatggggcattgtgcatgaattttctgcctttttctttaaagccctcacaattgttcatcatccaacgtgcaaacatcgctggaaacatacagtttggctgaggatttccagtctcttttgcccagatctcataatgatgggatgctagttcctcaacatcttcttttgttctggaatccagataattgatgtaaggtgtgatcgcatggcaatccttatcaacaccgacaatcccgcagatgatcccatctccaaaaatagagcggatgttgtctggatccagattcttttctttcatctttgtaacgcagtttctgatccctgtaaccgttgcatgaagatactggtctgcgtccatttccacccatcccggatgtggataatttaagattgttgcattggtatcctgcacgatcaggttcatatcaatatcataaactgctgtttttacactttgtgttcctgcgtcaaatcctaaataatattgttccatactaacttcctgctttaatttctgattctttttatgcttctacttctttgatcagctgtaccatttcgattgcagataatgcacagtcatatcctttgtttcctgcttttgttccagcacgttcaatcgcctgctcgatattttctgttgtaacaactccgaataaaactggaattcctgtatttaatgatacctgtgcgattcctttggatacttcgttacatacataatcataatggcttgttgctccacggatcactgttccaagacagatcactgcatcgtattttttgctttttgccatcttgtctgcgatcagtggaatctcaaaagctcctggtacccatgcgatatcgatatcttcctctttcacatcatgtcttttcaatccgtctaaagctccggatactaatttggatacgataaattcattaaatctggctgctacgattcctacttttaatccgcttgctactaatttaccttctaatactctcattttaattactcctttttcttcgttaatttcgttaatcttaaggtccctgggaccttaatttttttaatttttctgttaatttaaacttcgtatgttgtcatgtgtcccattttcttttgctttgtctgcatataatatttatcaaatggattgattggcatctggattggtactcgttctacgatctcgagtccatattcatttaatccgtcaattttggttggattgtttgtcatcagtcgtagttttttgattcctaaatcctgtaagatcatggctcctgcactgtaatctcgttcatcatctttaaatccaagagctaaattggcctcaactgtatccattccctgttcctgtaatacataagctttcagtttattgatcaatccgattcctcgtccttcttgacgcatatataagaaaacccctcgtccttctttctcgatctgacgcattgcacggcttcgctgttctccacaatcacagcgtagagatccaaaagtatccccggtcaggcactcagaatgcacacggcataaaactggttctccgtctgcgatatctcctttgaccagtgctacatgatgttccccacttctctggtctacatacccatgtgcctcaaatgttccatattttgttggaagctgtgcgattacttcgcatactacatcgctcatcttgtcttttccctcctcgtttttattaaaatccagcatttcttaacatttccattgttaaggtgctgtttgtatgtttgtcatttgtttcctgctgatcaaaatgcagcagtttatctatatatttcccaaccatgtcattctccagattgatcttatctcctggttttttatatccaaaattggtattttttatggtatgtgggatcatggatacggaaatggtatcatcgcttaacttagcgatcgtcaggctgattccatcgagtgcgatcgatcctttttcaatacagtatttcatgatattttctggggctttgatcgtaaaccatacagcattatcatcttgttttacactaacaagttcccctgtatcgtccacatggcctgctaccatatgacctccgaaccttccattggctgccatcgctcgctctaggttgacgacagatcccttttttaaacttccaagactgcttcggttgaatgtctcattcatcacgtctgcctgaaatgtattgccgctaatgtgagtcgctgtcaggcagaccccattaactgctacgctgtctcccaatttaagatcttcaaaaataacatttgctttgatcgtaaggactgctgctttgcttcctcgcttcagggatatgactgttcctaattcttctacgattccggtaaacatgatctcaccttcccttccagtaatatgtcatttccaagtggtgttgcctttaattcatcaaataccaaagcttcttggatcctttcgatccctttgccttctacaggtgttttggccttttctcctccaaataattttggagcaatataggcgtaaactttgtgaacacagtcgtttttgatcaaggattcattcaagattccaccaccctcaactaaaacactgtcaatttccatatttcttaactgttttaaaacttctttgacattgacctttccatcttgctctgacgtttttaagatcttgcatcctttttgttctaattttgcaattttttcttgatcttcacttatggtagcaatgatcgttggaatttctctggctgtttttacgatatttgattcttccgaaatccttaagtttgaatcacatatcacacgaattggatcattcccatgttcgatccgtgcatttaacatcggatcatctgctaaaaccgtaccgattcctgccatgatcgctgcatactggtgtcgtaatgtatgtgcatgtcttctggcttcttctcctgtgatccacttggattcaccagttgccgttgcgatttttccatccaatgtcattgcgtattttagtgctgtatatggaatatcattctgaatataatgaaaaaatatatcgtttaactgtctgcactcttcttcaagaattcctgtctcagtttctattccatggtcatttaggatcttgatcccgccccctgctactttcggattgggatctaaattcccgacatatactttcttgatccctgcttcgatcaacgcttccgtacatggtggtgtttttccataatggcagcatggctccaatgttacataaatctcagctccctcaggatcttctatgcagttttttaaggcatttcgctctgcatgtaatccgccgatcttctcatgatatccttccccaataaccctttgatcttttacgatcactgctccgactaaaggatttggattggtatatccacagcctttcttggcaagttcgatcgcacgccgcatatattcttctttcaaatatttttctcccttcccttcaggttctttgattttgggaggttggattttgattggtattgaaatcggaaatataaaaaggagttcctgatctttgttctaattcttcaggaactcctttttgatatcttgatatttctttttgaaataaaaaaatcctggaattataaaaatcccaggacatgatgatcaatatcacttcttaaatcttcttccatccagactgtactgtcggccttggaatctcaccaagtcatgccatataaggctcgcgggctataaccgccggtagggacttgcaccctgccctgaagacgttatgtaatttatttatagaatagcactcgctaactgttgtgtcaagtgaattttctatcacttcagcatagcattttttacattctctttcgcataaatactacaagtaaagcaaaaatcacaactgcagctgctccgattgcaatccctgttgtgtgttttttctttgtttctttctgctcttttttctttttttcttctttttgttgtttctgttcttttgtttctgttgtcactttggtcgttgttgtttctgttgttccttgtgttgttgattcttttgcagatgttgtactgttgtttgtctgttctgtagatgaattttcttgttttgttgtactatttttattggtatttttagattgtttatctttttttgtttctgtcttcacagttgaatttttcttttcttctatgtcatttttctggttctttcccatatatgcatctgcttctggaacatcaatctttccatccatataatcctgatatgcctgttctgcccctgctcttgttggtggataaccatgcgaagacagccatgatttcgcctgctgcttttcttcatctgtatatgcataagtcgccaccggacggcttgtgatcattactgctcccagaatcagcattaaaactaataataaccttttcatttgatactccctctttcattttgaaactgtttgattaatcttgtatattatagcataatttagtaagaattctatagattattcgtttttatacaatcctgatttgaaggtagtctttcatgtatgtgacagaaataaaagaaacacaaatatttaaaagaatcaaggtggcaactccgcatttttgagagcgttttttacaaatcgctgatccgtgcctgttcctttggaaactgatatgtaatgacctttgtcaatagtaaattaacagaaatcacaacaaatt

SEQ ID NO: 719 - DNA, 8201 bp, Unknown
  gut microbiota DNA sequence
ttttgcagatcgctgatccgccggctttccttgtgcaactcgccttcaagggtgtttaaatcagaactctttgaggctcagacagcacaccaagccggctgcgaatccgcaaaaaacgtggcaaaattctaatgctactcttccgatcgtttatttattttttatcatatacctgaaggctaaagtgtggacaattacaagattggaaaacttaggtggggtgtatgttaaacgttattggttttcgtaagtttcttttatcttccgtcaacgaattcaaaacttatcagtcaataccgtttaacatacacactgtgtagtgatttgaatagcgttccgttgtatgagtcagaaagaaaataagaaaaaatatttagaagaatacagggtgacaacatgagcactttttgaatgcgttttttacaaattcgcagcgccctgtggttgattgtctgaccgtagctgcgggcattttggctcgcagccagggagttatcaaaggaacaggcgcggatcagcgatttgtaaaaaacgctttcaaaaatgcggagtgtcaccctgtatttttctaaatattttttcttattttctttctgactcatacatgcaacactatccacaaatcagagatttcgataacgattcatcgctgccataacttcctgcttccgaggcatcgccagattacttttcacatacttactatccaagagtgcagaaagtccttttgtttcaatcatctgcattaattcatctgcaactgcacaaagatctttcttcccatccatcaaatgaagtttcgcatacaacaaagcataaccaagagctgttgtctgttcagtatcagcaatctgctccacatatcttagatcaactgtatccttgttaatcgaaaaagcatcttttccaagtgttttcatcttgatcttgcgttctttcttcaaatgatttccagcgttgaaacaacggtcaaaacaaggatctggatgtttcttttcaggcagtgaaaccatagggaaatcttttgctgcgtctttggcggctgtagtgatatcttttggtatatactgatccatctgaatgatatgatctgccggatggaaataagatccacagcttccagcaacgatgatcgaagaaatatcatatctttcgtacaattcacgaatccgttcgataaaaggagtgatcggttcctgatcacgaagaactacacgctgcatcagttcatcacggatcataaagttggtggcactcgtatcctcgtcaattaagaataaagaagaatccgtttccatggcttcaactacatttgcagcctgtgaggtgcttccactggcaccttctgtgtcaaaagaaaccgtatttttcccatttggcaggttattaatgaacatagaaatatctgtatttgtaatacttcttccatcttctgcacgaatcttcatggcagttggatcagtaatgacaaattcacgaccatcccctttgacatgatcgtaaacaccaagttccaatgcttttaataacgtcgattttccatgatatccaccaccaacgatcagggtgattcctttcggaattcccatacccgtgatcattccttgatgtggaagttcaaaagatacacggtaagtatctggtgactggaatttcacacagtttcttaaaggtttctgtgagataccactttctctaggcaaaacagagccatctgcaataaatgcgacaagtcccatagaagacagttttttacggattgtatgttgatcttcggataaataaattactgattccaacattttttgatcaatatttttataaaacaaagaagatgaaacacaatctggcaacagtccaaacaacattttatccaattctctcgcatttacagttcgtccatttgcagggaaaccagcttcaaaatgaacagagatgtcaccgttggaaggattgatcgtacatgcagttcgttctagtacctgttgtccacatttactgacagaaaataaaccgctttttccagaacctttggcacgaaaagagatcttagataaagtttgataaaataatcgtgtcaaatgatcacagagtgcaacctgtttatattttgtatcataaaaagaagcaggaaatccagctgatcttcctttcacatggatacttaattttgatggagatgcaaaaggatcgccttgtacatgatcaatggaaagaaaataagttccaaaatcataagtaccttgcgtatttttatatgcaggatatcctttacggtcaatattttttaatagtgattttaaattcgatgacgatttcataaatagttcctcctaatcttaaaatccatgataacagtcagtgcgatttttgtaaaccagatgaaatcaaaggaaatccgtggtatcatagaaagatgatcaacaaggaaggcggaatagagacgatggatcttaataaattaaaagagatacaggccgttgtttttgatatggacgggctgatgtttgacagtgaacgctatgtacagaagtcatgggatattgcaggagaacgtctgggatatggacatctggggcataatattgtcaatacattgggaacaaaccttacaaatcgtaagaaatatttcttagaacattacggaaatgattttccatttgataaatttttggatggatacagagatgcatattatgaattggttgaagacggtgtgccagccaagaaaggtcttcatgagattttgaaagtcctcagagaaaaaggactaaagatcggagttgcaacatcttccagtgaagaacacgccgtaagtaatctgaaacgagaagggatttttgactactttgattccgtgatcacaggaaatatgattgaacacggaaagccaaagccagatatttatatcgaagcatgcagacaattaaaagtcgatccatcaaaagcgatcgcattagaagatgcaatcaatggaatccgttccgcacatggagcaggcatgaatccagtgatgatcccagatatcgtgcaggatacaagtaaagtcgatgatatattatttggaaaatgtgaatctttgctggaatttgcagagattttacagggcgtaacattagatatagaagaaacacaaaaataaggagagaatatatgttatctttagtagttaatgtatagaatgtaaaagaatagttataccctaataaaccttagtaaatataagggtttgttggggtgtgttactgtaaagtaagtgtaccttaaaaattgaatattaaaatattattaaacagtagtataactattgaacatatgttcttatagtggtaaaatgtatagtaaataaaggatattttacatattagacatataagaagtgtattggaggtatcagatacatggaattacacgttacaaaacgtaaaggaagggagatagttgttctactggataatgacatgagaattgtaaagccagtttatgactatctgaaataccaagaccaaagagatagagcaatcaatactctcatagcatacggaaatgatttgaaagccttttgggagttcttatcagattacggttatgcttatgatgaagtaagtccaaagatgataggcgaatacaaagaataccttatgtcagaggatgataacatcattgctattaacaaagaaggtgcaagaacagcaaagacaatcaatcgtatgcttagtaccttacatggattctatcagtataaagcagatatgcaggaaattgacaatcctttgttgatgcatgaggtaaacagaccattcaatgcttttaagggtatcttggaacacgcaagaagtgataacaaaacaaaacagtctatctttaaggttaaggaaagtaattacaagattaatcttgtctcagatgatgaaatggaactgtttctgagccgtttagacaagcgtagagacattcttttatacaagatgctttatcttacgggcgcaagaatacaggaggttttagaccttgaaatagagtctgtaccagtaccagatatgtcacagccagtcggttgttttcagcagattaaatcaaaaggcaagacaagagatttgtatgtgccgatgtcacttatacaggaactggatgattttatttttgaagaaagaaaccttattgatacagaccatagttacatctttgtatcagagcaggcaagacagcttggaaaacagcttacctatagtgctgcttatgataagttaaaaaaggtacagaaagaggttggtattgactttaatttccatgatttaagacataccttctgttccaatcttgtacagtctggaatggatgtaagtgttgtaagaatgattatgggacatgagcatctttctactacacagaaatatacacatctttctaatccgtacattgaggacagcctttcaaagtattggaatcagagtacactgattggaggtgactctgatggcaagtaaaagaccagatagtgatgtatggaatatcgttgataatgatgaaatgtcacagcactatggaagaaacttcaagtttgatttttcgtatatttcaagtgacgagataaaggaactgtttaaggactatgtatggcagaattacagagtgggcaataaaacattgagtagtctttacagagaggtaaattcatatttctatcgattcattcagtttgcagaatcaaggaatatcatatcattaaagggattaacaaatgtagatgttgagaattacatctcctatctgcatacaacaatctctgaaaagactggaaagccttatggaatatcaatgcaaaggcattctttgtttgctttgaaatccgttatccgttggtgtcagttacatagacctgatgatgcgcctgtaaccgagatttttacaggaagtgagtacacaggagtcaatcgtaagttaaagatagacttcattccagatgatgttgtagcacagataaatgaggctcttaaaacagaagaaaatcaatatctaaagtatggcattatcattcttcaatctacagggatgcgtattggtgaccttttaaaacttcgtattgactgcattaagccacatcctattagtggatatacaatcgagtgggtgcagcataaaggacgcaagaataaggctcctatgcctgtcagaagcgaatgcgttgctgctattgaaaaactgatagagattaccaaagaattgcgtgatgaagctgatgaaaaagataaagatactctgatgatatggagagtttctaaaggcaatagatatatacaacaaggaactgtacaggttgtttctaaaggcacatttgctaattattggtttaagaagttcatcaaggacaatgacatcaaagatgccaatggtgattactacaaccttacgagccaccagttcagacgtactcttggaacagatatgctttctaagggtacaaacatcaatgtaattcagcaggtgttaggacattcggatgcatccgttacaaagcgtttctatgcagatgtaaaggataaggaacgagcagaggtatttaagagtgttggtgtgattggaaacatcaatcagatacagagtaatgcttttgacaatatatcagagtttgaatggttcaaggcaaacaaagataaaggtgcttgtatgtgtgatggttattgcacaaagccagtgattgatggaaagatatgtgacagacttcttaaaaggcagaaatgttatacctgtagcagatatatcactacaccagaatacttagatgctcataaacggcacttggcaaaccttgaaaaacaacttgaagaaggtgttatctacggagagcattacgcagaacactttataccgacaatagaggttttaaaggtaatcattgaaagattggagggattgcagaatggcaactaacttggcattacagttacaggtcattgagcctgatacagatttaaacagcataatgataggcaattccaactacaatgatgatgtgtgggatttaagaccttttattactgctaaatcaacaaaggaatcgcagaaatacattagatttgaatatatagcagatgtagatatgaaggaaactgttaagcagtacgcctactacaaactcggtaaaatgaagccacagacagtgcgagattatatcaatgccaaacttccaatgtttatcgaatactgctccttaaatggtattcatagcttcgcagatgtgactttagaggattacttaaacttcaacctgtggatgaaaaacgataagaaggtggcacaacagacaggatttatgtcttgccatatagtagaagaaatcatccgtatcggtcagataaagggttgggatgtacctacatttcatcttccgaaggcagaaacagcaaatcagctttggaatactaaaaagtctatgaaaaccaataagacaaaacctataccagaggatgtgttcgataagattttgtaccatgcagtacacgatgaaaaggatgtacttacaaagtcaggtattattattcagagtcagacagggcttcgtatcaatgaggttttatctatacaggaaggctgtgttaagcgaactttcgatggttatgattacatggaagtgactcttgggaagactgaaaaaggcgaaccaatcattcataaggtatttatcaatgaacttgtaaaagacaccatcaaagagctttcggactttactgaaccacttcgtaaagaaagtggattaaaggaactgtttctttgtaagtcagcaaaaaagaaaaatgctatcaatgtttattcattggaacattggaatgaccaaaaactaatgccctttatcaaacgatgggacatcagaggcaataaaggtgagttatatccacttacttcacatcagttcagagcaacttttgtaagagaacttatcaaaagaaaagtgcctatcgcaatgattatgaaacagtattctcatgtttctattgaaatgacagcacactatcttactttgcaggaagaagaagttaaggaaatctattccgatatgattttaagtccagagtcaaagattgcagggcttagagcaaaagaaatcaaaggtaaattagatgacttatttcatggtaaaaccgaggatgagattgatgatgtaatcacagatttagccaagacaatgagttttaatccactgcctacaggagtatgcttgtatgattttaggcgaggtaactgtacagatggtgatggctgttttttctataactgccctaactacatcacagaggttcagttctatccaatcctaaaggatgaactggatttacttgaaaaggaaatggcaagattaaaggaacttggtcatgaacgagaatggcagaaacagtacatcaagtacaagtatttaaaaccattggtagaaagtctggaggtgcagttaaatggcaaagaaagtgtcggatagccaggttgcaggcattaaggctcatgcagaggctaagaataaggcaaccattgataaagttaataaggcaatagataaactcaaaagaaaaggaaagcctataaactttgaaacagtctataaagaggcaggagtatcaagagcaacactttataacaatccacaacttaaagagcgtattttaagccttagagcaatctcaaaggcaagcccattagatgatgtggttgctgttaaaaaagataagttgcagcttaaagatgataagatttcggctctccgggaacaaatcaaaaagttagaggatgataaaaagaaacttattgaacagttagtcgattatgaagaactcaaagcagaaaatgaacgactaaagaaacagttagtaaaacaggcatagaggtacatttatgaatgatgaacataaagaaaagatttattacattcagcaacaggcagatgagttgagtgcagaaatatcaaaacttatgaggaaggatgctgacctttcggaaaagcatctaaatgatttgattaagttaggtgttttcatttcgatgacctgtcaagagttgttggatgaagaataactaaaagaaaggagaacgtagtggacagtatttcgtgtaaagaatgtaagaaatgcttatttatcaatactttacaacttataatacagtcctctactaaatataaataatggcaaagaagaaaagcgcagggtgcgaat

SEQ ID NO: 720 - DNA, 12978 bp, Unknown
  gut microbiota DNA sequence
agagtacgttatataaaccaacaacaacccagagtgaaacatagcaccataatgagtgccatatttgaactgaaaatcatttcaggtaaaaaagattgtatgttaaaataaacatagataagaaaagtacaacattaattcaaagaggtggaaattatgtcaagttttaaaaatgccgatgcaggagttatcgtagaccagctaatcaagacaattcagaaagaaagagattacttaagtgagattgatggtaagatcggagacggagatcatgggatcaacatgaacaaaggttttacgatgtgcgagaagaaattagaaggaactacatataatctgtcagaaggactgacaacattaggtgagacactgttagaagatatcggtggatcaatgggacctctgtatggaatgttatttgatgagatggctcaggcatgtgaagatgaagaagagatcacagcagatgtattcgcagaaatgatcacagcctctgtagaaggaattcaggatatcagccctgcacaggtaggagacaaatcactgctagatacattgattccagcaaaagaagcatttgtagaagcaaaagaagcaggaaaagactttgcagaatgtttggatgctatgaatgccgcagcagaaaaaggatggcagtctacaaaagatcttgtagccaagatcggacgagcaagccgccttggagaacgttcccgaggagttcttgatgcaggagcaactagctgttattttatcatcacaactattggaagcacagcaaagagcctgttataagaatgatttatattgcgaaagcaatgaaccctctatatattcatacaatttgtttaggaagaacctcaaagtttcggaaagaagctttgaggttttttcatttcataggaaattttcttgacatttttaaaaaagttattgacaaataagaaaaaagtatataaactaactgtatcatatgaaatggtacagttagtacagctaatacagtatggcatacagtacgacaaaaacaataaggaggtacagatgtgtttcgaatcaaccctgccagtggcaaggcaatttatgaacagatcatggaacaagtaaaagaagcagcgtggaaaggatatctaaaacctggagatgctttgccgtccgttcgtaaattagcattaagtctcagtgtaacacccaacaccgtagcgaaagcatatcagttgttggagaaagagaaagtaattataacaatacgaggaaagggagcatttttggcagagaatgcttcacaagaggtagacaaaggaaagatgcaagagatcaagacaagtttaaaagagatattaagtgagcttcgttatgaagggtatgatgaagagaagatagcaagcctgatacatgagatctatcaggatttggagggataggatatgaaagtgatcgaactaaaggacgtgaaaaaatcatatggaaagaatgagattcttcatggaatcagcctggatatagaagagggaagcattcatgggctggtaggacgcaatggatgtggaaagacaacactgatcaaatgtctaacaggaatttatgaacaggatcaaggacagattctggtctgtggagaagaaattttcgagaatccaaaagtaaaagcacaggtaggatatgttgcggacagcaaccagtattttgaagggtatcatatcgatgagatggtagaattttataaacagatctacccaacattcgatgagaaagtatttagggactacaatcagagtatcggattagatgtaagcaaaagaatcaaagaattatctaaaggacaggcaatgtcattagcttcgatgttgaatctgtccatccatccaaaagtgatgatcatggatgaaccaatgtcaggactggatgtgatcgcacagaaacagatcaaagattttattgtcaatgaagtcgatatgaatgggatgagtgttctgatctcatcacacgatttaaaggatttagaaagtttctgcgattccgcaagtatgatgaaggacggaaagatcctttatcatggaacaatggatcagatgaaagaacgatttacaaaattacaggttgtatttgaagaatcaagaagcgagatcttcaaagaacttccgggagtgatcacgtattctaatcttggaagtgtatacacagtaatattagaagggtatggagagccaattcatgaggcattaaaacaagcaggagcgattgtagtagaggaaattccattaagtttagaagaagtattcgtctacagcaaccgctaagaggaggaacttggagatgagattttttagaaaatatgatttggtacttccaccagcagcattgttatatgggattttcgcatggaatatgaaatatccaggggatggactgccacagacgatgatggataatcttgtcaatggctggcttttgatcacagttttatttgcagcattatcagcaggaattgtatatcagttgcagcaaaataagaaacagcaatatatttacagccttccatggacaaagaaagacatttaccaaaagagtcttacaaaactgcatatatcacttttgttcgcggagatcatctatggaattttctttgcaatgaagatcgcaacgattccgaatgcggaatcaatcacgaatgtgatcatatgcacattatggaatgcagtaatgtgttttgcattttgtgcactgatacaggtttcattgatcgtgacagcatatatctggcaaggacttgtcatagcagtcgttacattttatgtgatattgccgatgatccttcagaatctggcatttttactccagttgctgtttaaggtaagatcttctagatttgcgatactcgagtgggttatctatggaagattcggcagaacatttttatatccattaaattttcagcttgatacaaatagcttggagagcaatccgatctggaaagcacaatatgtaaattctgcgatcatctgtattgccgttttatttgcagcaggagtctttagtatctggtttgcaaaacgacagtttatcaagcaggagcaggcacagaaccgaatgttaacaaggttatcagggatgcagaataaagtcatcacgacgatagtgatcacgatcctgtgttttaatgcattaagtaatcatgagatatatgtttatatatttaagtatgacaagacacttcgaaccagaatttatggattgatcgcatggggaaaagaatttatgtgttcatcagatagttataaactgatcatacagaaattaaatgcagtacattggtttatatatttggtagtgatattagtgatcacatattttgctgtatcgattattcagacaataaggaggaaatgttatgagagggcttgttaatcatgaaaaacgaaatctgctagccataacattagtgtataccatagtgatatgtttcatattacaatatgtgatcgcaaacgatatttcaggaactgcagatcagatcaataatttttatggaggcatttataataattatggcaatctgtttttaggaacattagatcaatactatgaaatgttcattatcgttcttatgataccggttagttttgtagcggtaatacagtatcgggaaagcagtacatcaaaatgtggagaatttttaatgcagcttccgatcaaaagaggtcagatttttctgacaaggacgatcacaggaatgatgacatatacgattccatggctttttctttcattcggaatgatcatgatgagaacaaaagcacagtcatggtatgagatgaatctatccgtatgtaaaaacggagcagtacttcttggaaatgataacatcatacatttgtgtgcgtatcttctatttatatgggtatcattgacactcatctatgccattgctatattttttcagaatatctgcaaaagaccatggatcgcaggagcgatcggaatcggagcaatgttatttccaaactttatggattatatgatgccaaaagtattatcattcccagatacaatatatcatggctggtggatggctgcaatttttgaaaatggaccgatcacaaaacagtttatatgggataaaggtgtgaaccagctggtgacgatggcttcgtttgatcattttgcacagatccttctgattcagatcgtattgatcgcagtattttttggagttgcattttatgtatttcaaaagtcggatatggcaaagaggaataattttatgtattttccatggatggagcatctgtttgtatggatcttcccattctgtgtttcattattcattgtagtgacagggttcaagattcagtcatacacaggcggcattctggcagcagtgatcgcaacgatcatatattatatagtagaaaagcgtaagaaaaggagggcagtataatgtattattcaactgcaactggttatattatcatattatcaccactgatccttctagctttattggcaacgatcggaatcgtactttaccgtcatccgtcaaaattacagagaaaatggtatagcgtatcatttaagaaaagaaaaagaattaaacaaatagcgattcttcttggattttgtatggcagcaggactacttatctatcctttgacaagcaaaaaacagttcgtatcaacgatcagtctgtcagcaaatgaaaacaattttatcacagaagataagatcgatcagatttcagaagacagaagagaaataaaaaatgagcaatggctgaaaaaattttataagatgatgaaatcagacgatgaaagttcgactcttttaaatgacataggaagttatgaagtatggaagacgagtatcctggaagataaaacgggtgagtatgagctgcgtttaagagcagaagacaccgttcttcgtagattttcaatacagcaatcggatgaagatattgattctgacgtagatttcgacagttacaatactgacggattttatgatatcattcaaagaccagacaatacattcgaagaaaattatcaaaagcttacagattcagaaaaaaaagaaattaaggatctcaattggaattacaaagacggtcttttgtatgcaacaaatgaaaatcataagagatgtatcaatggaacatcccagtattatatgaaaaactccaaattgatcaatacgatggaaaattcaggatacaaaggaatcaaaaaatggatggaacaatgcgaaaaagatacagcagggattaaagtaaaagttggagataaaacatacttgttccataatacagacaaatggcatacattcaagaaaaatggattaacatgtctgtataattacaaacgttttatcattcgatttgattttaacaaagtgattgggtttaggagtaatctatctgaccttccacaaagtggcagagaaatgtggacagctatatcggatcatagtggatcagctgcgaatgaagttattcttcgttcttataatgatgaagaattatatgcaaggaaaaatgttcagatctttttgcaagatcacaagatcaaacagatgttgatctactgggatgaaacagaggcattcaaaggattcacaaaagaagaaaagatattcttaaaaggctgtttcgaaaaaatgggtatctcatccaaggatgcacaagaatggttaaatacatttatgatcaagaaaacgccacagagcggtaagttaggaagctggacatacagcaaaggaaatagtaaaaatcaggtaatatcattgatcaatcataatgaaaataataattatgtaaatttttacaaaaaaagtaaaggaaataattgacaaatataaaatgatatggtaaattatgggtagaaagtgcttacagcacaaactccccttaataaacagttcgagaactacggttttcctgcgattgttcatcgcccataccccatagaatctcgaaagaattgtattttagattatcatcatcaacaatcattttatatttatctgcaatcctctatctaagttgtgatgtgagcactttcgatttttaaaatatgaaaataaggattcctatgattctatgatatagaaacataagaatccttttcattatttttaacaaatcacaatgacaaatcaaaaataatatgatatgatattattttgaatgggataatataagaaagtagtagaaattcacatataggaggaagaaacatgccagtaaagtatgtatttgttacaggaggagttgtatctggattaggtaaaggaatcacagcagcttctctgggacgattactaaaagccagaggctatcatgtcacaagccagaagtttgatccgtatatcaacattgacccaggaacaatgaacccaatccagcacggagaagttttcgtaacagatgacggagcagagactgacttagaccttggacattatgaaagatttatcgatgaaggactgaataagaaatcaaacgttacaacaggtaaagtatattggagtatcttatccaaagaacgtcgtggagattatggtggtaacacagtacaggtaatcccacacgtaacaaacgagatcaagagccgtttttacagaagtgaagatccaagcgatcaggaagtagcgatcattgaaatcggaggaactgtaggagatatcgaaagtcagccattcttagaggcattaagacagttccagcatgaagtgggacatgaaaactgtattttaattcatgtaacattaattccatacttaaagagttcaggagaattaaagacaaaaccaacacaggcaagtgtcaaagacttacagggaatgggaatccagccagatatccttgtatgccgttcagactatccattagatgatggaatcaagagaaagatcgcgcagttctgtaacgttgaacgttcaagagttattcagaacttagatgcagaagtattatacgaagtacctttgatgatggagaaagaacatctagcacatgaagtatgtgaatgtctgaacatgccatgcccagatccagatcttgatgactggaagaagatgatcaatgcatggaaacatccagaacataaagtagagatcgcattagttggtaaatatgtatctttacacgatgcttacatcagtgtcgtagaatccttagagcatgctggagtcgcaaattcagcagatgtgaagatccgctgggtagattcagagagaatcagctcttacaatgtcgatgagatgttaggtggagttcatggaatcttagttccaggtggattcggagatcgtggaattgaaggaatgatctgtgcgatcaaatacgcaagagaaaacaagatcccatatcttggactatgcttaggaatgcagcttacattagtagaattcggaagacatgtcttaggattctctgatgcacacagtcaggaatttaatccagacacaacacatccgatggttcatatcatggcagatcaggatggagtcacagatcttggtggaacattacgtttaggatcttacccatgtgtattaacagaaggatccaaagcatatgaattatatggagagaaagagattcacgaaagacatcgtcatagatatgaagtaaataacgaatatcgtgatatccttcaggagaatggaatgatgttatccggatgctcaccagacggaagaatcgtagagatggtagagattccagaacatccatggtttgtggcaacacaggcacatcctgagtttaaatcaagacctaacaaagcacatccattatttaaaggatttgtagaagcagccttagaacatcaaggtaaataacacaaaaagttaatataacatcatcaaaaagattctgagatagattgatatttcagaatctttttttacatattatttacgattcaatgcaattagaatttacatatatatgatagaatcctttaagagtcagaaagatatgaaaagacaaaggtatcaggaggtatatatgagatctaattggagaaaacaaatgatgatcagtgcattagcattgacactttctgcaacaaatgtagcaccagtatttgcaagtgccgctccagatggcaagacaaatgcagcagacattgcacagacaatgggaacaacggcacagtggaatcgttgggagaaagaatgggaaactttaaaaaatgactggacacaaatttcattgtcaccaggaagcaatgcaacggagttgaattttgcatggtatacaccaaagcagacaaatgatgatcattcaaatgcaaatgttccaaaactgatcattggtgaaggacataatatgaaaaatgccaaggtgtacgaggcagaacaaacagcagtaaaagatgaacaggataacaatggggaaacttataattctaataaagtaacagcaacaggattaaaagaaaacaaaacatattattatagttacgacaatggaaatggctatacaaagccagctaaatacacgacaaaatctacaaacaatttctcatttgcatttgtaggtgacccacagatcggatcttcaaatgaattaaagggaaaagatacgaaagaattttacgatgcacagtcaaatgcagtaaagagtgatgcatttaactggtcttctactttaaacgcagcattagaaaagacagatgatcagttaagttttgttgtatccgcaggtgaccagattcagacaacaaagaaaaagtcaccaaacaaagatgcatcaaaaagtgaaattgagtatacaggatatttaagtccagaagcattaaaatcacttccagtggcaacgacagtaggtaaccatgatgcagataatgcaaactatacataccattttaacagaacaaatgcaagtgaacttggaagtaataaggtagtcggtggagattattatttcaaatatggaaatgcattatttatcatgttaaatacacaggatacaaatgtagcagaacataaacagtttattgagcagacagttgcagcgaataaagactgtaaatggagaatcgtaacactgcatcaggatatttatggatcagcagaacattctaatgagccagagatcacaaatttaagatatcagttaacaccgattttcgaacaaaatgatattgatgctgtattaacaggtcatgatcatgcttattcaagatctaaaatgttattaggtggaacaaaagcgaatgattatacagataatgaatttgatgcagaattagagaaagatatggatgcgggtgaaaatccaacgacaaaaacagtggcaccaggaaatattaaaaatgacagcacagatgaaaaagatcagaaatacttaacatatcttaaaagtatcatggatgaaaaagcaattgagactgtcaaaaaacagggaagctctgtaatcaatccagaaggtgtcctttatatgacagcaggttcttcttcaggaagtaaatattatgatctggtaccaagacagcagacatatattgcacaccgttggcaggaagatgtcccaacatattcagttgttgatgtaacagaaaatagtttaacgatcaatacatatcgtacagataatgatgaaaagattgatgaaacattttctatcacaaagagcaaaggggatacgacatcacttaatgcagaaattaaagcatctgaaagcattgtaaagcaaaaagatgcatatacaacggaaagctatagagtctttgaacaggcacttacaggagccaaagaagttgcagcagacaaaaaagcaacaaaagatgaagttgaaaatgcattaaaagttctgacaaatgcaaaagcaggattagaaaagaaagcaacaacaaaaccagcaacagtaaagaaatcaacagcagagaagaaagttgtagtagcaaaagcatctgcaaaattaaaagctggcaaaaagaaagtaacagttaagatcaaaaaagcatctgtatctggatatcagattaaatatgcatcaaacaagaactttaaaaaagcaaagacaagaaatacaagaaaaacaatgtatacgatcaagtcattaagatcaaagaaaaaatgttatgtaaaggttcgtgcatacaaagtagttaaaggtaagaaaatctacggttcttacagcaaagttctgaaagtgactgtgaaataacaatgaaacaaaaacagatgaaaggagtgtgtctgctgatcgcaggcattctctttcttctgctgtttttttctttttctggaattgagaagacaaaacttctagatacagatggaagaaattttgaaaaagcagaagtaacaaacgtgatctctggaaacttatcaaatagtggaagtggaaaacaaaccgtagaattaaaacttctctcaggggatcataaaggaaaaataatacaggcaacaagctctcaaagttatttatttggtgcaaaatgtaaaaaaggaatgaaagtcatagcgatcattaatgaatcgaaaggagagttgctggcgtctgtatatagtgtaaacagaggacctatggtatggctgatggcagcagtgtttgtagcaatcgtggttgcagtcggtggaagaaaaggaatttcatcaatattaagcttggtatttacaatgctttgtatcttttttatttttcttccgatgatctacaaaggaatatccccgatactggcggctgtattagtggtcgcatttacaacagttgtgacgatgtgtatggttgatggaattacgaagaaatcagtagccgcgatgcttggaacgatcataggtgtggtattttctggagcatttgcattgatttttggacaagtgacatcgatcaccggatataatgtgtctgatatagagaatctggtctatgtcggagaaatgacagacataaaaattggtgaattgttatttgcaggaatcttgatcgcatcattaggtgcagtcatggacgttggaatgtcaatcgcctctacactcaatgaattaaaagaacaaaatccacagatgatgttaaaagaactgtttcaatcaggaatgaatgtcggaagagatatgatgggaacaatgaccaatacactgattcttgcatttacgggtggatcggtcaacacattagtatttatctttgcatacaattacgaatatcaacaggtgatcaatatgtattccgtagggattgaaatcatgcagggattatcatcaagtctcggagttatcatggcagttcctgtgacctcctggatcgcagcatttttatataataaaaatcaaaaataaagaaaagactccataacaattcagatctttatgaattcgcagacagaagtttgagaatatgttataatgaaaaagattaattaaatttaacaagacataaatatttgactaagtttagggggcgaaggttatgaaagttaaaggagtcagactttatggagtcaaagatatacgtctggaagaatttgagatccctgagatagctgaagatgagattctcttgaagatagaatgtaacggaattgcagtgtcaactttaaaagagatcacattggcacagagacatttaagagtaccaaagaatattaaaaagaatcctgtactgatcggacatgaattttctggaacgatagcaaaagtcggaacaagatggaaagaggattatcaggaaggaaaacaatttgtattagtaccagagattcctcaccagatcgaatcaccaggatattcttacccttattttggaggtgcagcaacatactgtatcataccagaagatgtaattgagaaaggatgtttgttgcaatatgaagcagattcattctatgaacttgcacaggctcaggctttatatagtatagtgggaagttttcattcaaactatcacagtaaagagggaacccacgatcatatatctggaattaaagaaggtgggaataccatcatccttggaggagccggtcccatgggactaatggcaatccgttatgtccttggaatgaagaaaaagccaagaagactcgtgatcacagatacgaatcaagagcgtttggaaaaagtaaggaaaatgataccgatgcaggaaggaaccaggcatggaatagagctttattatatcaatccatcgatgtttacagactccgttccagtgttactggcaataaccaatgaaaaaggatacgatgatgtgtttgtctatgcaccacccaaatgtgtagctgaaataggaaatcgtattatggcaatggatggctgcatgaatatttatgcatcaacagcagataaaaattatcgtgctggaatgaatatatacggaagccattatttaaaaactaaactgatcggttcatctggaggacttcgttcagacctgatcgaagccttagacctgatcacaacaggtaagatcaatccagcagttggaatcacacacattggaggaatcaatgcgattgtcgataccacattatatttaaagaagataccaggatcaaagaagattacatacccacagatcaacctgccattgacagcaatagaggactttgggaaattagctgagaaagatccagtctttggagaattagatgaatcttgtaaacgacatggtggattgtggaatccagaagcagagaagatactgcttgatcattttaaaaagttttaatttgtgtgttggccaactgtagattttgagtatatgataaaaaataaataagcaaccgaaagcgatgcggtggaattttgctcatattttgaacaaatcgctgattcgcccaatttcctacgaaaactcgctctggagttttgtctaagaccaaagtctttgaagctcagacattcgtccaattgggctgcgaatttattcaaaatatggcaaaattccaatgcattgctttcggttgcttatttattttttatcatataccagaagtctaaagtgtggacaattacaagattggaaaa

SEQ ID NO: 721 - DNA, 7719 bp, Unknown
  gut microbiota DNA sequence
gaggacagcattgattgcaaaatagggatttttagacagaaggtaatgttattatgcttcataaacattccaacaaatcggtgttgtagaagtccttttaccgtctgttaataaacacaaaaattattaaccagtatcgtataacatacacaccgtgtagtggtttgaatcacgtaaattatttgaatattataaaaagagatcatgtgtcagcaaccgtacggacacgtctgcacttagcgagtggatggtcgttagaccattcaggagcttagtacagttacgtgggagtccgaacgcgagtgggttgcaggcacatgatctctttttataatattccaccaataatttccgttattcaaatcacaatttcattgcacgtatagagtttattacgcatagcattgcaactccgctatctgcgaacacagccatccacatatttgcgaatccaagcagtccaaggatcattactaatgccttgatcgctaatgcaaatacaacattctgccaagcaatcgtgcaggctttttttccgatagagattgcctgtggaattgcttcaacgtttgaggtcatgaatacaacatctgctgcttcgatcgcagcatcagcaccacttcccatggcagcaccgcaatcagcaccagctaatactggggcatcgttgataccgtcaccaacaaacataacagcgccatgtttgcttctctgttcttgaagtttggcaagtttttcatcaggaagaagtcttgagtaaacttcgtcaattccagtttcttttgcaatcgcatttgcagttgtttcggaatctccagttaacatcaccgtgtgaagattctgtgcttttaaggaagcaatggcggatttcgcatcgtcttttaatgtatctgcaataacgatcgcaccaattaacacaccatcttttgcaagaaaaacttcagttccataagaagttgtttctggatagtctccagttacatgatactgagccatcaattttttattgccagctaagatttctgagttatcaattgtgataacagaaccatgtccagcgatttcttttgcgttttcaggtgttttataagttacattttcttctttggcagcttccatgatactctttccgattggatgagtagaagattcttcgcaggaagcagcaagtgataatatttcatgtctggttgcatttccgagaggaatcacatcctgaactttgaagtttccttttgtgatcgttccagtcttatccatgacaacagaagtaatatcttttaatgtttcaagtgcagctccgcctttaaataagataccgatcttagatccagccccgattccagagaagaatgcaagaggtacacttaatacaagggcacaaggacagctgattacaaggaaagttaaagctgtgtatatccagtgtgtccagtttcctgtcactaaagaaggaatgatcgcagttgcaagggcaagaagtacgacaaatggagtatatacacgagaaaaacgtgtgataaaacgatccatctttggtttgcttgcggctgcattttctacggaatccatgattcttgtgaccatagattcttccagtactttttttaccttgatcttaataacaccagaagtatttaaacatccagaagttacatctgttccggcagaggcagaaacaggaatgggttctccagtaacaggagaagtatcgatcatcgtttccccatctgtgatgataccatctaatggaatacggtcaccaggacgtactaataagatatctccgatttcagcttcttcggcatcaattacagtgacatctccatgatcatcaacaaggttgacaacttcaggtcgcatatcaatgacatccatgatctgggaacggcttcgttccacagctttttcttcaaataattcaccaatacgataaaacatcataacaccgaccgcttccgcaaattctccgacgccgaaagcaccgatcgttgcgatactcattaagaagttttcatcaaaaacctgacctttagagatatttttaagagcggtccatacgatcttaattcctaagattaaatatgcaaggataaaacataccatactgtatacaggcttggaagattccaatgcttttccggcaataaataaaacgataccagcaccaagttcccagaattctctgttattttcagaattctctttggcttttttcgcttctttttgtgcacggacagtattttcacggacaacgactttgacatctggttcgatggaagtacaaatatcttgaatctgaggcaataatgctttggcatcatcagaccatacacgtaactgctttgttgcaaatgtcagattgacggcttcaacaccgggaagatgagaaatctgttcttccattttacctgcacaatgagcacagcctaacttctcgacaataaatacggttgcctgaccatttccttcacgatttgcagcagctgcaattggttcatcatcatcgtcatcgttgtcatcatcacagcagccacaatcgcagtggtcatcatgatggtgatgatgtttgtggtgttcatgttcttcgtgatcgtgttcacacccgcagtcgcagtggtcatcatgatggtaatgatgttcgaggtgctcatgttcattatggttgtgatcacatccacagtcacagtgttcatcgtgatggtgatgatgttcatgacttccatgagaatcttcttccacatgttttctccgtttagatgattttttcgtaacttccgtcacaataacatccggttcaatatccgtacaaatcttttgaatctcaggaagcagatcttcacgagaagtttcaacatacatttttttcataggaaatgaaagatttacactttcaacatcaggaagtttcccgattttttcttccattttacctgcacaatgagcacagccaagattctcaaactcataagtcttcttcataaatacccctcctttcaaatacagtctttaacagatcagatacaagctctccgtcagcagtgtctgcgatcgtataatgaacttctttcccaattcgtctgcttgtgatcacacctaattgcttcaaagagcgaagatgatgagacactgctggtgggctcatctcaatcgcttctgcgatatttctaacacagacttcacggtggtataaaagatacaaaatacgaagtctggtactgtcacttaacagaccaaataaactggcagtttcaatggcaaattcttctggtggaagaacatgttttaattctgtaacatcacatccatgaccatgaatatccatagaagcaatgttatatttctccgttttatccatagaaatctcctttttgtaagattaaatgattgtttaattgtttatgttttaaatataatacttttaaatattgatgtcaacagaaatgagaaaaatagttaatagaagtattgtttggtgtaatcttggaattatacataatagtttttcctaactagaaattaaaaaaatataggataatcaaaaaaaatatgatatactaaaaactacttatacgaatttattagatcaaaaaatcacatttcgataaaagcaaagataaacaaaaacagaaaaggaagtgtatcatggaagagttaaagaacatcaaagtagccctccttggttctggaactgtcggaacaggagtatacaaactgatcgaacgccagagagaagaattacctcacaaagttggtgcaggtctgactgtcagcaaagttctagttagagacaagaacaagaagagagaaggaattgacccttctgtattaactgaccagtgggaagatattatcacagatgatgagattcagatcgtagtggaagttatggggggaatcgaacccgcccgtacttatattacagaagctcttcaggcaggtaagaatgttgtcacagcgaacaaagacttaatggcagtgcatggtggtgaattattagatatcgcttcccataatggatgtgacttattatttgaagcatctgttgcaggtggaattccaattatccgtccattaaaacagtgtctggcaggaaactatatttcagaagcaatgggtattgtcaatggaacaacaaacttcattctgacaaagatgacacacgaaggaatggaatttgatgaagctttggcactcgcaacagaattaggatatgcagaagcagatccaacagctgatatcgaaggatatgatgcaggacgtaagatggcgatcatggcatccattgcgtttaactctagagtcacatttgatgatgtatacacagaaggaatcacaaatatcacagcaaaagatatcaaatatgcagaagcaatgggatgtacgatcaaattgttaggggtagcaaagaacacagaatctggaattgaagtacgtgttcatccaatgctgattccaagtgatcatccattggcaactgtcaatgattcatttaacgcagtttttgtacatggagatgcagttgacgatgcaatgttctatggaagaggagcaggagaattcccaacagcaagtgcagttatgggagatatcattgatgtcgcacgtaatattcagttctattgcacaggaagaatccattgtacatgctacaaagaccttccaatcaagaagatcacagagattgaaagcaaatatttcatgagattgttagttgatgacaaaccaggagttcttgctcgaatcgcagatacattaggaaagaatcaagtaagtatcgcacaggtgattcagaagaacaaggttaatgatatggcagaattagttgttatcacggatcttgtactggagcagaactttgcagatgctttggttgagattaagggaatggaacatactcgtgagatttctacagtaatcagagtgtattaaattttaattgtagttggccaactgtagattttgagtatatgataaaaaataaataaacgatcggaagagcagctagagaattttcctcacgttttttacagatcgctgatccgccggctttccttgcgtaactcgccttcaagggtattgaaaacaggactctttgaggctcaaacaacgcaccaagccggctgcgaatcttaaaaaaacgtggcaaaattctaatgctgctcttccgatcgtttatttattttttatcatataccagaagtctagagtgtggacaatttaagattgaaaaattcaagagggtgtgtatggaggactactatagtagtaaatttcaattccatgtgatagaattaagtaaaatagaaacaacaaaaggaaatcattacatggaaaaggcgagggatgagatgattaagatgagcagggatgaaagtgaaagataatcttctgttagtgaatacaaaaatgattagccaataccgttaaacatacacacagtgtagtggtttgaataacgtaaattatttgaatattataaaaagaaatcatgtgttggcaaccgtacggacacatgatttctttttataatattccaccaataatttccgtcatcaaactacaaatcacaatatatgattccgtatgatcaaccgaattgactgatacaaataaggcttcaattcatcaaccgaaacaggctccccagtcaaaataacattatagcaagatccagcgaccatctcgataatcatatagatcataacttccggatgatcaaattcatgaccagaattattcaaaagatccatatagatatcataaatatttctctgggcatcatcgatcggttccaccaaggaatttttaaacattccccagcttagatgctttgagatcagttttaacagagtcggattagcatttaatgctccgatgacttggtcaacgataaagatcagttggtcttcaaaatgatcaatggattgtttttgaagttcctgataggcgtgtttaaatacttctgcagattttttggcgattaatttatatcggatgtctaatttatctttaaaatacaaataaaaagtacccttagcaacgccagcttcatttacgatatcggagatggaggtcttctggaatcccttttctgtaaacagttggtatgccgtattcaaaagggcatcttgtttctttttcttatttaattcgacctttttcatagtaatttctcctttcatcttctttagtataacgaaaaaatgaccaaaagtcaaaaacttttaagaagtttattgacttttggtcatttttggtgtataccattatatagattaaaaaatgactattcgtcataaatgtaaatgggaggatgctatgatacaatttgcaaagaaattagtacatcatcgaaaattcatcgtcttcctggctttcattttattgattccatcaaccattggaatcgtgaagacaaggatcaattatgacatcttaagttaccttccagactctttggagacggtgaaggggcaggatatcatggtagatcagtttggagccggagcctattcgatgatcattgtcgaagatatgaatcttcatgacgtacagaaattaaaacagaaactagagaaagtcaatcatgttgataagatcatctggtatgatgacatcgctgatctaagcgttcccaaagagatgcttcctgagaaagtaaggaaagttttctttaataagaacgcaacaatgatgatcgcaatgtttaaagaaacgacatcatctgataacacgatggaagcagtcacacagatgcgtaagattgttggaaaacagtgttttatcagtggtatgtcaggggtagttaccgatattaagaacctggtcatgcaggagattcctatctacgtaacgatcgcggcagtactttctttgatcgtattatttgccacaatggaatcctttgccgttgcctttttattcctgttaagtatcggaatggcaattctttataacctgggaacaaatattttcttaagcgatgtgtcctatcttacaatggcattgactgcaatcttgcagttaggagttacgatggattattcgattttccttctgcatagttatgagagtaataagatcagatttgaaggtgacaaagaacgtgcgatggcacatgcgatttcgaatacatttaagtccatcacaggaagttccgttacaacggttgctggattcgcagcactgtgctttatgacatttgcattaggagctaacttaggtatcgttatggcgaaaggtgttattatcggggttatctgttgtgtaacagttttgccatcattgatcctgatctgtgataaattaattgagaagacacaccatcgttcactgatgccagatcttacgaatgcatcacactttatcacaaaacattataaaacaacaattgtagtatttttaattttgctgttcccggcaatttatggaaataatcacacagagatttactataatattgataaatcactcccacaaagcttaccgagtaatgtggcgaataagaaattaagtgatgaatttggaatgagtaacatccatatggtcatgatcaagaatggcatgagtcagaaggaattaagcaacatgcagaaagagatcgataaagtcgacggagttgaatggtgtctcggcatgaactccgtgatcggttctagtattccatctgatatgattccttcttctatgaaagagatgttgcaaagtgatgagtat

SEQ ID NO: 722 - DNA, 7586 bp, Unknown
  gut microbiota DNA sequence
gtcgtgcaatgaaacttaagaacctgtttatctgtaagaatacagaagcttctatcgaatttatcgaaggtttcaaaccagatatcgttgttaacgcaacaggatccgttcctcttcttccaaatattcctggattaaaggagaacttagaagcaggtaatgtatctacgatctttgatctggtagatcacgtagattcttatccagaagatttatctggtaagaaagttgttgtgatcggtggtggtaacgtaggacttgacgttgttgaattctttgttcctagaaaagctgatgtaacgatcgttgagcagaaagctcacttcggtgagaaccttgactttatcactaagactggttctatcgaattcatgaataagaataaagtaaatcagtatccaaatgcttctttattagaagttaaagatcacagctttattgtaagacatgactataaagatcttgaattagacttcgattatggatttgtatgtcttggaatgcagtctgcaactccttctcttcaggaattatacaaccacttcatctatgaaggtgttgaagtacttaatatcggtgacagtgctcagacacgtcgtatcatcgaaggtgtaaaagaaggtcgtgacattttagttgcattagaacgtcaggatttcatctaagatcataattttgatttcaaacctttctttgaaagataagaaatatattgtaaatatataaaaaacatggaccagataacaaagatctgacccatgttttttattatttcattaatgttttttcttacgatactgccacaacacaatcttttcaaaataacgctttatgacgatctgaatctcttctttcggattcatcggtgttacaagaatactatgtatacctgttctgttcgctccataaacgtctgtaaacaactgatctccaacgaagaatgtattcttcttatccgttcccatcaatttcattgctgtctcatatcctttgatcgatggtttatttgctttgtatacataatattttccaccaactgcctcgcagaaagcttttactctcgcttctttgttattacttgtaaaacaatactgcataccaatcgcatccagtctcttaaataacttctttgctctttcatctgctggtgcatcgtgtggtactaacgtattatcgacatcaaagatcactcctcgatatccttctttgtagtatcgttcgaaatcaatatcataagtacttctgatatcttcggacgggtagaatttctgaaacataatttatcttcctttttacatctttacattgttcaatcttgtttattttataacagctttttacaattagcaagaagaaaacaaaatatgagaccagttttttcaaaaattctagtctcatatcattcattttatttctctacaccacttaaatatgcattataaatatcttttgagatactcttcttaatcgcatcataaactggctgtgcctgcttacgcatctctttctgtgtctttgtatcaagtttcacaatctttgtaccactgtcttcaatgatcttgatacggtctgcaattcgcttatcagatgcttctctcgcatacactttcgctgtctgtgatgcctgatcgatgatcttctgctgatcttttgacagactattatagaatgcatcactgacgatcagcgaaatataatgtggtagatggtttgtctctacaacataatcctgctgttcatataatttgctggaaacgataacttcgtaaggattctcctgtgcatcgatcgttccctgctgaagtccgatataaacttcgctgaacgtcattggtgttggattcgctccaagtgtcttccagaacttcaaatgatagctgttctccatcgtacggatcttctgccctttgaagtcgttaatactcttaacattcttattggtagacataacacggaatccctgatcggcatatccaagtaatttgtatccacccttctgatatactttctccatcttctgatagaactcttcattatcaacagctgctcgtgcctgttggatcgttgtaaatgcacttggcaggtcaaatactgcggtatctggaagaaatgttacctgtggtgcagtattctgtacgacaaatgggatatccccatctttacaactctcaagaagctcacggtctcctccgagtgtactgtttggataaacttcgatcttcatctttccatgacttaatctggaaacttcttttgcaaacttctctgcataaagctgtgttaccgtatcttccggactggaagttccaagcggccatgcatatctttgtacttcgtctttcttttgtttcttcttacatccggataaactgaataataagactcctgcaagaagaactacgacggatctttttatgatttttctcatgaaatcctaaacctccttataaaagtgccagactgatctgtggaataaatgtgatcagaagtaatgcgatcaggaagcagataatcagcggcattgctttctgtgcgatcttcatcactggaatatccgttaaggatgatgccacaaataagttgactccaattggtggtgtaacgaaaccaattgcaaggtttacaaccatcataacaccaaaatgaattggattcatatcgattgctgtaacgatcggtattaaaattggtgtcaaaataagaatcgctggtgtcgtatccatgaccatacctacgatcaacaagaatatattgatcacaagcaagatcacaatcttattatggaagttacctaagatccatgcactaatggactgtggtacacgcatcaatgttaatactcttgagaatgcaatggatgctgccaagataaacagaataggtgcatatgttctcacaccttctaccatgattccccagatatctttaaatttcatggatttatagataaataaactgactactaaagagtaaaatacagaaataaccgctgcttctgttggggatgcgattcctgtgtaaatacatccaaggatgataaccggacttaagattgcaaaaaagctttctttaaatactccaataaatccttttgcatgtaactgatcgatctctgctgcgatcttttccttatcttctccatgttttttacaataataaatggcatacaccatcaataaggcaccaatcaataatcctggtacaactcctgccataaacagatcacttacagattccccagatgccataccatacatgataaatgggatacttggcggtatgataactccaagcccgcccgcaactgctacgattgctgttgaaaatgacttgtcatatcctaaacgaactaagattggaattgtcatgcttcctactgctgctacagttgcaggtgcagatcctgagattgctccataaaataagcaggttacaattactgcacatggcattcctgccgttaattttcctataaaaaacgcaaaaacgtcaaaaatcttcttagagattcccccttttgccatgatcattccagataatacaaacattggaactgcaagtaatgggaaactatcaattcctccaagcatagaacgaatgacaaatgtcccacttgctgtaaatgatggatcaaatgctcctggaagtacagatacgatcccaaggacgatcgaaatcggaattgcaatgatcagacaaataaagaagagtaaaaatacgactgctgctgacatttatttttcctccttttcttcatctttgcggatcacaatcttaaattcaatgatccaacgttggacgatacgaaatgctactaaaacaaaactaaatagcggggctgcctgaatataatacattggaatctgacatgcgggacttacctgtccactttcaaatgcactctttaaataaagaactgcatatggaatcagatataaaaacaaggcaagttcgatcgtgtggttcaccactttgaacaatgctttccctcttcttggaaacattgctacaaactgttcgattttaatggaaatacatttcttagtacaataactaacactgataaagcctgaccagataaataaatatcttgtcagttcctctgaccatgaaagggacgctccaagtgcatatcttgcaaatacctgaattcccatgatcactgtcatggcgatcaataatgctaccattagaaattcttccagattctcatcaagccattttagcatgattcacctctttctactttctataacaaaagtctttattttcacaaactatggcaaaactttaacaatttgctctactaaattatactgaaaaaataggatttcagcaaatattttttatgtatttaaaaaagaggaaaagaataaccaagaatcttcccctcttctgcatttaatttttaaagattcagttcttataatccctgattttcatgaaggaactgaagcatattatttaagtcattgactgctgcctgtccaggtgcagatgcttttttcgctgctccgaatgtaagagcagatccgaatacttcaccgcaaagacggctgatcagccctgttcctgccatagacattgtgatgatcggacgatctgcatgttctgtatacatttcttctgttgcacaaagaagtgttaatacgtcacgtctgcaagttggcataactgcgatcttaggaatatcagcaccaagttcctgcattttgcaaagtcttcttacgatttcatctttttcaggtgttttgtcaaaatcatggttagatgcaacaacttttactccacattcgtgagctgctgctacgatctcttttacgatctcatcccctgtaaatgcttctacgtctacaagatcaacatatcctgttttcgcagcagcgatatttaattctttataaggttcggcttcgattgctttttctccaccttcttttgatgtacggaatgtgaaaagaattggtgtttcacctaaagcttctcttaaatcttttaatacatcttctactttatcaaattcgaaaactccttcgaaccagtcaacacgccattcaacaacgtctactgggatgctgtcaaatgttttcgcttctgcgatgatctcatcttttgtaacacccacaataggtacacagattttaggaactccgcttccgatttcaatattttttacttttactgtattcattgacaattttcctcctattgtttgaacattctcccgaagcataaacctcgggagttcctgttaccaatactaattaatttttagatgcttcttctgcattctttaataatacaccatatcttacgtttacgaaaagtgctaataagattccgattgctgtaattacgatattcatcatgattacgcttgtagatgtcatttttgcagctgctgttaagattgtgtagttacataagctagatgcgatcataactaaacttgtgattgttcctttgattttagggaacagatcatttacaacggctgttgccatctgaagtactccgcctgctgctgcatatccgatcacgaatgctccaacatagcaaatcataggtgtcttaataatgtaaactaatgctaacattacaagagagatcgctgggtagatcactaggaatcttacctgtttgaattttgtgatcaatacacttgttacgaataatgctaccattgtacctgcagaatagtatgtctgcatcacagatacgttctgagatgggatttttgcaatttcagtaccaaatgtctgagcacagtttaaccataactggaatgtagctgtacttgtgaatccgatcaggatcaatgcaatactctcaatagagaaatgtgcattctttaagttgctgatgaaagattcagattttcctgcttcagatgttgctgggaatggagcaaagattgctaagattcccatgataccgatgcatacaccagcgataactggaagcattaagtatgacatgcttgttcctgctacaacacctaagaagaaaggcattaataactgtgcaacagaaatgaagaatttgatccccattgttgcgatacctgtatatttgtaaataatttcagttacagctgggtatgttgctgtatctaagaatgagttcgcgataccaccaagaactgctgcgatataagcaattgttgtatttggtgagaatgcgatccctactaagaaaataacgtatgaagcacatccaatgatcactgataaacgacgtcctaatttgtcagataaaggtcctgcaaatggaagggagatcaaacgtcccaatcctaatgctgctgcaatggaggttactgccataacatcttttaatccccactggcttgcgagcatttcttttactacctgctgacttaagatggaacatccgattccatgaatgaaatagttcagataaagaactaaggcacttggtatgtattttttatccattttaataattcctctcgtttgctatatggttatgactgatcttagtcatatttgatatctaatacttctttcatatggtcgatcggcatatgttttcctgtccataaatggaaagcagcatctccctggaataacatcattccaagaccgttcattgtcttacatccagctttcttagcaagtcttaatgtttctgtctctcttggagcgtaaactgtatctgttacgatcaggtctggacggaagtatgtttcatcaggaacaactgtctgtccttctaatggtttcattcctacaccagttgcctgtgcgaataagtagctgtctgcgatttcttctcttaatttatctttgtcatcaagatcgtaaagatttacgatacaatctgtgttttcacggatcttctttactgtttcttcagcattagcccagaatttatctttgatattgaagattgacatttctttgacaccgtctaatgcagcctgaatctcgattgctgtcgcagctccaccagcaccagcgattgtcatttttttaccgatcacatcaatatcgttgtcttttaatgactgcatgtatccgataccgtctgtgatatgtccgatcagttttccgttgtcatttacgatcgtgttaacagctcctgccattttagctgctggagataactcgtctaagtactgtcctacaactgttttgttcggcattgatacgttagatccaaccatctttaaagcacgaagtcctttgactgcatcctctaatgtgctgttgtcaacttcgaatgctaagtatgcatagtcaagtcctaatgttgcgaatgcttcattatgcattgcaggtgagcttgaatgtctgattggataagccattaatccgattaattcagtatgtcctgtgattctctctgccataattttactccttaaataatatgcttgttattagtttcattcacccaaaagttaattttttaacaaccttatggctatattatattccatattgattgatacttccaatatatcttttagtgttttttgatagcttcaggctatcaatcgtgttataatgaaaataactattaactgctataataaggaaggtgtttaactgttaaaatag

SEQ ID NO: 723 - DNA, 1690 bp, Unknown
  gut microbiota DNA sequence
catatctggatactgcccatctggcgcaggtaagaagtgttgtacagagctttaaactgaattatatccgaaaaggaatgtcagattatgataaagtcctgactgcttttaattatctccgcagcaattgtagatatgcatacaggggatggcagtataattatgcaaatacagcctggggtgcactggtatatggagaggcacagtgttccggatatgcaagagccatgaaagcactctgtgatgcgagcggggtagactgccgttacgtccatgcaaatgccaaagccagtaacccaagccaccagtggaatcaggtaaaggttggtggtaaatggtacatactggatgctcagtcaaacggctttcttctcgggacaaatacctggataaaacaggccgggatgtcctgggatacaaaaggactaccaacctgtagtaaaacagattataagagataaagactttcttttcgtcttcggatgttatgttatttatataaaaaaatccagaatataagcccagaatcgttgaattttcagcattctgggcttattttaagtaccaaatttttctattgtcttattatgtatagctgccataggagacgtattctaagcagtaaggtttgttccgatagatgctgcaatctcttttaacttatcggcagaaaaaccagtatatttttcaatcttatcgagagattctttatctttgatcatcatttttgcaagagatagatttttcttttctacaccttgctcaatgccttgttcaacaagtgcttttcccagattacacatatcctgcacctcactttcaaattcttctgtcatggcgatgccaaaatctttctgaagacgttttttctttgtctcagaggatgtagaaagagagaagagtgtattcagcagatcaaggatctccagatcactctctttatctgcatcacctaaatttacgataacaacttccataaggtcataactgccaagagtttcataaggctttcccaatactgtatcctgtactgtatggtatctgaagattccatttctacgttttttcgccggatccgggcagatccaaatactgtagactttctgaagcttttcataatgttcaccagtaaaaatagttccatactgctcggaaatcattcttgcacaataataaaatcctcttgtaactaatggataccccggtgtgtcatttaactggatttccaaattgatgatcagctgtacgggttcttcggtgttcggaatatatgccttaaaacgaatatcataatacacagtctggtctttgatagcatttgcttcggaattaaggcagtctatttgttcgtttccatccagtaatttactgcggtcaggatggtcctgatgtactgcccgactggaaatttcgatattttctttcaggcagttatcacagataaaattgacactatattgggaaaattcttttgtacaggatttgaggatccaggcaatgactgccttataggttaatagtttcttggcacattcatcatatcttgcacgatctgcggcaaagtctatcatttgtgccagattcgtttgacgtattatggatgtcacctcctgtcacatattttgtacttatattttatcagagcagatatttatttaccagaaaaatttttcgacaatcgcaggataag

SEQ ID NO: 724 - DNA, 620 bp, Unknown
  gut microbiota DNA sequence
taaagcttccactccaccagcttcatatttgactatataattgcgagcctgttgataggacacctggtattgttctgctgtttgggcataattacgatcatgtgcgatacaatactgtactatttcaacccgttcttcaaaagtggtttttcttcctttggtcatgataatgcttcctcctgttccagaagattttaattcttcatgaccattatacttctttatccaagtttgtaacttaccttttgaacggattccatattttttgcagatatcatcttgagaaccatagcctgctaaataatctaagactgcttgctgtttcaattctttggaatattttttattccctttcaatgtaaatgcatttgctcccatagattcatagtttcgaatccattgttggacagatgcgagacttacatcaaacatatgggcaattcgttgttggctttcttttccatccagatatagatttacagcatatatcttattctcaacagatactttccttttagacataaaatatgctccctcctaagtgacaagtttttattatttcacttgtctacctagaagggagcataccattttttacagcccccttactgcatcttttt

SEQ ID NO: 725 - DNA, 260 bp, Unknown
  gut microbiota DNA sequence
tttaacatacacactgtgtagtgatttgaatagcgttccgttgtatgagtcagaaagaagataagaagaactatttataagaaaaaaggatgacaacatgagcactttttgaatgcgttttttacaaattcgtagcgccctgtggtcgattgtttgaacgtagctgcgagcattttggctcgcagcaagtgagacaatatgtaatgacccccaagtttgtaggatcgtggatttacctgtatactatgaattggaaacta

SEQ ID NO: 726 - DNA, 857 bp, Unknown
  gut microbiota DNA sequence
cgaaagtgaatcttatatacgtgctgcaatcaaaaatgatgaaagtctttatgcttggggagataactcctttggtgcaattggaattggtaaagcaccaaatattgattacagtgaaaattcgaacgattatgcagagcctgtgccagtaaaagttgtagataatgtaaaagctgtgacacatgattttagaaatcgaatgatgtatttaaaaaatgatggttccatttgggcagcgggatctggaaaatatggtgttttgagtgaactagatgaagaaaattaaacacaatataatttttacagaaacccaatccttatcacactaaaaggaaaatctccatcactaacagtaaaagatgacaataattcaggaaccactgatccagaagaaccagattctggagatattgatgatggagatcatggacatgatcagggaaacaaagacaacgcaggagacaaacagcaagatcaggttggtggacagattaaaccatctactccagcaacaaagaaaccttctactacagcagcaatcacagtttctggaacaaatatcttaaaagttcagaatatcaaaggaaagaaagtaaagattaggtggaagaaaaacaccaaggcagcaggttaccagattcaatattctatgaagaagaacttcaaatctggagtgaaaacagttaatatcaaaaaaataaaacagtatctgcaacgatcaaaaagctgaaaaagaaaaagacttgctatgtaagaatcagatgtatgaaaaagtctggaaagaaaacaatttattctaaatggagttcagtgaaaaagttaaaattaaaaaataaatagagatgaaaaagagtagg

SEQ ID NO: 727 - DNA, 2660 bp, Unknown
  gut microbiota DNA sequence
ttacacaaaacttgaaacagtctcccaagggaaacaatctattttttatatatttccacaaattttatttattcataagtttttatttattagggatcaatacaatatcttccccagcttttcttctctgatataactcagcagttgctgtaagtaatacatcagaagaagagtttaagcaagtttcaacagaatcctgtactactccgatgatgaatccaacaccaacaacctgcatggcaacatcatttgagataccaaataaagaacatgcaagagggatcaacagcaaggatccaccagcaacaccagaagcaccacatgcagaaacagcagctaagacacttaagatgattgctgtaggaatatcaacagagatacccattgtatgagcagctgcaagagacataactgtgatcgtgatcgcagcaccatccatgttgatcgtagaaccaagagggatagatacagaatagttatcttcatttaatcccagtttttcgcaaagagccatgttcataggaatgtttgcagcagaacttcttgtaaagaatgctgttaaaccactttcttttaagcattttaagatcagtggatatgggtttctgcgaagcatactaaatacgatgattgggtttgttacaaatacagtaaataacatacatccaactaatagggcaagaagtttaccataatcagtaaagatgcttaatccatttgtagatacagtgttatatacaagtccaagaataccaaatggagcacagttgataatccagtgtacagcttttgtaactgcagcagagatatcatgaagagcttttttagttccaggagttgcagcttttaatgcaagtccaaaaacaacagcccatgcaaggataccgatgtaatttgcctttacaagggaatcaacagggtttgatacgatattcattaataagttctttaatacttctaacacacccgttggaggagcggcttcagatgtagcagcttttccaagacgtaatgtgattgggaagagaaaacttccacatactgcgacaacagcaccaataaaagttgttagcatataaaggatgataacaatacgcatattttttgcaccgttgctcttagaatttgctaaagaagcaatgacaagtacaaatacaaggattggggctacagcacgaagagcaccaacaaataaatctccaagtagagcaagccctgttgcttttggagcagctacaccaagaatagcaccgatgatcagaccgattaagattcttacgatcagacttaagctattccacttttgtaataagtttttcattttaaaaattccttctttcattatttttttatttttaagtgatattttgatacttacatcatattttcttaaaaataaagaatcaatctcatctattatatttacttttgttccttaagtcaatacaaaatgtcttttttacagaaatgaatgtctttctagtgcggacacgcaaaaatcttttcacaatgaaatattgacactttacgcatttgattttacaataaaatataaaagtatagatcataagagaagacgtacaaagtctatacggaaagcggaaaaggagaaaataatgaaacaggtaatattaacaggagacagaccaacgggacgactgcatgttggacattatgtaggatctttaaaagaacgagtgagactgcagaattctggtaaattcgacgaaatttatatcatgatcgctgatgcccaggcattaacagataatgcagaacatccagagaaagtaagacagaacattatgcaggtagcacttgattatcttgcatgtgggttagatccagagaaagtcaatatctttattcagtctatggtaccagaacttacagaactgtctttctactatatgaacttagttacagttgcaagagtgcagcgtaacccaacagtaaaagcagagatcaaacagaagaattttgaagcaagcattccagttggatttttcacatatccgatcagtcaggcagcagatatcactgcatttagagcaacggtcgtaccagcaggagaagatcagatgccaatggtagagcagtgcaaagagatcgtacacaagtttaactctgtatatggagagacattaacagacccacagatcgtactgccagacaatcaggcatgtttaagacttccaggaatcgacggaaaagcgaagatgagtaaatctcttggaaactgtatttacttatctgatgaaccacaggatatcaagaagaaagtaatgtccatgtttacagatccaaatcatttaagggttgaagatccaggacaggtagaaggtaatccagtatttatctacttagatgcgttctgtaaaccagaatactttgaagaattctggccagaatacaataacttagatgaattaaaagcccattatcagcgtggaggacttggagatgtcaaagtgaagaagttcttaaacaaagtgcttcaggcagaattagaaccaatccgcgagagaagaaagatgtgggaagcaaaacttccagaagttgcagaaattcttcagaagggaacaaaagctgcaagggcaaaagcacaggaaacaatgaaagatgtgcgtcatgcgatgagaatcgattattttaatgaa

SEQ ID NO: 728 - DNA, 2541 bp, Unknown
  gut microbiota DNA sequence
ggatatggtagcgactacagaagaattgcgtgaaactaatgacgctattgaaacgatgcgtgataactcacatacaagaatacttagcagagaagaatttgaagcattgtttgaggatgcttttgagcttcagcttgaagaaacaacacttgttcctgtaaatctacaaagttggatggatttgacaagtacaccagaggatattcaaaaagatattattgataaaatggaatacgatttgaatggtggagataaaacaggttttaatccctatatcaaggagggacaaatatgctttgaccataggtggttattgctgattggaaaaaaggaaaactaatccccatttatcaagaaaaagaaactttcagtttgtatatatcttttaaaaggtatatgattaagaaaaacggcaggaggtatctgaatgaaatcacataaatattggtctatcggtgcactgattacaatgcttggaactttttatacaggttataagggatcaaaagaaggccataagtactttgcagcaagttctttgctttgcatgattatggctatttatacaggacacaagatgatttctggtaaaagtaggaagaaaaaagaagcttcagtagagagtgttgaagattaaaaaacaaaatattttaataaataacgccggtgcgggatttttgatatccagtactggcgttatttattctacaggggcttgggggtgtagccaccaaatatattattaattttcttcttcggtaagtttgttaaggatccacactctattgataacaatatcctcatcatcgcggagatctttgaaatcagtgcagtgtgaagaagcaaattcatacatattgtcaatgtcaactgagtaatttgtatttctgcttttaatgtgctttacgattgccattcatatcacctgccagttttagtacctcttttctcagtaggaataagtccgtgatgcactgatggatttcattttctatagcacgtgactgactgccaccactgttaaaatgcttggcgatctgattgagattcgatccgatctttccatattcactgaccagttttctgaggtcgttcatgtctgcaacaacttcaatctggtgattgatttgctttgaatgtttaaagatcacgtggaagtacctggacttgataaagaaaaatccaaacttgatgatttaatcaaccagatgagatattttaaagattttatcaaaaaactcaatcgcatggatgtgacatccaatcaatttcagcatcagattaagaatggtgagatgctccttgcaaacaaaatatacctgataaatcagatgtattaatgtcccatggacgctttttgtatgttataataaatacaatcactaagtatcggataaataaagataaaatgaaggaatagaaagtcatgaagatagcgaaaaaagtattaaagacaataggagttttattaggctttattgtggtcattgtgctaggatatatcatttatctctatgcaagttaccatagaattgaagataacaaatccctttccgtagaatctcacacagaaacaaaacaaacactaacaacaggaaaacaatattcagcaattacatacaatattggattcggagcctatacgccagatttcagcttttttatggatggaggaaaatcatcttgggcaaagagcaagaaaagtgttcttaaaacagttaaaaatgcaggaaatctaacaaaatcgtatgatccggattttgccttaatagaggaaatagatcttaattccaccagaagttatcatgtaaatgaatattccatactaaagaaatgcttgaagaattacgatacagtatttgcacaaaattatgattctgcttttctattctatccattcacacagccacatggaagcagtaaagcaggattagctttattttccagatacccgatcaaagattcgctaagaagaagtcttccgatttcaacatcatacaataaattttttgatttagatcgttgctatagtgtttcaagaattccagtggataatgggaaatacctcgtgatctttcagcttcatatgtcagcctacggaaacagtgataagatcagaaaaggacagatccgtatgctttcagcggatatgaaaaaagaatacgaagcaggaaattatgtattatgtggtggggattttaaccatgacctcaaggctgcagaagatgacgattctaccgatagagaatcctgggcatatccattcccaagaaatatgcttccagaacatttttctttctgtatggatcaactgccaaagaaagaaaatctgtggaatagttcacgaaatgcagatatgaaatacataccaggaaagacttacactgttacattggatggatttattatctcagataatgtaaaatgtgatatgtataagaatattaatacgggatattcatattcagatcatgacccggtatatgtgaagtttgaattgaataaggagcttccggtatactttaaatagagcaagagatt

SEQ ID NO: 729 - DNA, 169 bp, Unknown
  gut microbiota DNA sequence
aatggatatagatattattcgcatgagcaattaaatcaagttatgaatgtaaaacctaatttagatagaattgtaataggttattgcagagtttcaagtaataaacaaaaagatgatctggaacgacaaatagagaatatgaaattgtatcttactgcacagggcaaac

SEQ ID NO: 730 - DNA, 770 bp, Unknown
  gut microbiota DNA sequence
ggaatgttattattagatgtaaagaataaatgctggtcaaaacagatgatggaaatctgtggagtgagtgaagaacagcttccgaaactgtttgaaagttatgaagttgtcggaacattaaaagaagatattgcagaagaacttggtttatccaaagaagtcaagatcatcgcgggagctggagacaatgcggcagcagcggtaggaactggaactgttggagatggaatgtgtaacatttcccttggaacatctggaacgatcttcatttccagtaagacatttggtgtagattccaacaatgccttacattcttttgaccacgcagatggatactatcacctcatgggatgcatgttaagtgcagcatcctgcaataaatggtggatggacgagatcttaaagacaaaagaatacagcaaagaacaagaaggaatcaccaaacttggagaaaatcatgtattctatcttccatacctaatgggagagagatctccacacaatgatccaaaagccagagcaacatttatcggaatgtccatggatacaacgagagaagaaatgacacaggccgtgttagaaggagttgcatttggacttcgtgattctctggaagtcgcaagaagtcttggaatcaagattgaacgcacaaagatctgcgggggtggagcaaagagtccattatggaaaaagatcattgcaaatgtgatgaatctgaaagtcgacgtgatcgaaagcgaagaaggcccaggatatggaggagcgatgct

SEQ ID NO: 731 - DNA, 40031 bp, Unknown
  gut microbiota DNA sequence
tttgttgtttttgatactctcatcattatattatgatttttttaggaaaattgacatttatgttttagtttttatgtttcacaagaaaaatctagcctactgtactgctttaaaagcttcctctaaatcttcgatgatatcatcgatattttctgtaccaattgacagacgaattgtgttaggtttgattcctgatcctaataattcctcttcagtcatctgagaatgtgttgtagatgctggatggatgactaaggatttcacgtctgctacgtttgcaagcagtgagaataactctaagtgatcgataaagtcttttgctttctgtgcatcacctttgatctcgaatgtgaagatagatccaccaccgttagggaagtattttttgtataattcctgctgctcaggatcatcagatactgatggatggtttactttttctactgctggatggtttttcaggtattctacaacttttaatgcattctgtacatgacgctctactcttaaggataatgtttctaatccctgtaagaagatgaatgcatggactggagataatgttgctcctgtgtcacgaagtaataatgctctgatctttgtgacaaatgcagctgctccaacgtcttttgtgaagcttactccatggtagcttgggtttggttctactaatgatgggaattttcctgatgcttcccagtcgaatttaccaccgtcaatgatcacaccaccgattgttgttccgtgaccaccgatgaattttgttgctgaatgtactacgatgtctgctccgtattcgattggtcttacaaggtatggtgttgcaaatgtattatctacgatcagtggaatgttgtgttcatgagcgatcgctgctgctttctcaatgtctacaacatctgagtttggatttcctaatgtttcgatgaataataattttgtgttatcttgaattgctgctcttacttcatcttcattgaaaatgtctacgaatgttgtttcgattccgtaatctggtaatgtatgctctaagaagttgtatgttccaccgtaaatgtttttcgctgcaactacgtgatctcctgcttttgtaatattttcaatcgcatatgtgatcgctgctgctccagatgctactgctaatgctgcaactccaccttctagtgctgcgattctctgttcaaaaacatcttctgttgggtttgttaatcttccgtagatgttacctgcatctgcaagtccgaaacgagctgctgcatgatcgcaatttctaaatacataagatgatgtctggtaaataggtactgctcttgcatctgtcactggatctggctgttcctgtcctacgtgtaactgtaatgtttcaaacttataatttctttctttactcataatttctatctcctttgttgacttttattttgaattttgtatgttgtctttcttgattacaaacttatcttaccattagatttcctacttgtccaatatgaaaagtcaacatctagttataggatatccctataaccagagtcgtcacccatagctttatactttttgatctcctctaagtatttctctcctaatgggctgattgcaactccttttcgcttgatatagccaatcgtcatgagctcatccgattttagtttcacagcacagtaatcatcaccatttaagctttcacagataattcctgaacataatgtatatccatttaacccaaccatgagatttaacatagtagctctgtcatttgctttgatcagacgtttatattcataggtacttaacacttcttctgcaaaataaaaggagttatattccccctgttcaaatgacaggcatggatattcttccaactcttcgatcgtaatctcttctttatctgccagaggatgccctttccacatataaacgtaaattccacattccaataatggatggaattcaagccctgattcctgcagcatcttgcttaataccttcttattaaattcatttaaataaaggatcccgatctcactatgaaaatctttgacatctttgatcacttcgtatgtctttgtctctctgactgcaaattcgtattcatccataccaaactgtttgaccatctccacaaaagcattcactgcaaatgtataatgctgcatggaaactccgaatttcttcttgatatttttcttctcaatatagcgagattccataagctgatactgttcaacgacctgtcttgcataacttaagaattccatcccttcttgtgtgactgatactcctcgattgcttctcttaaagagtcttgttccaatctctttttctaactctttgactgcaagagatagacttggctgtgagataaacaggctttttgccgcctcattcatagatcctgtatctgcgatcgctataatatatcttaattgtgttaatgtcatggttcttcccttccttatcttttctgtccgtgatttattatacttgatttttcgccgcttgtcttataatttttgaaagaaatactcttgacatgttggtttgttttgtcttataataatggctgtttcaatagttagaattctaactattagtttcctaatcataaaaggagcatcatctatgtatgaatcatcttatcattatcttctgatgtccaatcatttaagccttcagaagaaaatcatggctgtcttaaatccacttggtctctcaaccggccagccaaaggtcttagaccatcttcgatatcataatggtgccagtcaaaaagacattgcccatgcttgtcatatcgaacctgcttctttgacttctattttaaatcgaatggaaaaacagcatatgatcgagcgtaaaaatttgaacggaaatcgccgatcctttcatattttcttgacagattatggaatggaactgtctgaatcgattgaaaaagctttcttatctcttgaacaagaagttttttctgggatttctaatgcagaaaaagaacaatttctaaagatctttgaaaaactatataaaaatactacaaaagaggagtaaatcacatcatggaaaaactaaaacgttatatcatcttttttattgggctttatattaactctctcggagttgccctgatcacaaaagcaagtcttggtacatcaccaatttcttccattccttatgtactgagccttaatttcccatttacacttggaaatttcaccattttcttcagcctgttactgatctttttacagctgttgatcttacgaaagaattttaaactggaacacgtgttacagattccaatctctgtcttattcggatattttattgactggtctatgatccttcttggatttgtaaatccctccttttatttgatgaagatcatttatctgctgatcggatgtctgatccttggatttggtgtgtatacagaagtccttgccaatgttgccatgcttcctggggaatcttttgtacgtgccattgtaatgacatggcatacagaatttggtgtcacaaaaatctgttttgacgtatctatgactgtgattgccggagttctttcctttgtattcgcaggtaagttagacggtgtacgtgaaggtacagttattgccgctttacttgttggttttattgcacgtttatttggacgtttcttatcttttgtggagccaatgctgtttccagattcagacactaacacagattcagacactgacacagattcaacagacactcctattgtcattacaatcgctcgtgaatatggaagcggtggacatgaccttggagaagcacttgcaaagcgccttggatttgatttttatgacaatgagataattcagatgactgcaggttctactggttatgatcctgaattcatcaagaataatgatgaacagatgcgtagttccctgctttatgaccttatcaatcaggtatattctcacgcaccacaaaacccagctccaaaagataatatctttgcggcagaatctaaagtaatcaatgagcttgcttcaaaaggaaattgtgttgtgatcggtcgttgtgcggattatatcttaagaaaccgccctcattgcatgcgaatcttcttacatgcacctgcagagtatcgtgtgaaacgaattatgagaacggaaaacttatctcatgatgcggcactgacgaaagcaatccagatgaaccgcaagcgttctgataactatcattattatacgcatcaaccatggggattatccagaaactaccatctgacactggacacttcacttggagatgattttgtacttgatagcatttgtgaagggttgaaacatattcagtaatttattgtgattgtaaaaaggatagatgccttattaactttggtatctatccttttctactttctaatatttttggaaactgaaatataaaacttgttccttctccttttttgctttccacatgtattttcccaccatgaactgccacgataaagtgaaccatcgaaagaccaagtccagttcctccattctctctggaacggcttttatctacccggtaaaaacgatcccagatcttaggaatatcttcctgagcgatccctatcccatcatcctttacttctcctatgatcatatctccttgttctttccatagaatatcaatatgaccatgttcctttccatagctgatcgcattctgaacaagattcatcatcattcgcaataataatgtatgatttcccatcatctttacatctcgatcactgaaaatagatatctgaatcttctttttctctgcctgctcgcgcaattcttctacgataacttctgtcaatagtatgagatcaacttcttccatatcataagattcgctcatctcacctcttgcgatcattaacatctcattgatcaatttcgacatgcgtcttgcctgtcttagaatgatcatgatctcttctttttcctcttcctctaatactggatcttcgatcaaatattcgcattgagaaatgatcacggtcactggagttcgaagttcatgggatacatctgctgtaaactgctgttctttttcaaaggattcttccagtctttcgaacatttgattaaatttatgagataattcatacaattcatctcttactttcggcaatggaagcctttttgtaagatcctttccataactgatattctctacctgatcacagatcagatccacctgctttaatgcacgtttcagcataaaatatcctgtcattgctatcaataaaatgaacacgggatataagacgatcatcattttctgagatgttgtcataaatacttcgatcgcatgaatggatgtaatccctctgatccatatagccttattctttccataggtatgcacactgtcatataccatccatttgctgctgccggatgtaatgaccctcggtgtatgagactttaagatcgtctgtttcggaaatttctctggcattgtgccatataataatttcccgttgtcatcatagacacaaaacatgactccatcctgataaaactgagtatcttctgataaataataggttccatcctgaaattgaaagttcgcagaaaatccagtcactgccgcactgacttcttcttctgtcgctgaaattccgactttgtcgacaaagtaaaacataaagacaagaaccattcctaaaataagtgcaatgatccctgtataccataatgtgacctttttcttgatcgtcatctgcttcatcattcttccctcatcacatagcctgttccgcgtaccgtatggatcagttttttctcatatcctgcatcaattttctttcggagatatcttatatatacatcaataacattcgatcctccctcatagtcataattccatgcattttgttcaatctgctgcctcgtcatcacgatattctgattccgcatcagacattctaacaccataaattcttttgacgacaaactgatctcttttccagctcttgtcacaattcttgtatcccggtccaaagtaagatctgcaatctttaactgattcgttacaaattggggttttctccgcatcatcacgcggattcttgcgagtaactcttcaaacgcgaatggcttgatcagataatcatcggcccctaggtcaagcccctttacccggtcctcaataccatcccttgcagtcagtaagagaattggtgtatcatttcccatctgcctgacttcctttaaaaccgcaaaaccatccttcccaggaagcatgatgtcgagaagaactccatcatacgatgtcatctccatataatctagcgcttcttctccgtctccacaggcatccacactataatgctctcttaccaaacgtttctttataatatttcttaaatctttttcatcttcaacaactaatattctcataatgcctttattataatacaatctgttttttgaatccagcacctatttttaatgttattttaatgtttattggttatgctatttataacaaaaggaaatctatcccaaccaaagaaaggagtttacaatgaaaaaaatattatatttattcttcacatgttctatcatttttgcttttgcaggatgcagtccttcaaagaaagattctgccgaggctaccacaacacaggaaattgcaacaacaacttccactacagaaaataccactgattcttctacctctgattcagatgccaagaatgattcttatgatttttcagcttataaaaaaagaatcaaaaaactcactaaaaaagtaaataatgctgcttcttcttccaatgcatctgtcaacgaaaaacgtttttacactttgaaaaaggaacttgatgtggttgatgatgaacttgatcatctggatgatgaatttgagcatgcttatgaaaacggtaaactaagcttcaaagtttataaatccagagaaaagacaatagaaaaattggaagatcagcttgatcttttagaagatgccttggaaaataaatttggaattgatgattagaaaaaaagatgccattgtagttttggcatctttctttttccatctcagtaaaatttattcccaatcattttttacttcttctaatttgcttcttaacgtcttttcaagcccaacaaatgctggaatgaaactatcacggatcaataatatcatctcatcaacttcttgctcattatatatatgaacagatgtatttcttttttttaacattaatagccataccgctgcatcatctacaaaaccaagtttatatcctaactgcaaaatctctcttggtgacccagttgccgctccgtctgctccgtgcatttttaatatctcttgtaatgccttccatgcaagctcaaatgtcaaattaaattgtccgattacgcctgttctgtaaatatcattattatctgccatttcaaaatctgcactttttaacacttcaagacaattcgaaaagttctcaagctttttcatatattatcacaccatccttttctatttcttgttttaattcctctgaaattggcttatctgcttctaccacatcaaaacttaaaagggaatgtactttttctttaatatcccaataaaaagagtcaaaatctccgccatataccgcaatatcaatatcacttctctctgtattgtcacctcttgctctcgatccaaataaaattactttattgattgaatatttttttgcaaatgcagaaatgtcctttaaaactctttctggaatattgtatttcataccctgctgcctcctgattttctagagtaaatgtaatcctatgtcttgaaaatattataacatcttttatatctccagtaaatcttccaatttatatcctaataatgcaagccacttacatctcttttttcttaatgatcaaaaaaaagatgccattgtagttttggcatctttctttttccatgtatctctttgttattattgttttcttacgttaaaatgtatgcagattattccactttaatccatctctgtcttttgcccatttaatgtatgtcttctttgctttctttggcacatagactttattaaagattggaagagctgtgaattcatttcctttgaatttgctcacgatcactggtggttttgttccgtggaaatatacggtagcactatctccaaagaacatccaatcttctacgactttcttcacagattttggaatatgtacctgattcttcgtgccaatcttgcccatcacagaaactgtatcatcaatcacttttactttggatggaattgtgatcttctttgtcttaacaagcactgctgttaatgttccattggatttacgatagatgcagttatttgccatcttgtaagtcttatttttactgcttaagcttacttttgtaatcttcttgctttctaatgctttggcaccgatcttctttactgactttggaattacaatacttgttgcctgtgatccatttagggcatttgccttgatttcttttacagatgatggaattgtaagctttttcatcttgtttggaacaagtactaatgtttttccggatcttgttgtcaacattcctttttttaccgcaaatgttttatttgcttttgggcaactgaatgtttttacctgattgctctttacaaatgctgtgctgtctatttcgttcatattttttgaaaatgttactttagataatgcactgcattttgcgaaagtatatgctggtacacttgctgtctgttctggaatcacgacactttttagttttttcataccactaaatgttgctatctccaactgatttactgtacttggaattgctactgtttcaatggtctgtttattcttatcatcatttgacagatctccataacagttatgccatggttcaatggtatctccaaacagattttgataagcatcctcatcctcacctttgttatataattcttttccaaatcctactctggtaagttttgcctgattaatctcttttggcaatgttaattttgtgacctttttgcttaatttaatctgatagatccagctttctttgccgtcttctgtcaaatatgcagaatacttgataccgttttcttctttcgtgactgatttacttgtgttccatttggttgctgctttcacattgttcgtgagtgtgattgcactgatcgttgctgttagcagagtgataaaacatagtaatctttttttcatttgattgtccctccttgtttataaaatatatttattgttttcttatattatacaattatttaatataattatgtactaatatttatcatcccataatgtttaataacattttcatctgtaatttttacttgtgtcgcatattttgaaatattagctattctatagtatttatttgcactatcatccacatagtagcttccatcagtatctcctgctgcatgaaaatcatggcaaaccgcaacatcactgcgttttccttggtatctatataaattatttcgttctattctatataaattatttcgttctattctatatgccattgtaaatctgcgcttctgaacattagaatcttatagtaacaaccatccccaaatggtataattaagttgtcaaaatcaactcaccgaaaggagctgattgttatctaccgtcaaaaaattttgaaagacattcattttgctcatctctaataatttaaatacttattttcattatatctttaatcagttatttgtcaataactattttgatttgaaattctttttatttttaaatatttttattgtaaatatttaaaataatattatactttaattgaaagacaaaataaaatatataatatctttttctaatatcttaccaatactgtcttaaaagggtagatgccaaaacgacatctaccctttttactttatatctctaacaaatcttccgatttacatcctaataatgcaagccaattacatctttttttccatgtatctctttgctattattgttttcttacgtttgttaaaatgtatgcagatcatgccatgtcaaaccatctctgtcttttgcccatttgatataggtattctttgctttctttggcacatagactttattaaagattggcagtgctgtaaattcattgccattatattcactaacgatcactggcggtttcattccgtgaaagtacaccgttgcgtctccataaaacatccagcgttccactaccttatttacggattttggaatatgtacctgattcttcgtgccaatctttcccatcacagaaactgtatcatcaatcacttttactttggatggaatgctaaccttctttgtttttgcaattactccaactaataacccatcggacttccgatagatgcagttatttgccatcttgtaaatcttatttttgctgcttaagcttacttttgtaacctttttgctagataatgcttttgcttcaatcttctttacagactttggaattacaatgcttgttgcctgtgaaccattaaatgtctttgctttaattgttttcacactcgtagggattgtgatttttttcatcttgtttggtacaagcactaatgtttttcctgattttgtcatcaacattccttttttcactgcaaatgttttattggattttgggcaactgaatgttttcacttgattactgtgtaaaaatgcactgcttgcaattgactgcatgttctttgaaaatgtaaccttactaagtaccgtacattttgcaaatgcataagatggtacctttgtaacctgctctggcatcttaagttccctaagctttgtcattccggtaaatgaagctgcttctatctgattcacggtattgggaaatacaatttcttgaatcgttcttttattcttgtcattatatgacaatgttccgtagcatccatgccatggttcgatcgtatctccaaaaatatttatatatgaatcatgtccttccccatataattcttctccaaatcctactctggtaagttttgcctgattaatctcttttggcaatgttaattttgtgatctttttgcttaatttaatctgatagatccagctttctttaccatcttctgtcaaatatgcagaatacttgataccgttttcttctttcgtgactgatttacttgtgttccatttggttgctgctttcacattgttcgtgaatgtgattgcactgatcgttactgtcagtaacatggtaaagcataataatctttttttcatttgcattaccctcctttttcctattgcacatcttcttttcatactaccctgcccctggtcatcacttatttcataaaatcttctgattctattgctattatatcatggtataattatatctatcaactaataaaatcactattttccatatgaaataattaatatcaacataaccacatttttcaacaaatttttctacaactttccaaaagagatacatgattgttccaagaaatgttgctaatattatccatgcaaaactctgtattactatcctatttaaaatcaaaaccatctaaaatgcctttcaattcttctgtatcatctttcttaatatttccactgatcgcacttatcaattctttcgctgaaccatcaaaccattcttctaatatttctcctgctttttcctttttataactttctttgtcgatgattacattaatatatgctcttctttttcttacttctactttgagatatcctttttcttctaaacgaaagagatatgttcggataccaatgtcattaagttaagatgctataataggaatcgctatatcagaaatgatatgaggttccttttttgcacctttttacaaaaaatgcttgccaccaattcaaaaatgtgcggccgctttcgctattgaatgaaaataagattgcgaaagcggcccttgtaattaagtaagaaattaattgcaaggaggtaacaaatgaattcacaacaaattaaagaaattttattatctgaaattcacgaggtgtctatcaactatgaaaaatactgcaataatcccaaacgtgatttttctagaaaatgcaaactgccctttgaactaatgctgaaaacatcataggaatgggaagcaaaagtattacaaatgaattgattgacatctttctttttccatgtacctttgttattattggctatttacatctgatcgtgtattctccattcatcttcgcacctgattttgcagttttgacgtaataggtacctttctttacacgatatgtcttggattgctctcctttgaatgaaagttttttcagcactttttttcttccttttttgtaaatgcttacttctaatttaccagaattattatttgtactgatttttatgctctgcttctttgttgcttttactttataccagcgggctgctttctctgatgttgtataaatattccgtactgtttttccttttttaattgtttgtgcttttgctttctttgtctgatatttgttgctgactggctgattctgaagtgcaatctgataaatctgacctgttgcatcattggatactaaacgatattctcctttttttagtcctgtatcaaaggttacccttttatgatcatttgcaaccgctatcatcctatttgtaattgttttccatacacctttttcctttttttgaaggtagaatgtaacatttttattactgtaattagatggtttgagataaatgctttggctgcttctcttatccgttttgaattcttgataaatatttttatcctgccctgactgtgtatataatatatttgtctgaagtggtgtcacattatctttttttacacaaattgttgctacaaattcatcttttatctgatctgccagttttagataatatacttctcccttctttacatttggtacaaatacttgttgatcttctgtatcaagaattgtcgctactgcctttttatccttatcatatacagatacatttgcaccaatttctaaaataccatctgcctgtggataaactggaatccatttactttgtgattttgttgaaaatttgaacaaatcacttgctgatgcatccattttcatgatgctgacatgttcttgtgccttaacttcttctgcatcctgataggttgctgcagatacattcactaagcctccgaatgaactaatcaaaagactcgttgcaagtgcatagctgtaaaatcttttttgtttcataatgaccaacctccttattggtttagttatagttaattgttgcaaaatgtgcaatcacattagcatctgataaatgtacctgtgttccatatttggaaattcgttttactttgaacgcaggatttgatggataatatttatctggatcatttgctgcatggaaatcatgacatactgcaacatcagatctttttccctgataacgatataatgtatttctctctgcacgatatgccatatcaaatctttctggtacaaacttagaattgtctgcctcatttttcttatactgaccttttttttcgttaattgcatgcgttatactgtaccatgttccattgtaataacgataggttgaatgtgcaaaagtatctgttgaagtatgcattgccactccaaatacaaacgcttttttatttgcattgctataatttttgaaaaagctcttcttttgtagattcgccatcattgaacggattcttgaataacttgtatctgttaatccgggaatatctgctttcgatacagatgtatatgtttttccttttccgtattcgtttcctattttgatcataaaacgatagcttgcaagataatttacttcctcatttcctgaatgtcttctctcatataacccatgaaaatctggattttctgtcattcctggaacacctgaatcatctttatctggatacactgctccatctttcattgctggtatatttacattattctctgttaaatattcctgatgtccttttgctgaccatgttccagaaactttattctcatcagaggaattattataagttttaattgtttttgtattatcctttagttcaatatcctgtccctgctcatattgttcttctgcttttgtgtattgcttctctgcatattcatagtcgatcagtccatttccataggattctttgtctcctacatttcttgcactttcttctaacagatttttgataaaatcttttgatttacttgtatctttctgccacagaagacttgctgcaccaacaacatgaggaactgccatacttgttccagatgtaaccattgtttcaccaaatgcacctgttgctcttactgcttctcctggtgctactacatcaacttcttttcctgtagaactgaaatcgcttacttctgctttagaatctacggaaccgactgctacaacattttcaaatgctgctggatattcaacattatctgttccattctctccttgatttcctgctgctgcgattactaagattccttttgcattggcttcatcaattgcctgttttaaggcttctgaatattgatttgttccaaaactgatgctgataatatttactttcttatcaatggcccaataaattccttctacaactctgctgattggtgcctgtttattttcatccagaatccttgctgaatataattcaacatttttattgattccttttacttttccattattactgacaattaagcttgcaatggatgttccatgattggaactgtcttcaaacattggagaaaattcattatcatcttctattaaattgactctttcttttacatttaatccttcttgataatcaattcctgaatccaataatgctacttttaccttttcatctgttgccgtatcctttgctttatctacatgaatacttttcagattccattgactgtctgttccctgatcttcttttgctgctgttgtactttctgtttccgatgcattgaccattgtgttcttttctacagatacaactttctgatctttgtttacgatatcagcttcttttgctgtcatttttgatactaatacattctcatcttttagaaaatctgtattttgttcttgagtatctatcattgtattgtatttgctttctactgttttcatagattttttatcttttgttacaatgatatattcgctttcctgacttgccgaaacatctgctggctgatatccagacattgtcatccctgccaccatcattgctactaatgctgtggctgtgtattttctaaactttctcatgtgtttcctcctatactgtagtaaaatcttgattttctgatgtattttgctataatataagaatccatgtgatacgtgtatctgtatattatacagattgttgaagattcccgtcttttgtattacatggattttttaattgttcatatgacatcacctccttctacttattttatacattacttaatatagctccccttagcattaatcgttgaatttgtcatattttgtacaaaaacactatatgtatctgtgtcttttactggtatttctttttccaaccctgtagtaacttcataatacttcttaacttttccacctttgattactccaattcgaacttttttatgtggaaaaatttttaaattaatatagattatactacctgctttttttgtaaaacctttcgatcttttaagtatttgaggtttcacagtccaatccacatttacttttgttgaaaaatttaaaaattcttcttcttcagtttcttctagaaatccatcttccaacacctggtttgaagttatcatttcctgatcttctgatgcatttacatttacaaaaacccccattaaactcaccattatacatatgctaattattactttcttcaaatttcttatcctcctctttcgttatatatggattaactgaacaataacctgaaatatccacatccttttctccataattttcaataaaaattacgtaatctccacttttgtttattttaaaaccatgccataaatttcttccttcttcaatatatctttcctttccatttggttcaataattcctattgctattttcttactaacatgatcctcttctaaccctgtgctaactgaaatttcgatttctttccctttctttttatctatatatttctttttcgtttcaattctttcttttgccttaagttttaaatcaagaattcccgcatcattaacatctggaattatagctccttgttttatcacttctattccttctcttttttgactccgtattttctcttttctgtctattttataatctataactttctctgtttctattactgattcctcatccattgtctgatctgcaacataaacatatccttttgcaaatccaatcgtagatgcagccacagttatcgaacttatgccaaatatgatcaatatcaaactaactgctgttatcctttttaatggcttttgatttaaataagactgcattcttttcattcgaagaaccaaaagttcactattttcgcataatcccatgcaatatgtattacattccttttcttccgttgctatatctatgatcacgttgaaataagtcttcatgctttctatataatagctagctgttctatcacaatatgcttctccccattggtctaactgtcttatcaaatctttcattcctggatgaaaccaataagtaatatggaccatcataaagattgctttccataacagatcatgatgtttatgatgaatcaattcatggtgcaaaataatatctatttcttcttcactatattcaatttcaggtaaaacgattcttcgatgaaaaatcccatatgccattggaatttttatttctttgtgttttacaatatcgatattatttttttgtcctaattcacaacaaatctgctgttttttcttgatgatctcaggctgacattttcttcctttctgtaacattttatgcatctgatgcatctttttcatatatatgaaagcccttatcacacttccaataaaccacacgattcctaatactgttaacagaattctaattttattcgcataccaaaaatcaaaaccatacaatcctttcttctttattccaaaaagtactataatccccactggacacagaaatgctaatagtacgatcttccatatccaataattaatctccacatatcccttgctttctgcaagtcttccaagtaacttccaaataatatatatgatcgttcctaatataaaattaagcagtactgctgaaaacagcatcagcatatttttatataaaatccatatcatctaatacaccttttagcctttctttttcgctttttggaatcttttcacttaatgcagtaaataattcttttgctgatccatcaaaccaattgtccagtatatcttctgctttttcttttcgatattctttttccgaaataatcggataaacataggcatttcttccccttttatctactttcaaatattctttatcttctaaacgaaatagataagttcgtatacttgttctcttgtattccttgccataccgttcttttaactcttttccaatttgtaaaaatggaatctcttctccgtaatcccaaatacatttcatgatcatttcttctaaatttgttaatttttccatattctccacctctttaaataacttttttagttatttttatattaacatattttaatcatccattcaacttattttttagtcgttcgtataactttattgatttgctaattatatcaataaaaaagatagatgccaaaatgacatctaccctttttactttatatctctaacaagtcttccgatttacatcctaaaactttcccaatcttcaatacatcaatcgctcttgtgtgattaatatttcgttttttttgctcaaataattgaatctgtctcagtgcaacaccggacaaatctgcaagttctctttgtgacaatcctgcaattttacgtaaacgttttaaatttgtttctgtataatattgatcccatttttcattgattgcttctacgaatttcataatatccatttcatgatatacggaatacatttttagaagatcttctatcgttactactttgtatatcttcataaacggtcttgctgtataccattgatagtacgccaatgcccagccagcccaatattctggagatttgtccaaatacatttcatctggaatttcttccattataagtcctgctgatcttattacttcttttactatttcacagccattttttcctgctatatatgttggatttccttcttgaaattgtctggatacatcggatactaaaaacattttataaaactcgtctgggtcaaattcatattcatttactgcatagtctaacatatctcctagaattctttgtgctgttagcaaatagtcctcagaataagcgtgcatctccatttttatttcctcttatttttattatatcgcaagtgcgatacttcctcaacaaaaattaatattttcactcctccaatcccaaaaactgcaataaaatctccatcttcaatcgatccacatgatcctcccaatcaatcttcaccagatcattcactttatcaattctctttcttatcgtattaatatgcacatacatcttctccgcggtcacgctgtagttcatattattttccagataaatctttaatgtctttaacaactcaatattcttctcttcttccatcatctcccgatatttccttaacatttcttttaactcattctcaggaatctcaatccatgttaatggtcctaacatttcgtattcccagatatccttttcagggaagataatgcttcccatctttaatactttctggcatttcttgacacattctctgacttctaacagtgtcttttcttcctgacagattccaaattccagtttcatatcggcaaattttaatccgatgtatctctggaattcttttaatagttccgttgttgtgtctttcgtccagagtgtgctgttgtggatcttttctgcttctaataagatcaagccatcattctcatccagaaaggcaatctttccgatcttccctaacttgctttgctgaaaggcttccaaaaatgtgtttctttcatttcgtgcgttgtatccttcattgcattggtggaatactatgtattgataagctgtatttacggaaattccttggatatttgcctgataaaagagtttcttggcatctttttctgtgtaatcgagggctaaatgaatgaagttctcaaatccgatatttcccatattttctgcgatcatgatctgttcgtagactccttgcaatgttaaaaatgcgatacggatggcaaattcatcgtagtaatcgataaattctctggattccattacgacaaaatatgcctgcacgatatcttccatgacgatcggaataatgatccagctgacacgtggtccttctaaattgccaggattgatcaggcggatccttgccatattgatgtaatcgcataaggtatgtttcgtatagggcattgatggttcccaataatcgctttcggataatccgaaggattctgtgattcgtttaaaatccggggaactgtagtagcttttttcttcggcaagatcatagataaatgccggaaatttcatctcgacttctacggctcttagaatcttattgatcttctggactttgtaggattgatccgatacttgcagatgattattgctgtggactttgaatcttcggatcgttcggttcatcactgcggtattgatctgactcatcaattccatccatggaacagaaaatggcatactgatcagtggaatctcgtattgatcaaacaaatctattaatcgctgtggtatctcgtcaagatagcggcctcgtttgatcatcatggcagaggttccctgcatgcttcctgacttaaatgcttcttcgaggcagtctggttcctgagctaatacatatcctgaggaaaggaccagctcttttccttttgcccagcgcagggcatcgggtgcttcaaggagggttgttccctgaatctctttgtgtaagcctgatttccctgcgatcacgtgatagtctttaaagtattctagtgtcagtagttccttgacagcgattcccattctttatttcctccatttttatcgtgttttttctataaatcattcatcttctatcaaacatccatatatataagaaaaaatccgattcctactgctcataggaaccggatgcttctttgcatatcgatcattcttcatacatcggtgtgtatggttctttatttcgttccctaaattcttttgtaatcttcgctaagacctgtggttttgtaaagagatcatatacgattcctgctgccactttagatgcatataaggctcctttatctccgatggaagtccctccgcttgcggttgcctgccatgtatgtggagagcatccaattggccagcatgctgtcgtaaacagacaggttggcataatcctgctgacatctcctgtatcagaagatgcacttagttctgcttctttccatttatctcttggtgaaacacctaagatcattgcttcatcataaacttggtgaagattttttcctttctctatgataccttgttccacggttttctgcaactcttttgcaaatcgtagttcttcttttgtgtatttgggtccatctgcttcaatcaggttcgcatatgcaaggtctgcaaatgcttcgtttgtggataactcacagcatccacatcccatttcaatatccactgtcgtctctgtcatcatcgctgcaccttgggctactttctttaagcgttccattgtgcttttgacatccttcatatgtggtgctctgacaaaataccatgcacttgcttggtctggcacgatattgggtgcaaatccaccgctgtctgtagaataatgaattcttgtgcggtcaatgacatgttctcttaaatagtttgctccaacattcattaattccacggcgtctaaagcacttcttccctgttccggagcaaatgctgcatgtgatgatactccatggaaataaaaatgtgcagatgcattcgcaagatacgcttgatcatgtgccatgtttgtatcagatggatgccagctcactgctgcatcacatccatcaaacatatgatgatatgccatctttacctttccacttaacagttcttcttctgggcatccatagaatctgactgttcctttttgtttccctttttctaagaaacgtttgatcgcaatgactgcagttgtagccgcggcacctaacatatggtgcccacatccgtgtccgacaccatcttcggataccatttcttttttaatatctgctttttgtgataatccaggaagtgcatcgtattctccaagaattgcgataactggtttcccttttccgtattctgcaataaacgcatgttctaaatgttcattgttctcaatcgtgaatccttcttcactcaagatttttcttaagaaattggcagattctctttcatttccagataattctgggtgattccataaagtatgacagatttcctgacacaacggctctaacccttgcacttcatcataaacgtcctgtttgatcattttatcccctgctttctattcctttgttgtattcttaaatgtcgccattccaacagcaatacttacgaagacacatcctaaggttccaagccagttggatgcccctggcaaccagttaaagtatcccattccgatcataaaatataagatgatcgcaaatacaaccatgatgacgctgtgttttttcattttcattccaaattgtactaataaagctccaaataaagctggcagcaagtagtttaatgcggctttgatcgtatctggaagcatggataatacagaagttccaagaattgctccaattgtaagaacagatacgttgatcacgatagatactgccattccaagggttgcaacaacagatcctttttctgttcctggttctacatctgctgccacctgtgccatacttgcacatgggattctcatgttagagatatttcctgataagaatgccatataagttccagcggctccgacgactggaaagtaagagatcggttctacaaaccataacactccaaaggcactggctccgctgataaatgcggttaataatgcagctggttttggtaagattccatagacaacagctaatacaagtgctggagtaaaggaaagaagaactccaaggtatcctgtgatcttaccgatcttattgacttgtggtacatattctttattataataatcctgattgttcatcgtatcttcctcctgcttaaactaatgctgtaatgatcatggctccaagaattgtgatcgtcagggaccattcttttaaccatccgatctcttttttatttgcaactttggtaagtacaaacatgatcacggctccaagcacacatgctaaggcattcttccatgctccgctcattgtgatctggtctgctttcatcatcatagagtaaaatggtttggataaatggcttgcacacattgctgagaatacaccgatgatcgcacaagaagcaatcgttgtcagtgttcctgtatttcctctggaaactttcttttcaatcttatccatcttatttgcagagaatgttgcgaataacgcccatccgatagagcaaaggatcatggtccagactgccattcctaaagcttctggtgttaatgtgtccgttccaagctgtaccccgacagcggatgttccaagtcctgctgcgatagattcaaacataacggaaccgatcatagataatctcatccatccgattggtccccctacagatactaacagagaaagcatcgcacttaatacaacgatggatggtccgatcgatgttaccgcactgcttttcattgcttttttcatctgtttatcgttaagtcctagtttctttcctgatttgtaagcaccccttgcgaataagactgcctgtaagatgacaaatgccactggaagtgcacaggcaagccacattgggatactatttgcgattttcattgcgtccatatttttatcctccttatcggtccgtgtgttttgtatgcaattatattacctgttttgtgggtgaaatgatatgaaaaatttttcactttttgatatggcatctttgttttcgaagatttttatgattattttctttgtatagtgaagattttttcactttattaaattaataaaagaaaaactaccattttctcttaatatctaagatataagtgtgtcatgtctttattttactttttaataacattagtgctttcttttcaatcctgcttacataggatcttgaaatatgaagtttttttgctacttctttttgtgtcattggttctcttccataaagtccataacgcatgatcagtgttttcttctccttattcatctccattttctctaattcttcatagattcttttgatattttctttctgctcgatctttttgatcaagtccgtttcctgtgttcctagaatatctaacagatggatctcgtttccttctttatctatcccgattggctcataaagggatgtgttctttgatgttttcttttcctgacgaagcatcatcaataattcattttcaatgcatcttgcagcatacgtgacaagccggtggcctttgctgatatcatacgtattgatcgctttgatcagcccgatcacaccgatcgagatcatatcttctttttccctgtccagattatgatatttctttacgatatgtgcaaccaaacgaaggttgtgttccactaacagatttctcgcattcatgtctccctggcggcttaggatcagataatgacgttcttcctctggtaataaaggttgtaaaaactcttgcaaaagaaaagcacccttctaagcctttttatcatactatgatactttgcttagaaaagtgcttttccatttctattctgaagtttttgccgatcttatcttaattctctccttcgacttcttctcttcttcgaagcagatatccttctttaatctcttctccaaaatcaacatagatcatctgttttggatgtggggcggattccattggtcttccgtcttcatcttcgattgctttcactataacttctttgtttgttccgtctgggatcataacttcgatcgtctctccgacagagaatttattcttctgttctaagagtgcatatcctttgtcattatgtccctgaacgattccgatgtatgtgcagttcttaatatacgtattgctgtcatatatctgggaagtttcgtctgtctttccaaaatagaatcctgttgtaaactgacggtatgtgcattttgcgatctcttctttgtagtaatccatatttgctctgtatttttctacggattccttgcagtcatcgatcgcttttctgtaagttcttgcaaccgttgctacataaagagctgtcttcatacgtccttcgatcttcaagctgtcgattcccgcatctaagatctgatcgatatattcgatcatattcaagtctttggagttgaaaatatatgttccacgttcattttcatacactggcatatattctcctggtcttgtctgttccatcacagagtatttccatctgcaaggatgtgtgcattctccgctgtttgcatttcttcctgtgaagtagttacttaacaggcatcttccggaatgagagatacacatagcaccatgaataaatgattcgatttccatatcatctgggatatgagcacgaatatctttgatctcttccagagataattctcttgcagatacgacacggctcgctccctgatcataccagaacttgtatgttgcatagttggtactgtttgcctgtgtactgatgtggcggtcaatatctggacaaacttcttttgcgatcataaaaactccaggatctgagatgatcagtgcatctggtttgatctcttttaattcttcaaaatatttgcggattccttctaaatcttcgttgtgtgccacgatattagcagtgatataaactttcactccgtgtttatgtgcaaattcaattccttctttaacatcttccatggagaaattctttgctttggcacgtagtccatacatctctccaccgatataaacggcatctgctccatataacacagcaacttttaatacttccaagttacttgccggaattaataattcaacgtctctcattactttctcccatcttgatactgattgctacgccatcacctaccggaaggatcgttgtctctaactgtgggtgattcttgatcgtatataaatagtctctcattcgtttatgaatggtgcggtctcttcgctcgatcgcataacgtgatctggcaacgtctccgtcttgaagtacgttatctgaaaccagcacaccttctggtgccagaagtcttagtacatcatcaaggaaatgaatatactgtcccttggctgcatctacaaaaataaggtcaaaacttccatcaagtccttttaagatctcgatcgcatctccttctagtaaggtgatctgttcttcttttccctgatttttgatgttctcttttgctttcttgattcttttttcatttcgctcaatcgtgatgatcgttccgccttccggctggtaactgttcatataaagagaagaaaatcccactgctgctccgacttctaagatcttcatcggtttctttaaaaggaccagagtccttaagagttccttcgtctctggtttgacgatcggaacatgattgactctggcctctgattcaatatggcttaaatcgttcttctcttctttcatcaatgagcggatatattctgtgatatttaaatccactatcattgtatgatctcctctgatacatgatctccgcataaaatacccataatgtcatccattccctgagactgtgtaaattcatatgtccctgaaataaacgacttatctttgtattttgagaaatatttgcggatcacaaatctagtctttccatagatcagtttctttgaaacaagggtttcggcaactttctcatctgactcattctgtgtaacaatgaccgttactttcttatggctttgtgcattatatggctgattcgaaaatgtctgttctgccacaaaatacgccccatagaaaatacagaagatcgcacagattaaaaatactctgcttaatgtcctaaaaaacagttgccatccttcggaatgaaaaaacttcttctcttctgaaagactcatcttaaacctctgtaatgatcggcaggatcattggattacgctttgtcttcttccaaatgtaattactaagctcgtctttgatcttcgtcttgatccttgcccagtctgtgatattacgttctaagcattcctctaccgcatctcttgcaacatctcttgcaccttccatcaaagattctgattctctgacatatacaaacccacgagatacgatatctggacctgccaggatcatattgccatgtttctgcagagtaactgttgcaatgatcaatccattctgagacagtaacttacggtcattcaatacgatgttaccaacatctccgacaccaagtccatcaacgaggattcctcctgcctgtacttttccagcgatctttccttgtctcttattgagctccagaacatcaccttctgccaatacaaatgcattctcctttggaattcccatctcgatggcaagttcacgatgacgcatcagatgacggtattctccatgaacagggattgcatacttcggcttcgtcagtgcataaataagtcttaattcttcacggcatgcatgaccggaaacatgtgtatcttcaaatacgatctgtgcaccttttaatgccagctcattcatgatctttgagatgttcttctcatttccaggaattggacttgagctgaatataatcgtatcacttggtacgatggatacttttctgtgagttgagtttgccatacgggataatgctgccattgtctctccctggcttcccgttgtgattaaaacaatctgatcgtcaggataattcttaatctgatcagtttctattaatgtgttctttggaatcttgatgtatcctaattcggacgctgtcgcaatgatatttaccatgcttcgtccttctactgcaacttttcttccgtacttatgtgcagaattgatgatatgctgtacacgatccacgttcgatgcaaatgttgcaatgatcatacgtccttttaaatgttctgcgaacagattgtccagacgttttcctacattcttctctgatggtgtatagccttgtcgttctacattcgtactatctgccatcaatgccagaactcccttacttccaagttctgcgaatcttgcaagatcgattgcttccccaaataatggcgtatggtcgatcttaaagtcacctgtatgcacgatcacacctgctggtgttgtgatcgcaagtgctgctgcatctgcaatactgtgatttgtcttaataaattctacattaaagattccaagttttactttgtcaccatgtgtcacaacatggcgctccacgttatttaaaataccgtgctcttttaatttgttctcgatcaatgccatggtaagttttgtcgcatagatcggtacgttcaattccttctcgaaataaggaatcgctccaatatggtcctcatgaccatgggtgataaccagtccacgaatcttgcttgcattgtcctttaaatatgtgatatctggaataactaaatcaattcctaacatatcctcatctgggaacgcaagtccacagtccacgatcaaaatctggttattgcattcaaatgctgtgatgttcattccgatctggccgagtccgccaagtggaatgatctttactgagctaggctttcttctaggcattggtcttcttccccttgcctgataattattcttattgtatgatttcttgttatcatttgcataataattatttcgttttggtcttgcctgctgtcttacttgattgtctttcaactttcttcctccatatctacgtaggtctgacaatccattgttttaaacactcttatatattttataaactcacttcaagtccatctaacagtgcgttaaaaatatctgagatcatatccagttctttatcgtcctcaacgatctcataggatacatagtcatcctctaactgcacttctttcatgatcaatacaacgctctcatcttcactcgatgcttcgcagtcttctaccaaaaggtaagtctgacctgcgatcgttgtctgttctatgacattaaattcgatttcctgtccatcgtcatccagaaaaagaatcttgctgtctttcttgctcattgtctgttcctcctatagggaatctaaatatccctgtaaaatcatagacgccgcgatctgatcgatcactttctttctgttttcgcgtcttacaccgctttccatcagaactttctctgatgctactgttgtcagtcgctcatcccacaagatcacttctaatcctgtacgacgcactaaggtatcgcggaaagataaagtatcttctccgcgctcacctactgtattattcatattctttgggagacctaaaacaatcttctcaacatcatattctttcacaagttcttcgatccttgcgtaagtctttcttaacttattcgcatctttccttgtgatcgtctctaatggctgtgctgtaatatgaagctcatcacttaacgccactccgactgtcttcgtcccataatctaaccctaatatccttctcataataccacggtctctactttaatcttgtctcaatatagttctcaagcaatgcttcaatgatatcgtcacgctcgactttattgatgatgcttcttgcattgttgtgactggtaatgtatgttggatctccagacataatatatcctaccatctgattgacagggttatatcctttctcctgcagtgcctcatatacacgctctaagatcatgtgtacatccagttcctctctaacaacggaaaaatgttgtgtttgattattatccataattatcacgtccctttcatttattaaccattttaatataaaatgtatgaaatagcaatggaaatcataaaatttcacatctgtttaacactctgccaatacatatccatcatctaagatctgtcttagctttactttcacgatcttattttccaatggttcttcactgtaaagtgcaacttttatatactcctttgtatgccctgtataataatgatcttttccatgcatcttttcttcgatcagtacttctttgaccatgcctaactgttttgtctcaaattctttctggtgttgttttgacatttctaataagacattacttcgttttgccttaatctgatcattgatctgtggcttcatatctgctgccttcgttccctttcgaatggaatatttgaacacatgcatttcatagagatcgatctcttctaaaaattttcttgtctcttcaaattcttcttctgtctctcctggaaaacctacgataatatctgttgtcaatgctggatattggaaatgttcacgaattgccttacatttctctctgatatcttgtgttgtatacttacggttcattcgttttaagacagaatcacatccactctgcagggacagatgaaaatgtgggcaaaaactttccatcttagaaaggcggtccaatgtatcctttgtgataaatccaggttccagagatcccaaacggattctcttaacttccgggatcttggcgatctcttctaacagatcgatcagtgtaacatctcccaaatcttttccatacgatgtaacatgaattcctgtgatcacaaattcctgacatccatgttttgtcagattcgtgatctcttctaacacttcttccatcttacggcttctgactcttcctcttgcataagggataatgcagtaagaacaaaactgattgcatccatcttgtactttaatatatgctctggtatgttcttttaactgttctacatgcaaagattcatattcctgatcatgcgcaatatcaataacttcgatcgattctgcggctgattccttctctcccatatgctcttctaaaatatggatcaagtctttctttttattattcccaatgatcagatcaatatttgtatcttttgataattcttcttttccaacttgagcataacatccaactgctactacaacaacgtctggattcttcttctttgcgcggtgaagcatctgtcttgatttacgttctgccatatttgtcacagaacatgtattcacaatgtagatatctgccgcttctttcggatcgaccatcgtaacacctgcttccttaagcatcccatacatggcgtccgtttcatattgatttactttgcagccaagagttacgatggccgctctttttccttgtaaattcatacgattcctttcttgttgacttttatggcaaatacgagtacactatccttgttaattggaaggagtattatcccatgtatgatgcattgatcaaactaaattccatcaaagacctatactcgtttgtcgacatccttgacaagcactctggcacgtttgagatcgttgccaatgactatgtcgtggatgccaaatcactgatgagtatgctaagcctcgatctttcgaaacctttagagctttcgtttgattctgatgaggcttctgttatactgtctcagcttcagccatttattttacgtgaatgatctctgtagaatcaatggcttctttcattaaatcatcaatcacatcttccagatgttcttctgatttcttaattctctttaaattaccctttgtaactggatgttttgcaacaaagatcgtacagcagtcttcaaatggctgaatggatgtctcaaatgttccgatcttctctgcaatatctacgatttcctgtttatccataccgatacatggtctgaatactggcatattacatacttcatttgtgattgcaaggttatggatcgtctggcttgctacctgtccgatactttcaccagtgatcagtgcaaggcttccaccttcatttgcaaaatgttccgcgatcttcatcatatatcttctcatgatgatcgttaattcttcatgagggcatttctcatagatcgctaactgaatgtctgtaaagtttacaacatgtaaattgatcggtcctgcatattttgcaacgatcttcgcaagatctataaccttctgttttgctctctcgcttgtgtatggtggtgcatggaaatatgttgcatcgatgtgtactccacgttttgcgatcatatatcctgcaactggactgtcgattcctccggataataaaagcatcgcttttccattggttccgactggcattccacctggtcctttgatttcctgagaatagatatagatatattttctcacttcgatattcaccattacctgtggatggtgcacatctactttgatcccttcaaatgcatctagtaactgcccaccgatttccatattgatcgccatggaatcaagagggaactgtttatctcctcttcttgcatgaaccttgaatgtaaaatccttgactggatactgttcatcaataaatttgataactgtctctgtcaaatgttccatatctttgttttcttcgatgaccattggacagattccaacgattccaaagactctctgcagtgcttccacagcttcatcataatcgaactcatcctgtgcttcgacaaacatacgtccagattcttttcttactttaaaatccccaacgggtgccattgcatggcggatctgtttcattaatgcgtcttcaaacatataacggttcttacctttgatggcaatctcaccgtatttgatcaaaaatgcggttactttcatagtattctcctttattttcttactgtttcttttcttgtggtctttattttcttacaaatcttcgaagcattggtactaattcttttaatgctttgatcgtttcatcaacttcttcttttgtattctcaattgagaaactgaaacgaagtgttccatctttaaattcatcacttaatgcgatcgcatttaatgttccactgactgcctgttttttgttcgatgaacatgcggatcctgaagatacatagatttctctgtcttccaaggcatgtaacagtacttcacttcttaacttcttaaagctgatacttgccacgtgtggtgcttttccagaattgtctttgatatcctcaatctctttgatcctttcctgaaaatattctttgacttcacggatcttctcagcattttcatagtttttaccgatcatcttttcacatgcgacagctaatcctacgattcctggtacattttccgttccagaacgcattcctttctgctgtccgcctccgaaaatgatcggagagatcttcgttccttccttgatatataaaaatccgattccttttggtccatggatcttatgaccacttgtggataataagtcaattcccatattctttggaacgatcggaagttttccatatgcctgaatcgcatcgacatggaaaatcgtattcggattctttgctttgatgatctttgcgatctcttcaattggttcaatggctccaatctcgttatttaccatcatgcaagatacaaggatcgtatcttctcggatactttcttctaactgatcaagatctacgattccttctgaatctacatcaagatatgtcacttcatatccttcttcttccagatgatacattggttcatatacagaagcatgttctacctttgtcgtaataatgtgctttcctttgcggcgatttgccattgctgttccactgatcgctgtattgtttgattctgttcccccagatgtaaataagatttctttgggttttgctcttaatgtcttcgcaattaattcttgtgcagcttttactttattctctgcttcaatacctttcatatgttttgcagatggattcccatatgtgacctgcattgcatcctgcattgcttctacaacttctggaaatacgcaggttgtcgctgcattatcaaaataaatcatgtcgctttctccctctattcttctatcgtaaacatcaaaatagataaaactgtcattcctgctgtctcagttcttaagatacgctttccaaggctcattgtctgaccacctgctgccttaagctgttcgatctcttccttttcaaaaccgccttctggtccgatgatgatcccgatcgatttcttcccttttgcctggctgatcagttctttggatgcctgcattccttttgcctcttcatatggaacaagcatgaattctatatcttgtacttcttctaaaatatctttgaaatttctcacttcacgaacttctggaatgatccctcgttttgcctgttttgctgcgcttaatgcgatcgtattccaacgacttaccttctttgctgccttcttcgcatcaagtttcacaacacaacgtttcatagcaactggaacgatctctgccaccccaagttccaccgctttttgaacgatcatctccatcttatcgccttttggcagtccctgatacagcgtgatctttactgggagttctgtttccatgccatgaacatcttcgatcttcgcaaggatcgtatcgtccgtccattccaaaagactgcattcatattctaaatctgatccgttacttaaataaactttatctcctgttttcatgcggagaacgttcttaatatgattgacatcacttccacaaatctcgatcattccgtcatgaatctgttcttcttttataaaaaaacggtacatctcttacctcatcttcgctgtcatagaaacccagtctttcattcttcttgtctcaatgacatcaaatccatatgcatttaatttgtctgcgatttctttttcttttgtatcaatgataccagagattacaaaaacaccatcttctgccaaaaactgatctacgatctcgatcagtggtgagataacatctgctaaaatattagcaacaacaaccggataacattttgatcctaaggatgctgcaaactctttatcatctaaaacatttccctgatatacttcaaactgatctttgctgatatggtttacttcaaagttctcctcagaagctgagatcgcatgtggatcgatatctgtaagaaccgcatgccctgccccaagtttcagtccgatgatcgacaaaattccacttccgcatccaacatccaaaatctttgtatcttccttaatatatggtttcattccttcaatacaaagttttgttgtctcatgagaacctgttccaaatgctgttcccggatcgatctctacaacaatcatatcttctgtctgatcttctaatgtctcccatgttggtttgatcacgatctgttcatccagacgaatcggtttaaagaatttcttccagttattgacccagtcttcttctttcgtcttatcaaatgaaattgttccagcaccgatatccataaatccacgaagtctttcaagcattgcctgaatctgcattgtaatgtgctctaaattttcattctcatcaaaataacagctgatctttgcttttccatcgtctggtgcgatatcatctggcaatagatccacatacatgactttcatctcttcttctgtcaatgatacatggtcttcaacttccacaccagttgcaccaagttctgtaagttcataactgatcatgtcttctgctgatgtcaatgtatcaattgtaattttattccatcccatgacactgtatttcctttctctttctatcttatatttttatttcgtattcataacatatcaattaattagtgtatcatacaaaaagctggaatacaagaaaaaagagaatcccgtcgtctttcggaactctctttcatcgctatcttcttaatacgcaaactgtatttatgatgaatttatgcttctaagatctttccatcaatggaaattgtgtgaacctgccatggaaggaatttgccggaatcctgaatcgctttcttcgccgcattttccagcccgccacaacaaggaacttccattctaacgatcgttacactcttaatgtcattgttcgcaatgatctgtgtcagtttctcactgtaatctccttcatcaagttttggacagccgatcaatgtcactttatttttgataaatttctgatgaaaatttccataagcataagctgtacaatctgccgcgatcaatagattcgcatccttaaaatatggggcattaacaggtactaatttaatctgcaccggccactgagacagctgagaagatacagttgctgtctgctctgtcgctacctcttctgccttatgatccatgatcttcattcttgttccagggcacccgtggaataccggcttttcttctattttatcttttgctgtcatttcagctttcttcttcatgtttgcttctaccgcttctctgtcatacgcagctgcctcacgctctacgaaactgatcgctcctgttggacaatttggcagacagtctcctaagccgtcacaataatcatctcttaataattttgcctttccatcaactatcccgatcgcatcttcgtgacatgcatctgcacacagtccacatccattacatttatcttcatcaatttcaataattctacgaatcatatctattctccttttcttgatctcatattctttactgtatcgttagtataatagatatgatttgggaaatccgttgtttttacaacatttttaaaatttttttaaaaattgaaaaagcagaaggcactccataaaccttctgctctttcggttgtttattattcgaatatgccaacaaagacatgttcttcctgactatccgacgaaacaacactccatattctcttcgtaaaatctgttatacatctgtcgcatcaaaggaatcagtttataaagtggttccgtcttacgatggttaacttcatctttgatcatctctttgatgatcgcttcttttacctctcttagagtaccatatactccaactttttccaatacttttttgcaattttctttattctttgcgcgttttagtaatacaaaatctccataatatttttttatataataattttctttcattcttatcattttaaagttctccttttcacatactgtgtttaaaatcattgaacgatttcaaaaactttcttgaactgattattggcattatactccttttgtatacagtatatgttgcaaaagaattactttttatttaagtttttcttaatttttaatatatagatttctattatatccttatagatatttttaaacttgtatgttgtatacagtactcgtccatttttgacactttacaacctactttctttctagttataatatattataagtgtcactagtataaattccgtttgtttctacacaaataaacaatttatattcaatgacgaaccaaacaacaagaacggattaaaacatatagaaaggacacaatttatgaaatacaaactaatcgccgttgacttagatggaactctttataacgaccaactcaaaattacttctgatactttaaataccatgattaaagctcaggaaatgggtatccgcattgctcttgcttctggtcgtcctctccctggtctttttcatgccagagatttattgaaactaaatgaacatcctggaatgctcgttgcttacaatggcggaaaggttgtagatactactacaaatgaagttttatatgataagtacatcccagatgatctcgcaatggagcttttagaacatttgaaagattatcctgtaaatccgatcattgatgatgggaaagttctttatgtcacagacaagaatggatatcgcgtcaaagaagaggcattgaatgattctatggagtatgttgaggttccttccttgacagaacatcttgattttcatttaaataagatccttactgctgtcgatcctcaaaaaacttatgatgttttagaaacgatcggaatgccatttagagatcaggtcacttttgtccgtactgctccttattatattgaagcaattcctgtgggtaccagcaaagcttctggtctttccaatgtatgcaaaggtcttggcattgattcatctgaggtcattgcttttggtgatgcagaaaatgatctggaaatgatccagtttgcaggtcatggtgtcgctatgggaaatgcatgcgatgctttaaaagatgctgctgatgaagtaacacttacaaataatgaagatggtatcgcacatactttaaatcatttacttggctgccgttaacgacagccctctccagcacctgtttctcacaggcatacctcgcttcaacacaaatcatcaatataattactgttataaacaagaataaattctttttagatacgttgtttcgatattgggtatactgttcacataaaattccaattccgaaaaccaacaatagaaaactctctaaaatcctaaacattccataaactccttctaaaatttacattgcgatttaatgatatctattccaagtataatttcacacagatttttaaatgagcctcctatatgctgagcatacttcttcgcatcacctgcggcataagccaacacaaccaattttgcagcctttttaactccgcctagggtcttaatgtattttactacttttgcaactttcgctgccgcaataactgtacccgcaacgatcaaaccgattgcagctacacattttgcaattttccatgcagatggatctgcaataacaggaaatgtcgttttttcatcaaaattaacaacctgtgttaaaatatttccgttgacaacatagtatgtatccacatcattcccatttgcatcaacagcccatgctgcatcaataactgtatctattacgttatctttattaacaatataaacttcacctgtatcataatcattttcatttaccgcttcattgtcaattatatcacgataataatcttttgcagttatcaatgaatatccctctggtagatcataagcaaaagtatattctttagatgctgtagattcattaatagtaataagtgtccttactccctcaaaagaaacattaccagtttcatcttttagcggttgcacacctattgttactgcatcatcttctttaccatatatcattgttccattcttagtcaatatcccatcatcatcactagcctcaatgggcaacttcatctcaatggtcgccctatatatacccattccgtagaatgactcgcaagaatttcatctaagtctacttttgttatttctttgatattttttgagtctgacgattgtattttgatttttgaattactagtaaccaaacatgcaatcataaaaagtaccctcctttaataagagaatatcataattctgcatattttccactataactccgtcaacggtcgattttaaatttaatattacctttgtagatacttcttctccattaccttctagagaaaatcttccattatttcgacacactatttcacgcacatttctaagtcctataccatgatttttttatcctgttttttggtcattatgttttttcataatcctctataagcacagttgaactatttctgatagtaatcatcaaataaacctttcccgtctttatctcaatttttatatatgggtttgtgcatgaatatgctctaaatttcgaaattctacaactggtcccgttttgaaatgatatccactggactcaaaagaatctgtcatatcagacattatatctataattttaagatcattttcattttctggtaaaagcagatattgttctgatcctttaaacttaatttgatctgctgctgcccaaaaactgtttcctatatctaaagttccgtctttaagaatattaattttaattttctcattttgaatctgtcctttttctccatataagatcattgtctcctgaagaactttctctccctgaaaaacctcatcacgacttgaaaaaaggtcgatttcttttatgttcaattctttttgtaagaaattccttacttttgtaaaatattttccagaagtccatgaacgaggagtaataaaaatgtactgtccattatcgcataacaattcaattgctttcgccataaacaatccatacagattaggctgtccatatacatatgtcttcattgccgttgcttctacagaatcttttcttactttcatatatggaggattgcatatgacaatatcgtataaataggaggattcccataatatgaagttttgatcaacataatgaatgaaacattctgcatgatatgattcacagatttgcctaattttagtaattgtatattctaagactggcaaaatctctttatctgtttcaatcagtgtaatatcaagccgtttatacccacttcttagtaatttatcaatcacagcaaaagataaaatgccgtttcctgctcctggatctaatacccttatccattgattcttcggatattcactttctacagcagccattctcatcgaaacctctgccggtgtaaaaaactgcccttttttctttcggatttccttttgtgttgtatctttatattcatttgtgtacatttcgattgtacgcaacattgtcaataaactcctttatatcattgcaataaaagagtcacactgccataacatttggaaatgtgactgtttttattggttattttaataaacgtataaattattagat

SEQ ID NO: 732 - DNA, 909 bp, Unknown
  gut microbiota DNA sequence
gaatatgaaaaaacgaaaatccggctgcattctctttatctcttcccttgcttcaatcctcggaatgcatgatattcaggcctatactttatgtaaaagcggcgtaaaaggtcttacaagaagcctttcccgcgatcttggtccatatggcatccgtgtcaacagcttaaatcctggattcgtatacacagatatgctcgcaaaaacaaacttaaaaacaccagaacgattagaagaaatccaaaaccgcacacctcttcgtggtttcgcaaaagaaaaagaccttggaatggcagctgctttcctttgctctgatgccgcacgattcattagtggaatcgaccttgttgtagatggcggaatcagcagttctttcttattgtaacaccaaaaagagcaggtactctgtttcgtacctgctcttttatcttattaatcttatacttaacaacttcttaatcttcttgcctctggctctctggatgtcttatcttctgatacccataaatctttgtaatttaattttaaaagccctgcgatcattaagcttaacactaagatcattgcaatcgttcctaataaatgcattgttattctcctctttatattgtgttgtattatgtattctgtatttatgctttatattttatcaaattaattttggagaatcaatatgtagcattattttctaggaaattacaacatttcatttgcatttgcactctggtgttagcaaaattttcagtaataaatatgtctttgttattgtttttgtgcaatttgtagtaccaatttccgaatggtgtgtttgtgtttggtcgtatttaatttctgattcgtctcatccgttctgccatggcattcactagaaaataaataattcctcctgctaattcaatgtttttaaat

SEQ ID NO: 733 - DNA, 2072 bp, Unknown
  gut microbiota DNA sequence
atatggaaatcgccatttctggtgcagaggatattacgtagatactgtagggaaaaatgcaaagaagatacaagaatatattcaaaatcaattacaaaatgatttagagtatgatcagatgacactaaaagaatatattgacccgtttacgggtgagccagtaaaccaaaataaataaaataagccccatagggcttaataagtaaatgacggtacagttggcgaaccaaattcgatgagtctttagacttagcgtcggtaataagcccttatagggctagtacaaaccaccggctaagccggtggttttgatttttatatagaatgatgagaagaggaacaatatatgtcaaaagagatatcaaaacaggaaaaagaagattatctaagtcttatgtatgaaatgaagcgaaaagagaatcagattgtaaaatccgacttatccagggaacttgaagtgccgttatcaagagttaccagagttacagatggattgttagaagaaggatatctgttaaaggacgaaggaagaagaatgtttttaacaccaatggggctatccaaagggcagcaatgtctggaaagaaaacgatgtcttacagaatttctgcgtttggtttctggtgttgatggaagcattgcaaaagaaaatgcatgtgcgatcgaacatattctggatgaacgcattttaaccgggatccgtatgtttatggaaagccgtcatacatattcatatatgactagaggaaatgatttaaatctgatgtttccagaaggaaagaggatcatgccgatcgcattttttgaaaaaggaacatcacatccaagaattctttcgaaagaataccagcagtttgagaaacgagcggaagtagtgatcagcaaagaaagttacttgtatttaaaaccgatagattcagatctgctgaaaaaagaaattcgctactgttatggaaatcagtggatgtatgcaaaaaaagaaaatggaaagtttggaattttgacagaggcattggactgtacgattcgaagaaacgacaaattatccgaaggaattgtagaaatagtagtgtgtgatcatcatgaagaagagattaaagaagaatcggttcgtattttaaccgtatcattaatttaggagtttgacaatgtgtgataaaacaatggaaaattataaaccgaatatgtttcagttacaatgcttaaaagcattagagatacagattgaggaaggaaaaggatacaacgaagcagagatcggaagaaagatgcaggtaaacagatcaacaatctcccgatgcttcaaaagataccgagaagaatgattcctggaagataaaggatttaccagaaaaggagcggaattcttagaatattacaaaatgatcgaatcagatctttaccattactttgcatctatcggaattaacgaacaacagcaaagacaggcagttacaggagtgtttgatactgcagatatcgatacgatccagaaattatgccagaaagagaaaatgcatctaaggtatgaaagtatcggaaaaaatgaaagtaaagaaattaccaagttaacctacgaacaattatgcaatagtttaaaaaaaggcatatatcaagtcgcattttccatttatcgacaaggaaaagactggaaaagtctttctatggcagaccaaggatttgaaaaaccagcatatctgcatttaaagggggataaaaactatttagaactagccgccagagaaatgaaggcaatgacaaaaggtggagcgatgctgtctggacatattcagacagtcaaatgtagaagcagcaaagacgttttaacagattttccgatccaagataagaaaatacagattccatttgaagattttgagtttgagcagttgtcagaaacagaaatcaccgggcagatccaactgtttatgacaagcagcgttgggaagaagagaatgccagagagtatggcgacactgattttgaaaatttaaattgtataagttgaaggtcatcgagtatttagagaaaaaatgaaagatagcatgtgagcaacacgaattccattgacg

SEQ ID NO: 734 - DNA, 2043 bp, Unknown
  gut microbiota DNA sequence
ttatacgaagaaaggtgacaaactagatgcagcatcttacatatctaaagtgtgcatgggaggagattatgactcggatgtaccaggagatattaataaaagcaaagtgaagatcaaagatgaagtagattacgataccccaggttcttatgagatcacttattcagtaaaaagtggaaagagccgtacaggaacggtaagactgatcgtgatcgttacagaataggaggccggcaaatgagcagtgataaacgaaatatatcagtcaacgattatgaaatgaatattgatttgtatagtatcttaagagatatctggaaatatgcaatagtgatcctgcttctggcagcatctatgagcttgctctcttatgtttatgtcggacgaaactatcacaaacagtatgaatcaacaagtacatttatcgtaagcagcaaaggaagtaacaatagtgtatattcagatttgagtgcaacgtctgagatggcgacaaagttttctgagattctaaacagttctatcttacaaaagaaagtcgcaaaagagatggatatggattattttccaggaagtgcatctgcagaggtagtaaatgaaaccaatcttttagttttgaaagttcaggcagattccccagagatggcgtttcgtttgaataaggcaatcatgaataattattctgttgtgacagatcagctgatcggaaatgttgtgctggatgtattgcagaaaccaacagtgccaagtggtccggtaaataaatttcagccaacagcacttatgaagaaaacattttttacgacgatcgttgcgttatgtggattgatcgcaatcttgtcattcttaaaggatacagtgagaaaaccaaaagaagtttcaaggaaacttgatgcaaagcttttgcagacgttatatcatgagaagatctataagacatggaaagcaagaattcaccgcaaaaagagtccggtattgttgacaaatccaggaacaagctttcaatatgtggaggatatgaagaaacttgcccgcaaagtcagcagtaagatgaaagagaagaatgcaaaaacacttctggttgcaagtgtggaagaaaatgaaggtaaatcaacagttgcagccaatttagcattggcacttgcggaagaatcagagaaagtattgttgatcgatgcggatcttcgcaaaccttcacaatacaagatttttggattggatcaggaagaaatacagcagtttggagaagtattgaatggaaatgaacagatagataatctggtaacagatcttccaaaatcagaattgttattgatcgcaggttctatgatctatccaaattctacagagatgatcgcatcaccgatcttccagaagatcgtagagttctttaagacaaagctggattacattattattgatacaccaccaatgtcacaggcggccgatgcagaagagttagtagaccttgcagatgcatctatccttgttgtaagacaacatacagcattagtaaaagatatcaatgagacgatcagtatcctaaattcagcagaaggaacgatgcttggatgtgtttataacgatgtattccatggagttgctcagacagcaagaaattatggatacaaatatgcatatggaagcggttatggttacggaagcaaatacggttatggaaaccatggatatggttacggttacggctatggctatggttatggaagcagaacgaaaaagggcaatgaagataaaacacaagaatcaaaaacagaacggcaggtgaagaaagatcatgagtaaagaatatgaatcaaaaacagaacataaagagaatctgatcgatattgctggattgtttgatgacttgatcaaaggcatcattcaaatgaaatggagatttttgattattcttgtgatttgtggtgcagtgttctgtggatacaagagacttacctattccccatactatgtagcatcttccacatttacgatcaattccagtattacatcagagaattccaattcatatattgagaatgcaac

SEQ ID NO: 735 - DNA, 5224 bp, Unknown
  gut microbiota DNA sequence
aaaatataataaaaaccaaacgagtagcaaacgagcgtaaatccagtttttgctgctcgttttttctgtttaaaatcataaaaagtcattaaaaagtgtgtagccaatcagcgtaagtccagcttattctgatgaactgcattcttttttttatgcaaaaaaggaggaaaaaataaaaatggcagaaagtaacaagatgaaggacatgccagtcaataagctcatgatccagatgggaattccaatgatcttatcaatggcattgcaggcagtctacaatattgtagatagtgcttttgtaggtaacatgagagcaggaagcgaggcggccctaaatgccttgacgcttgtatttccagttcagatgctgatggttgcgatagggattggaacaggagtgggaaccaatgcacttcttgcaagaacactcggacagggaaatcataaaaaagcaggtaaggttgctggaaacagtttgtttttaggcgggatcatttatgtggtctgtttgccctttggaatttttggagttaaaacatacatttcatcacagacggttgatccgcaagtaatctctatgggaacaagttatcttaggatatgctgtatcatttccatgggaatcattttcttttctctatttgaaaagttgttacaggcaacaggccgatccttctattcaacgatcggtcaggttgtgggtgcagtggtaaatatcattcttgatccgatcatgatttatggaattggtccagttccagaaatgggagttcaaggcgcggcttatgcaacggtcatcggacaggtagcatccgcagtgttattgtttatctttcatataaaattaaacaaagaatttgagcatggagcaaagtatatgaagccagatgctggaattatcaaagaaatatatgcaatcggacttccagcgatcattgcacaggcattgatgtcaattatggtatatgtaatgaaccttattttgaaattcagtccttccgctcagacagcctacggattgttttataaagtacagcagtttgttttattcttagcatttggactaagggatgcgattacaccgatcatagcatttgcttatgggatgggaagtaaaaagaggataaaagatggaatcaaatatggattgatgtacacgagcgtattgatgatctttggaattttgatcacagaaatattcccaagttcttttgcaacattatttaatgcaggaagttccagagaatattttatcggagcaatgagaattatttcaattagttttattttcgcaggaatcaatgtagcatatcagggaatatatcaagcattggatggtggtatggaatcactgattatttcacttctcagacaacttgtgattatattacctctggcaggaatcttttcaatttttgtaagaaaaggacgagcaggagtatctttgatctggtgggcattcccaattacagaacttgcagcatgtctgatcggatttgtctttttaaagaaaatccaaaaaataaaagtagagcgattaacacattaaggaggaaggtattatggcaaaaagaatcattacaatcagtagagaatttggaagcggtggacgatttatcggagaagaagtagcacaacagcttggaattgcttattatagtgaaaatattatagatcagattgcgcaacagtcaggattatcaccagaatatatcgaagaaaatgcagaattatccccaaagaaaggattttttgcctatgcattttcgggtcgtgatattacagggaaatccgtggacgatatgctgtatgaggcacagagaaaggtaattttggaaattgcagaaaaagaaccatgcgttatgattgggagaaatactgattttatactgaaggatagagatgatgtgttaaatgtgtttatacatggagacatgccagagaagatcaaacgtatttgcaagttatataatgttacagaagacggggcagtaaaacttataaaggatacagataaaagacgaaggataaattataatttctatacagaacaaaaatgggggatggcaagtaattatacattgtcattaaacagttcgcagttgggatatgcaaggtgtgagaagatgatcatgggttgtgtggatatttgttagattataggaatttttcttattatctcatataggaaatattttttgaatctgatatactaaaactataaggaggaatataaaaatggaatttcaaacgatgggaacaaagttatcaaagtaaacaagatgaaattcatcagataggagagtatctgcaaaagcaaggaatagaaaaaataacgcttatagtcgcttcatcgattggagcagatttaggactcacatttctttctcagatgaaaatcccaattgagcatacttttttgatggaggtcaatttgcacagatttcaagattgacaaggaaggttatggttccattgatggacagtttggaagataaagaatttccaaagctgtcacaagaggttcaaagaaccattttctttgagtttggaagtgtcgaggaacattataaatatcgtgatgctgtaaagaaggcgtatccgtacaggaaagttgatgagaatagttagcgaacactaatgaaagggagaaaagaagaatgaatgaaaaagcaaattatggaaactgggtacctgaaaaagcattgtatatgttatttggagcagtaattgttttaggtgttattgcggtagcagtacaagtagctttaagtgaaatggtcattgcaatcatagtaggcgtattatgcattttgactctggtaatggcaatttatatgctgatctgtcatgaagcattcgcatttggaaaaggaaatatgatggcaggagtacatgaacatctgattaaacatcttgattgggatggtgaagggaaacttctagacatcggatgcggagcagcagcacttactgttcattgcgccaaagcatttccaaaggcacagatcacagcgatggatcactggggtgtggaatggaattatgcaaaagagcagtgcgagaaaaatgcaaagattgaaggagttgcagaccatatcgcttttcaaaaaggagatgcagcaaaactggatttccctgatgagacatttgatgcagtagtaagcaatttcgtgtttcatgaagtgcgaacagcaaaagataagagggatgttgtaaaagaagcattaagagttttgaaaaaaggcggtgtattttcttttcaggatatgttttcacagaaagcattgtacggagatatggaagagtttgtaagaatcttaaaagaagaaagaatttcagaagttcactacataggaaatctggaaaagaagctagactttattccgggatttgtaacaacaccatggatgatcagcgggatgggaattatttatgggaaaaaataggacacagtcaggaaattgtgataaaatataagaaattaattaacaggttgaaagaggcttcggtatgctgcaaaagaggggggtaaatccagtttaataaaattggaaattgcgagaaaggagaaaagtatgcttacaatattaaactcagaaagcttatggattggaacagacatgatacaatttaatgcaatcagggatatcttggatcgggaaaagattaagtacaaatacaaaacatacaatcacttaggagaatgggcaggatcaggaacacttcgtggaaactttggaagtgtggggaatcctacatcacagtccatacagtatgaaatttttgtggcgagaaaagacttagaaaaagcacaggctgtaatgtggaatttgcttagataaagtagatacatgatgataatgaagaaaggaaagatactgtatattactaaagtgatatgcagtgccattctttttatggtataataattttgcaatgttaggaaatggcttaaaatggtcatttcctaacatatgtgttactaatttgttacttgttgaatggaaatttattatttcaacaagagaatagtatctctcaattgttccactgttttatgattataaaccctatttccaacatctttagatttgtgccccatcagcatatcaatacactttctattaccacctgcattatcaaggaatgtttcaaaggtatgtctagcttcatgaggagttttcttcttctttgttatataggaaataacagttttccattcttcataaaaatccccttttttaaatttagatccttcatcagtttctaaaaaatattcattacttttctttagccgatttttaacaaacggcatgatacgaggatggattggcacaattctattcttccctgaagaagatttgcttccgcctttaaaatattcttcttcaagattgatctgatcacatgtcatatttaacaattccattaatctgaatccggtgtaaatatagattaatacaatatctacatttttttgatcagatattttccacagagcttcaacttctttttcagtgaatggagtgcgtttagtttctccctgttctgtgctgacagaaattatttgagaatacatcttatctataatgtctaattcaaatgcaaaattatctaaatgccaccaaagtgctttgatatgagattgtgtagcgtaactacgaccacaatcgtccatggttgcttgcatatgataagctcgtatttgcctatatttctttccgtacagtttttgacaatgtttataagctgctttaagtgtatataaacgagaacttccaagtttaggagcttttacttcaagccatcgcttatataattctgcaagagtgacgcgattgcgatcaatattccaaggattatcattgtacctggctaaaataatatttgcctcttcacgagtagcagcatagtctaccgggacctgccttccgtgtccatcttcatcatatgtagtaacttttacaacgtatggtcgtgatcgattgccttttaattttgttacgctgccgtagccgtttgggtttcttcttgccatatatcatcattcctttctaaaaaagggtacaaaaaatacaccctcatcaatttgtaaaaatcgggagtgtatgatataattctgttgttgagactagaagcatatcatacacaaagttgataggtttctgagattccgtccagttggtagctgggcggttttcttttatttaactttaatagt

SEQ ID NO: 736 - DNA, 2103 bp, Unknown
  gut microbiota DNA sequence
gtgataagaaaacaaaaaaattaaagtgtatgatatacgtcaccttttaaggttttccataaaaactttttatcttcgtaaatcatatacccatgttcggatccttcttttgggatggacacagatcctggatttaaatataaaaagttatcatattcttcccaggctgggatatgggtatggccagtcaacagaatatctcctttatgtaattttggaggatttgctggagagtttatgtgcccgtgggttgcgtagatggtttgtccatcgatgtataggatgcaggattcgcttagaacagggaagtttagtaccatctggtcgacttcggcttcgcagtttcctctgacacagatcaattggtcgctgatagcgtttagcatttcgatgacttgttttggtgcgtaatctttaggaaggtcatttcttgggccatgataaagtaaatctcctaaaagaagtagtttatcaggctgttcttgtttatatgcttcgattaattgtttacagtaaaaagcagatccatgaatatcggatgcgatcattaatttcatatgtaaatacctcaattctgtaaaaatacgataaaatatctttattccagtataccacaaaatatgttaaaatggtcgggataataaatttgagatgacaattttagaaaggtttaaataataaaatgaaacgattagtattagcagaaaagccttcggttgggcgtgatattgcgagagttcttggctgtaagagggaaacgcatagttatatcgaaggaaatgatcatattgtaacgtgggcattagggcatttagtatctctggcggatcctgagcagtatggaaaggaatacaaagagtggaatatggatgtccttccaatgatgccaaaacattggaaattaacagtgttaaagaagacatccaaacaattccagacagtaaagaaattactccttcgaaatgatatcaaagatgtgatcattgcaaccgatgcaggaagagaaggagaattagttgccagatggatcttacagatgtctggaaataagaaaccaatctaccgtttgtggatatcttcggtaacagacaaagcgatcaaagatggttttgcacatttaaaaccgggaaaagaatatgatgatctcttccgtgcagcaagatcaagagctgaagcagactggttagtcgggatcaatgcgacaagagctttgacatgtaaatacaatgctcagttatcttgtgggcgtgtgcagaccccaactttggcaatgatcatgaaccgagagcaggaaattaagagtttcaaaccgcagaaatattacggttataagatttttgcaacaggaatgaatttcacatgggagaatcagaaaggaaatcagagaatttctgacaagaaatgggcagaagaacttggtaagaaattaagaggtcatgatcttgtgatcacggaggtttcaaaaaaagagaaaaagaactatgctccagaactttatgatctgacaactttgcagaaagaagcgagtaaacgttacggcttttcgccaaaacagacattaaatatcatgcagagtctttatgagcatcacaaagtattgacatatccaagaacagattccagatatttgaccaatgacatgacagacacattaaaagacaggatcaaagcatgtcagaatggatcatataaaaaggcagcagcaacgttattaagaaaagaaatcaaagcaagcagccgttttatcaatgataaaaaagtatctgaccatcatgcgatcattccaacagagcagtatgcatcattgacaagttttagttccgatgaacgaaaaatctatgatatggttgttgcaagatttttagctgttttatcagcaccagcaatttctgaacaactctctgtgaaagcaagcataaatggagaacttttccgtgcaaaagcagagaatatcaaacagctgggatggagagaactctacgaagaggaaactcaaacaaaagacacgatcaaagcaggaaatatcccagtcaaaggaaaagaatatccggttggaacgatttccatgacagaaggaacaacgaatccaccagggcgttatac

SEQ ID NO: 737 - DNA, 5117 bp, Unknown
  gut microbiota DNA sequence
aaaaaaaacatatttacacctccaaaaatttaatttataattatataattaagttaacattaacgtcctttatatggactatttatgctgtcgatatattcgtggctgaaaggagcttttcttaatgaatttgaatattcctctgcattcactctctccaaaagaacttgagatcatgcagtatgttcacgaacactcggatgcaattgtttcaatgagcattcagacatttgcacaggaaattaattactccacatcaaccgtcattcgtttctgccgtaagcttggattcagtggtttcccggaatttaaatattttttaaagaatttaaatattcaaaaagaacaaaatcctgtatcatccgatatatctgttgcttcgatcaagaattcgatcaaagctgatcttgaaagtacttcaagtcttctaaattctgatgatatgtttcagatcgcaagactgctttgcagtaacccgccagtttatttatacagtcctgctggtcttaccgatatttctgtcagctatcttgaaagtatgttatttatttcagactgtcaaaaagtgtataaaactactgcttctaaagctttaagacattttatccaaacagctgataagaaaagtatttttatttttatcagtaattccggacgctttgaatcaactttaaaccttgcaaaggaagctcgccttcacggtatgatcgtaatatcgatctcttccattgaaaataatgatcttgctgaagtatctacttataaccttcgtttcttctctaaaaagcgcgaaaatgatggtgcggatttaacttcccgactttgctctttctttgtattgagctcatttattgaatacttcagtttctataagaaaggccttgaacatgaaaacttttctgaatcagattgattcttccaattttactgaaaacgataaaatgatccttgattattttattcaacataaaaatcatcttccttatttatctttaagtgatatctgtaaggatttatacctttccaatgcaacaattgttcgtttttgtcagaagcttggatttaaaggatttaatgaattaaaatttacccttcgcaatgaactccattcttcttctgatttttcaaattcctggaagatcctgcaacgacgtactgctgttttaaaagattttatagataatattgacgcagtaaaaattaaagacatctgctcggagatcatgcggaacaaatctatttatatttatggacgtaatatgtcttcgcttcctgcaaagtatttatattccatgcttaattccatggatattccttgtatctatattgactggattgattttttacgcgctctttccaaatcgcttcctgaaaatgctacattgatcatcttcacgaattacggagaagcatcgatttatcagtcaattattgattcttgtcatcaacgtcatgctaatatcatctggatttccagttctgagatcaatccttcattactgaccgattcagatacttatatctggacacaggaagttcctcttgaacatgttcacctgcgtaccaaaatgacttcatttcttgtcgttcaacttattgtagaatatctccgacaccatatcaaaaagcaggaagaccctttttaaatagtcttcctgcattttttgttcatattaatactttaatactgctcttactgcatcagctattttttctacttttggtccataaataacttgtatatgtgattcacttggttttacgattccaagacagcctgttttctttaattcttcttcatttacaatagacatatcttttacatcaacacgtaatcttgaaatacagttgtttacaacttcaatgttatcaaatccacccagaccatcaataatagtagttgcaagatttttcattttttcatctacgcttaatcctgtagcatcgtcttcttcctcatcggctgctacatcaatagaaatgttcttacgtgatagataccatttaaataccacatagtagattactgcgtaaaaaactccaacgattggaatccaataccaatgtgaacctggttggaatacaccccagataaagaagtcaataattcctcccccagtatttcctacaataactcctaaaactgacatcagcatgaaagagataccacccataatagaatgaaataagaataacattggtgcaatgaacataaaggaaaattccattggttctgtgataccagatacaaaacttgctgcaacaccagcaatcattaatgcttttacttttttcttcttttcttcaggagatgtctgatagattgcaagtgctgctcctggaagtccaaacatcataaatggcatctttccttgtccaaggaactgtgtatactgctgaagatctgttagaggaactttatctacgtactgtaagaaaatatttaagcatccttctacgcctttatatgttccacctaatggtgttgttctaaataatgaatttaatacatgatggagtcctgttggaatcaacaatcgttctaatgtaccgaaaataaatactccaaatgctcctgctgaatgaatcaatgaacctaatccattgatacctactgagattggttcccagattagtggcattacaagaccgatcaatgacattgttacaattacgatcagtgctacgaatcgttttccaccataaaatgcgattgctgctggaaactgtactttatgatatttattatgcagccatgctgttacaagacctgcaaggatacctgctgttgcacccatatctactgtttctactcctaatgtaggagaaatcttcatggcactaaaatccataatacctgttccgatgatacagctgctggctactaagaatgcatagtatcctaaaaatcctgcaaatgccgctacacctttatcttcttttgcaagtcccattgcaatcgaaattgagaacaaaactggcatcaatgtaaatacgatccctgatactttatttaatgttgaaataataaacaatggtacagttgctgctaaaaatggaattgctccctgcacctgcggtttcataaatgcggacgtaagtccaaggacgataccgcacgcagctaaagctgcgattggcatcataagacttcttcccagatcagagaagaaattcataattttatttttcataatcaaacaccatttcctaatttataatacatttacatctcttttcttataaatatagtatgcttattttaattctggccacatacctttgtttgcttcaatcaattcatctaaaattgttcttgctacctttgcatcattaatcaggcggtttaatgtaaatgcctgtaatgctttctggtaagaattctcaaagaatgcatctacaagaactttttcacaagacacctgctgtacaagaagtcctaagtagaattgaggaatatttccaactctcattgggcgtggtccattgattccaagttcacatactacttctaccattgcatcgtcctgcatattagcaatcgctccgttattttctacgattaaaatgaaacgtcctaatgtattgaatgcaatcgcttctgcaactttaatcatcatttctgcatgtgcatctgaaattgcatggaatttatctccaagttttccttctttgatgacttctgcacactctgtaaatacacgtttttcacgaccatcgataacttcatcggcacgagtatattctggattcaaatgacttgccttatattctggatacagataatatccatcatatgtatttggcagatagtctggaaagtcttctaacattgtttgaacaaatccataagtgtcaagccatgactggtctctctgttctgcatcctgtggaagaaatcctttttcttttacgatctgtcttacttttggaagtaaatcttctcctgtatttttgtcataaatatgtgtgaaccatccataatgatttaatccaaagtatactggatcaagatcttcccagtcatatcctaacaaacggcttgtggaacgtactacattttctggctgatcacagatatttaagattttcttatcatctgggaattctcttcttaatgcctctgcaacgatcgctgctgggtttgagtagtttaagatccatgcttctggtgaatactggcggatctgatgaattgcttcgatcatatctacacaagaacgtaatccatatgccataccaccggctccacatgtttcctgtccgatctttccatgagctagtggaatatgttcatcctctcttctcattggaagaccaccagcacgcatctgcatgaaaatgaagtccatatcctgatatgcctctgctggatctgttgtgtaggaaaaatctaattcgggatatctttcactgaacatgatatctccatactgaccgatcggtttctgtctttccccatcgatatcaaataagacaagtttatttaatggaaactcttcctgcatacgagcaaatgattttaaaaatccaagtgtatatgtgcttcctccgcctacgatacatacgttatattttttcatttttaacttctccttgtgattgcttttataaacttctttgttataactttcgtgaatgatccggccagatttatttacgaatttgggtttttgtttgcatctcttgtttacagttattactatagctgaaacagttttaattgtaaatatttttactgattgtaggtttgtatgttgaacattgttatttattacattttgcgtaatgttttacatgtataatcaaaaccaccggcttagccggtggtttgtactagccctataagggcttattaccgacgctaagtctaaagacccatcgaatttggttcgccaactgtaccgtcatttacttattaagccctacggggcttattttatttattttggtttactggctcacccgtaaacgggtcaatatactcttttaatgtcatctaatcatactctaaatcattttgtaactgattttgaatatattcttatatcttctttgcatttttccctacagtatctacgtaatatcctctgcaccagaaatggcgatttccatat

SEQ ID NO: 738 - DNA, 302 bp, Unknown
  gut microbiota DNA sequence
agcacccgaaaaaacatcaaaaaaagacataaaaacatagagaaaaaaattagaagccttgcatcagagaccatcctgatgcagggctttttcagtcctgaaagaagagaaaaaaagaaaccttaaagaaatccacacccgaagaaaatgcagtaaataagctgtttccagccgctctgagagaaaagttacaaaagaatcttatcaaaagtatgcctgaaaagaacctggtgttgtatgcatcgctgagagaaaaaggcagaaagaaaaaagtaaaaatagtgcagtatcacggaagggtc

SEQ ID NO: 739 - DNA, 9605 bp, Unknown
  gut microbiota DNA sequence
gcattaagtcatttccttcagaatcatagatcttgttccaccatccgaagtggtttaatccatagtatccgtactgcatttcttttctggattttaatccgaccatgtttgccatcttttccattaagtcgatcggcatatcacagatatttaagatcttggaatctggtcttaatcttcttgttgcttctgcaacgatcgctgctgggtttgagtagtttaacatccatgcgtttggtgaatatttttccatgtaatcaaggatctcaataactccaccgatggaacgcattccgtaagcgattcctcctggtccgcatgtttcctgtccgagtactccgtattttagagggatcttctcatctttttcacgcattgcgtattttccgacacggatatgtgctaatacgaagtcaatgtctgtgaacgctgtttctgggtctgttgtataatcaaatgctacttctggtgcattttcctttaaatagatctcacatgcttttgcaactgtttcctgtctctctgcatcgttatcataaaacttgatggaacgaattgggaatctgtccatatgatctaaaagcatcaatacgatacctggtgtaaatgtacttccaccacctgcaactgtgattgaatattttttctttgccatttcttctttcctccgaatttatactaatgattataataatgtttcaaatacttctctgatactaggaacttttaatccaatgataacctgatatgcttttccattgatagaacatccatgtgttccgattgctttgaaataaggatcgtctttacataatgtttcatcttttacgttgacacgtaatctggttgcacagtttgttacatcaacaatgttgtcttttcctccaagtccttcaaggatcagttcgcataactcaagcttaggatctcctgcgtttccacctttttctgcctgtttgtttctgaatttttcttttgatccaaattcgatctctgcttcgtcttcacgtcctggtgttttgaaatcaaattttaagatcaggaatctgaatactacaaaccagatagctgtaaagatcagaccaataaccaattctaataaatactgctgccagtgatttctcattaatggaatcaagttcagtgatgcgatctcgatcagaccacctgagttgataccaacgattcctgcaagccacatggttgttgccagtgttgctgctaaaaatgcatgaactacgaataacataggtgctacgaataagaatgtaaattcaattggttctgtaactccacatacgatcgctgttaatgtgataggtaataacagtgcaaatacttttttctttttctctggttttgctgtgctgtagaatgctaatgctgctccaagacatccgaacatttttgcaaatccacttgctgtaaatcctgcttctggacagaaagattttaaagatgctgtagatgctgcgatctgtggtaataattttgcccagtaagcatataatccgccaggtacaacaacgttatcatagtaaaatggtgagtataacagatgatgtaatccaaatgggatcagtgctctttcaaggaagttaaatacaaagattccgatagctcctgcactctttacaaatccctggaatgctgtgattcctaactgaacttttggccagaaggcacatgctaatactgcaactgggatcattacgaagaatccgatcatgaatacgaatgttgatcctgagaatgaaccaagccattcaggaagttctgtatcaaaaaatctgttatgtagataaattacgattccggatactgctaaagctccaaccatacccatatctaatgttttgatacttgcgatcattgcaagtccgcttgttccaccgacttccgcattcatgttaactccgaatactccaccccactgagttaagatcgtgtttacaaaataatggaacgtcatatataaaactaatgcttccatgcaacatcttgcattttgtttctttgccattccgattggcaatgatactgcgaataacaatggtaactggttaaatactgtccatccaccttgtagaaatacgttccagcatttgtaccacatgcttgttggtgctgccagacctcccatgatcgcctgtgttgtaaacagagtacctattcctactgagatacctgcaaatgcgaacagaagtactggtgtaaacatcgcacctccaaatttttgaatcttctgcatcatttttcaaatcactccttttcaaaagtttatccatacaattctttgatttatcttgttttaaataccggtatttcttaactacaagccaatcataacaggatggtaaatttttctcaatagattgtacgtctttagaaacagtgcacattactttatgatttttcacattttgtgtgatttatcacgcttgcttgtaaagcacgtatttaagccattttttgtgcctttttattcgattggattgctaaaaagtgaaaaaaggaaccaaatgtgaaacttgttcacaactggttcctctttgtatatttccctaaaactttattcacctcgtacttctgcaaatacctcttccagttcatttaataaatctttgacattctcaattccgacagacattcttaacacacaatccgtgatcccgttttgtttgcggatatgttctggaacatctgcatgtgtctgtgtcattggatatgtgatcagtgtttccaccccaccaaggctttctgcgtatttgatcattcttactttttcaaggatattgatcgcatattctttcttcgtaagttcaaatgtaagcattgcaccaaatcctcttgcctgctttttcatgatctcgtatcccggatgttctttgaatcctggataaacaactttctttacgatatcctgttcttttaaccattttgcgatctcgatcgcattttcctgtgcacggtccatgcggactcctaaggttttgatccctctctggatcaggaaacagtcaaatggtgctaatccagctcctgttgtcttgatcagaaagcgaaatctttcgctgatatcttctctgtttgtaactaagaatccagccagtgtatcgttgtggcctccaagatattttgttccgctgtgtacaacaatatctgctccgagatctaatggattctggaaatatggagataaaaatgtattgtcaacaatcagaaggatgttatgtttctttgtgatctcagctaatgctttgatatctgtgacgttcatcattgggttggttggtgtctcgatataaactgcttttgtattttctctgatatatgctgcaacattttccttgtggcagtctacactggaaaattcgattccgtttttctcagatacatgattaaatagacggatgctgccgccatataaatctgcatccacgatcagatgatcgcccggtttgaataattccatcatcaatgtgatcgctgccattcctgatgaaaatgccaatgcatcgattccattttccagagaagcaactgtcttctccagatgttctctcgttggattctgcagacggctgtaatcataacctgtgctttgtccgactcctggatgtgcgtatgttgctgactgatagattgggtaactgatcgcaccatagtggttgatcgaattttcttcctcttctaaatgaatacattttgtctctatttctcttgccatatatatctcctgtttcatcctatgttttattctatctcaaatctgttctatccaaaaaaatgtaagaacatcatataactcactgttccaagtaaaatgctgatcagcgtattatgtttccatttgtaactgactgcagtgattgctgctgcgatcagtttccataaaccatctgccataaagtcatccccgacatctttcaggcaatacacgatcagtactgccatgatcgaagatggcaacaccattcctaatctttttatctgatctggaagctcttttccttcctgaaatacaagaaaagggagggctcgaagtccaaatgtgatcacggcagaaacgaaaatcgcgatcaatgccatttttgtgttcattattttcccctttctgtctaaacttcctgttgtttgctattccagaagattaaaactcctgaaacgatcaccaatgctggcagcataaatgcggtctgtccaaagatcagtaatgcgatcactgcgatcagaattcctgtgattgctggaaaatgcttgtccgctttctcccattgatcgataaaaatgatgataaataatgcagtcatgcaaaaatcgattccattgagttcaaacgggatcagctgcccgatcagaccgcccatcactgctccaaacatccagtaacatctgctgaagaatgcaacgagaaacatctcttttctgctgttttcatctttgtcttcgatcgtgcagtttactgcatatgtttcatctgtcatcgtatggatcatataaagtttctttcttcccatcttacggaatgtctccaaaaatgaaaggctgtagaaactctgtctgctgttcatcaacaatgccgtcactgcgatcgtaacgatcgatgccccactgcttaaaaatgtgatcaggacaaactgaaaagctcctgtatacacggtaaggcttgtaagaagcgaataataccacgcaaatcctgcattctccatcatcattccatatgccatactgacaaatacataactgcacatgatcggtatggatttcataaatgcttgttttgttacactttttacgccttgcataaatccttcactacttcccctgcgatgatcagtcctgcgacggatggtacaaatgctgtactgcctggaatcgctcttttctctgtacatttgtgctgtgctcctggagggcagatacagtttgttctgtagctgtttgccatatcatcttttggtttgatcggcatttcttctgaatatacaacttttaatttcttaactcttctcttctttaattctcttcgcataacctttgcaagagggcatacttttgtcttatagatatctgccactttaaactggcttggatctaatttatttccagctcccatactgctgatgatcggtacattcttttcctttgctgccataactaatgagatttttgctgtcactgtgtcaacagcatcaacgatgtagtcatattcctcaaatggaaattcctctgcattttcaggtaagaagaagcatttgtgaacgttgactttcgcatctggattgatctctaagatacggtctctcatcacttctactttgtattttccgattgtttttcttgttgcgatgatctggcggtttaggtttgttaagcagactttatcatcatcaataaggtcgaactcaccgacaccgcttcgtactaaggcttcacatacatatccaccaacaccaccgattccaaagacagcaactctgctgcctgctaatttatcaagtgcttcttttccaagtaatagttctgttcttgaaaactgatttaacatttctttctccttttatttagaataaaaaagcggatgcttagcatttctattcttgttatgctgcgcttccgctggtatttttgtatttcctactatttctattggttttattatatgcaaacgatgattggatgtcaagactggtgttgttatttttatgtgtcaacaaacgattgttaaactccttacaaattcaacattttgtagatttcttctttctctgcctctggattctcttttattaatgtataaataggttcaattactatcgtatcttcttctgattcttctgcaatctgtggcaaagttttatttttcaaaattttcttttgaactaatgaaattaattttaatatttctccttccttacgtccaatcctctgtgcactttgtatctgacttgctctgtcactctctgccatctcttctctcagatacaaatatctttccctctcatcctgactgatctttatcatctcttccagcgccctttccatatacttattaccttttgattcctgttccaattcttcccatgtctgtgcagctatcaactttgcccatcgatataatggttttttcttttgtttctcttttacgtactttagtttcttcaattctatcatatgaaattgaaattttctactatatatctctttggttttttcatccatcagactaaatttatggtaataattcggacttatcatttgattaaaatttaaaataccaacatgaatacatggtggaatttctccataaggatgtcctttttttaatccatctgtaaacattcgacaattataaaaaaggcttctctctgtccaatcatcttgataggtgttttgcatttcaatgttaatctttctgttttgatttaaaatcaatttgatgtccagaattccttctttttcttcatcattttctcccagtgtaaatggatctgtaatttcaatttttttgatttcatattcttttaaatccagcaatgccattagaaatccttttacaattttagtatttttaaatattttttgaaatgcataattgtttgttagttttactgttattttttcatcactaatcgctctgatctttaattgttcatcattgattttattttttagcttttctgtcatatgtatctccttatgttttttttatttacatggatttattttacattattatacatttatttacaatatgtttttacattttattccatatattttaaattcttatttgtaaaacaaaaataaggatatgagtgtgaattcattttcacgctcatatcctcatttctcgtaatcatttcaaaaaattcgatcatctatgataacatattatctcagaaaaaagctactgatatatccatccttccaagatcctttgaaagagattttactgcttgcttctaaatgcattttttctccatcaaatttatatttatagatactatcattacttagtatatacaaatagtcctcttttgtttgacattgaattacattatgcttgaatttataaactttgctttctcctgtttgtgggtttaacaatgaaattgcttttcccattccactggttagatcacagtgtgtaacaaacaatttatttttatatggtaaaatttgctgtggatttatttcttttaatttgagcttgctgatcttgtctttttttaaatccatcttatacaagattttgtctgtatttcctgaagaaaaatagagatttttatcatctgaatagaaaaacacggattcatcttcgctgtgatttacctttatttcttttaccttctttaatgttttccgattaatcttcattaaataattaatcgttccttctttctgatcgacctgtttttctacataaacataattccctgcacaatgtaaatatccaaacattccaacagattcttcatatcgctgtatcttccccgtctcttcgttatattttgtcagagtcgatacaccgtttatccagtttgttgtatagatatcaccatccttctcatcaaaagcaaaaagtcccggccgtcctattttatataactttattttttgtatattatgatcaagctccattacttcttcccgctcatttacatatggaactccttttgggatcatatacactttatcattcactgtctttggaatatcatactgactcgcaatatttccgatcttcaacttcttttgtcctgttttttgaagttcgtcattataatataaaatattgcttttatctttattccctattgagataatgactccaagttgataggaattattttgttctggtttgtaaaaatatatgacagccgatacaatgattagaatacttattagaattatgcttcgttttttcttcatatcaaatttctcctatttttcatatatcttataggtcttacttgtagctactaattctgttggatgaattgcatctccaaaagcatctgtatttaaatctattttgtataaatccttataccctgcccaaactaactgtgaacaataaaattttttgcgtgtctttacatccaaataattataattatatggctttcctatcctttttttacaccaatcagcaaccttttcatcatcttcttgttccgttgattttactgttactccgtaacatgtcgtttttgttttattccaatcgtttttaccttttacaactcctttagataacgattctataactgaagtttttgtataaataattgctgcatgccctgtaggaattagatctttatatttatcttttgtaactaaaataaccccctttcttgttggataaactcctgttggccgtctctctgcttttatattctcacttccatcataactcttgtcttgaaaaattctcttaccttctattttgctctcaacctcttctaatgtctgttgatcaaatattgcttctccattatctgctttaacttgataattcataaatatcattgctgtgctcattaataataatccaaaaactattttctgtttaatcttaaacatatttattcctcctcatatcatacaaatcacttttctatctattagttatatttttgttaatataagaacccatataatacaatacttttttaagtagtttttctatgtattatgaattatgcattagcctcatttatcacaaaacattatatgaacttatttttaatgttggatattaaaaatatttttattacattcttgatttcccaacacttttactgtaatattttaatatccatgtgatacgactatctgttaccagatagatggctccacccattgtatgacatggatttttcatattcttaaatcaactagccttgttttttctcattgattatatcaattacaatactcaaaaccaaatacaataaaaatagaactatatcctgcactataatttcttgtcttgtatacggaatatatttttgtgagctacttaaaaaggtaacaattcctagaaatattaccaattgaattatatttttacgaaatgtttttaatcgcaatttttttttcatccttttgctcctttctcttaaccaacaacatatcttactttattcatactcattactgatttatgaattttataatatacttttattcctttctttttataataagctttatgaaccgccttctctaaagctgaatatcctccataggatgatgccaaggaaactgctgaaagcccccatccacatccaggtactgctgatatcattagagaaattgctgttgttgcaacttttgtcttttttaacccctctttatacaaatactttactcctgaatattttatatatccacattcaacttctggatagtaagcgctattagcttttctaactttacttcccatgttatcattagaattacaaaccctgcaaattattgctatcgctgcggttattcttttaaacttctcatgactatacctcctcgtataatatcttttagatacataaatacatgtatctagttaccaaataaatattgttcaataggct

SEQ ID NO: 740 - DNA, 783 bp, Unknown
  gut microbiota DNA sequence
atacagtgacagatatcattgaatatctgaaacagacaaaatcgtacggaaaatttatcacacagatggatgaatcactgtatcacagaggtaatatcgaaaaagtcctgatccagtcattatatgatgattacacaagactttatcgtttcgcagatatgcagcaaaaagattttttaaagatctttatgaagcggtatgaagtagatttggttcgatattgcttaagaattgtatttaatcacagtaatgtaccatttgatctgaattacaaaaagccattttttgataaatattcaaagatacggattgaccagctagtgacggcaaagaatattgatcatctggtagattacctgaagaatacagaatattacgcaccactgtcaagaatccgacagtcaggggcatcgacattagcggattatgaactggcattggatttatattatttttctatgatgtggaaagaacgtaagggaaattgggataaaaaagataaggaaatgctgactaaagaattaggagcaaagatcgatctattaaatcttcaatggatttaccgagcaaagaaatattaccatatgctcgcaccagatatttacacattgttaattccgattcaacataaactttcgaatcaggaatttaaagatctggtcgaagcgccatcagtggaagaattcaaaagaagattaaatgaaacttattacggaaaaaaatatgagttcggagaacaggtgcagattgagagtattgtgaatgaatgtgtggaacatatct

SEQ ID NO: 741 - DNA, 437 bp, Unknown
  gut microbiota DNA sequence
catggatattacaatataaagaacgagaatctagtatggtaaccgagtattatcgaaaaggaagtttacaatatgatataataacaggtaattatgtttttgctagaataaaagtgttatttggagaaaatgtgaatgagatagataaaaaaaataatacaacaccattagaaacagcattaatgtcaatgtcgtatcctgatcggtttataaaaatgttagtaaaaaatggagcaaatttaaataaagagggacatgaacttctatcagaatatatttattatttcgggcaacaagattgtaataagatgataaaatatttattaaataaaggtgcagatccagataaaaatgcattagtagtagcagtaacaaaaaataattatgacttagtgcaaatactcttaaaaaacggagcggatgtaaatcaaaaaaat

SEQ ID NO: 742 - DNA, 8007 bp, Unknown
  gut microbiota DNA sequence
tttgttcatcaaagttccgtttctcttctgagaaactccactgtgctgaacaggcttaaagcctaacaatgataaaaggaatgttgcacgaatgcaacattcctttttgttaacgataaatattctcaaattgtattttaagcttctactttagcgatttttactaatcgacttgttccaaggcggtctgccccaagttcgataaatttcttagcatcatcaaaggaactgattcctcctgctgctttgatctttacattttctccaacatatttcttaaataaagcaatatcgtcaaatgttgctcctgatgttgagaatcctgtagatgttttgatgaaatctgctcctgcttctgttacgatctcacacatcttaatcttttcttcttctgttaacagacatgtttcgataataacttttaatattttatctccacatgcgctctttaataacgcaatttcgcctttgatcttatcgaaatgtttatctttgacatctcctaagttgatgaccatatcaatttcatctgcaccatttaatatagcatcttttgtttcatattctttgactgctgttgtactatatccatttgggaatccgatcactgtacagattgccattttcccatcaacataatcttttgctctttttacataagatgctggaatacatacagatgctgtctggaatttgatcgcatcatcgcatatttctttaatttcttcccaagttgctgtctgggctaatagtgtgtgatcaacagttttaaagatatcttctcttgtcataatgatttcccttcttttgaagttcgcttgttacttttgttaattgtggtatggaggattgtgctcctaatgtctgcacggaaatcgcagacgccatagagcttatttttaatacatcataaaaatccaattgctgcttgatcgcatatgcaaatgcaccatgaaaaatgtcccctgcaccatttgtatcgactgcttttactttaaatgctggcatcaatgtgatctttccatctctacgatataataatcctttttctcccagtgtgaccactgcatgcttatgattgatctgttctacttcttcaaagatttcacatgctttctttggatcattaagattgattgtctttcctgtatattgtcttgcaaaatcttcagaacataccagataatctacttcttttgctacctgcattgtactttctctgcatgtccctgcatctacgattgaaatggcactcttataatgatgaattgcctccacactgatctctggttcgtgtccatcacttaagataacagagacttcttcatccggatatgtatattcaacgtcttttttctcacctgggaaattaaataacgttcttgatccattttcctgatttgaaaaaatataactatgcggtgtttcaatctcatcatccttgatcagataattggttccgattccagcctgtgcagcaatttctaacaatcgtttcccgtaagtatcgtttccgatccggctgatcaattctactttttctccccacattgcacacagatatgcagcattaaatgcaggtccgcctccacattcttctttttgtgtcacgcggtatttttgattctcacagatcgcgccgtcaagcggaatcgtgatatcatatgctgactgtccgatacaaaaaatacttcccatctgtttctcctttattcttctacaagatcacataattctttgatcaatgctgggtaatcaatcttcgaaaaatctgttacatcaacttcgatcagatgtcccagttcaaatgttccgtatccacggttcttgcaacgatccataaaaatatcataggttacaagacaatctgccttgcttctgtcttctagtacatcacctttatgataacgtgataccagatgacttaaatgtctctttggatccaaatctctcttttgtgaacgcttaaataaaacttctagatctccgatcaagcggaatgttacaacttgatattcatatttctctgcaagatttttaatcttgtctttctgttttacactgaatgggtaatctgaaataatggaatccccattcttaagatcttcttccataacttcatagtactgttcccagctctgattttcaatggctactttttcttccatattatcaaatccatactggtcaaataatttttctttcatatcatcctgagatacgatcaaaaagtctggaagtttttctaatattttattacaaagataactttttcctgttgccgggtatcctgcaagcaatacgatcgtttttttcatgcttatttcctccgctcaaatgatagatatttttctaaaaagttaaatgcggcagggattcattcctccctgccgcacctgatgaattatataatataagagggttatttaaactttttaatcctataatttaaataatgaagccttatctataacaatttctttgattctttcatttgctggtcctaacagatttcttaaagatgtcagtggtgttacatcatcagctgtgaatgttttgctgacaacttcaatatagtttttatttaattctgttcccacgttgatctttttcattccttcacgtacacaacgtttcatatcttcatcagatactcctgttcctccatgaagaactaatccaacaggtcctaatttagcttttaattctgttaataattcataattgatcttagctttagatttgaactgaccatgtgttgtaccaatagatactgctaatgcatctacatgtgtttcattaacataatgaagtgcatcttctggttttgtatacatcgcagcgtctttttctactacaacaccttcttcagctccaccgatagatccgatttcaccttctacagatactccatgtgcatgagcatattctacaacttcttgtgtatttttgatattttcttcaattggtaatgcagatccatcatacattacagaagaatatccaagatcgattgcttttttcagtgcttcaacgcttttacaatgatccatatgaagagctacatttacagaagatttttctgccaaagcttttacagctgcgattaatggttcaaaaccaatatattcagctgttccaagagaagtctggataatgattggaacgttcagttcttctgctgcttgaatcattgctggaagcatttcaaaacaatgtaagttgaatgctcctactgctcctttaccttcattttctttaaataattcaatcaaatttttatacatttctttactcctttaattttgccttatacgttgcgaatgaattatatgtttgcaaggaggaatttcctccccgtaaatgttatgcatttcctcggatcatatcctttgacatctgcatcaggttctgaaccttatccatatattcctttactttttcatcatctttcgcttctgcagcttcttgacgttttttattgtaaagtttcattagatctgtgctcgcttttccgtgctgcttgcaaagttccaagctttcttcataatattggattgccagatctgtttcttctgcttgtgtatacagggatccgatttcgtttaataatgaaactctctcatcccctgttttactttctaattctgttactttttctgaagctttcgcgatcaattcctctttatttacaacaggaactgcctgctcttgcttcttttctttcttctttttaccaaagaaaaacattgatcatccctcctgtataactttctataatgatcttttgctttctaatcttagaagattcctgcgatagatttaatgatcatgaagaagaatcctgttactacagtatctacgtctgtacatgtcatgttctggaatccaatctgtccaagcattggggaaagtaaagctggtaagatcatgatgaagataccatgtgcaatacatccaataatcgttccgcgacgtccaccaacctggttagcaaagataccagctgtaccacctgcgaagaagttactcataactccaggtaagatcattggtaatccaagcattggtgttaagaacataccgatgatagatccgattgttgtaaagatgaatcctaagattactgcgtttggtgcatatgggaataatactgggcagtctaaggctggttttgaatttggaaccagtttcatagagattccctggaaagctggtactaattcagctaacagtaaacgaacaccggccattaatacgtataaacctgttacaaactgtaatgcctgtaagaacatgaatacgatgtagtttgtagctcctgcatattcagcacatgctttaggtcctgcaaagattgctacgatcaagtaaaatggcaccataactaccattactgataaatatgtatcctgtaagaattcaagactcttaggtaatgcaacatcttctgttgatttagatttatcacctgttaatttagcaattaatgctgtgaacatatatccaaatgtacagaaatgtcctaatgcgatatcatcactaccggtgatctgccgcataactggctgtgcgaatgctggcattaatgttgcaaatgcaccaccaacgattgatcctatgatgatcaatggaagtcctcttaatccacagaagtaagcaaatactacgcaaagtgtagattcccataataaagcctgtcctgttaagaagatgtacttaaatggtgtaatacgagctaaaataatattaacaataaagatacctgctaatgtgatagcgatctctgatccaagtccaaggtctgtcattgcctgaccgttaataccttcgatagatgctacaagacccttaagtccaaaagccttattaaacagatcaccaaaaatagctaatgatccctggataacgcttgaacctgcggataatactaagaatcctaagatagttttcattgttcctgatacaacagtaccaattggttttttctgtaacactaaaccaagcagtgcgatcagtcctacgacaacagctgcctgtgtcaggatgttcttaatgataaaatttaaaacctgcattttttctcctcactttctattttgctagttttataaaactccaagatcttttaaaaccggtgtcagtttttctttgatctcatttttatcgaccaatcgatcgagaaaaattgttggacagtccagtgtataacgctcaaactgtttctcaaagttctttcctgaaagaatgatgtcagcctttgctccccctacactagagatgtctgtatggtcaagttttgcctccacacccagttcctttaatacggcgtctacactcatctgacatgcaaaactgcttcccagtcctgctccgcatactgttaaaatctgtaacatagttttgtctcctttcttttttaaaactatttctctttgatcacttcaagtaactcttcataagtcgttgctttagctatatcatcaatgagtccgcgctctacaaactcaacgatcatcttaagaatatccatgtggctttcactgtctactgctgaaaaacagatcataacttttacttcactgtcatctccatcaaattttactggctgatccagtgtgatcagactacaaccaatcccaatagctccctgttctggtcttgtgtgcggcattgcgattccatctgcaatgacaatataaggccctaattctttgacagaagcaatgataccatcaacataagattgttttgcacatccttgttctacaagcattcctgccccaattctaaccgcttcttcccaatcagaagcttttaccttcaatttaacgttgtctttatttaatactagtgattccataatatttccttcctattcatttctttccaaatgacaaataaaatcatcataatctttatctttgattaattttgtaaccccttgatcaccaatcagatattgatataatcgtttaaatacaacttcccacatattgtattgtgactttggtacattgagtaaaagtacaacctgcactttttcattttcccagaggattggtttctttaagatcataacggatacgactgcctcttcagagtcatttgacattgcatgcggtattgctaccatattgcccagttctgtcgtcgacatttcttctcttttaaatacggatttacttccttctttactgatcaatcctcgtatctgcatctctcttgtcatatgttcaagaatttcttctttattcttaaattccacatcatagaaaaataattcttttcggaaaatctttcgataatcaatttcatctttttgatcttcttttaaaatatttcctatgaactgaatatctgtttcatccagaaataggtttattttctttattttgtcagatcgaagttctgaaagttccgccgttgtcaatacaagatccacctgatcaatcaactcttgacttacttcctgttgtgaacatgttttgatcacttcaattttatgtccaaaattctgttcaatcttttctttgatcagcatcgctgttgcaactcctgcatagcacacgataattgctttctttcttggctttttctcattaagcccttttctttccaaagctgctccaaaatgcatcgccaagaaaccaatttcattttcctgtgtcctaaactggaaattctcctcaatgatctctcctgcgatcactgcaagttcaaatgctagtggatacatattcttgatcgaatctaaaaattcatttcgaatattcatgtcaaaccgcattctctgaagtgccgcactcaagtgcattgccaatccattaatcagttgtttatcatcggaaagatcaatatttgtctcttccttgatctttatcagaattttttcaatttcgtttttgtattcataatcttcttttggatcatcaatcaaaaatctctgacttgagatcaagtgctgtgtcaaataataaacttcatttccaagatctacttcaaattctttctgaattcgtttgatgatctcctgcgcacattcaaattcaactttcttttcaaatgctttgatatcattttcttcatatgtcacactcttttgccttgcaaagcgttttaacatgatcagactatgaatcaaaacgttcttaaatgccagatctgtaagtcttaaattataaaccgaaattacatcaagtaaaatttctcttaatttttcaatttcctgttctttaaaaatactttgataaaattgattttcttctattccaaaataccctttgctgttaaagatatattctgaaatacaatatcgtatcttcgcctcatctcctacgatcttcacaccatctttctttgtgatactggttttaagatcgtaaggttttaaaactttatcgatattgcgaaagtctttctttaaagtagaagtactaatgaaaagttcttcttccagatcaaaaaactctattttttcttttcttccattgagtgtcgacagcaataactttgaaataatatactttactctgtcttctggctctgatggaataatatttttaaaatctttttctcttttatgctcttccatctcattctgaaatgctaaaaatttttcctgatcttcaatctttaaataatatccttgtccaatctctgatacaacgcttgcaccatgatcttccaatgctctatttaaatctttcatatcatttcgaatggttcttgaagacactccgattgcaactgcaagattatctcctgtcatacattctttatttttcaacaataatttcagaatctggatacatcgtttgtttgatatttccattacttttctccttctgtactaaattatatgcaatatgcacataagaatatagttcgtctttttccacttaaggcggaaaaaaaagacgaaatttccgccttttatctttagctaaaatttcgtctttcacattataagcaaaacgaaggggggaacgtttgttcccccccccc

SEQ ID NO: 743 - DNA, 16664 bp, Unknown
  gut microbiota DNA sequence
tacaatagtccaaacttctctgtggctgtcttttcaataaattcttttgtcttgatatattcttttttcttctttaattcttttttcttctcttcttgtttcttgatctgggattccacctgctgctgctctttggcgatcttctttgatttctgtcgtagattgatataggaaaatgctaaaatgactacaaatatcagaacaatgatcatgatgatctttgtcctctgatccagcttattttgtttctttcgtattgtcacttttaccacctctttttatttgtttctttagtgccattgtaacttgttttttttcttttttcaattgccatttcaggtttctcttgatatgaattcctggtcttaaacatactttttcaaattgccttatgatcttctttagcttctctgtaatatgtatgacagccctcaaaaggaacttgctgcataattgataatatagaatcattccgatcacaattccgaggaaaaagaatcctcttaactcgccatcgttatatgtacaaagaaatataaatgccatcactgctgtaaatattccaaatcctatatcttctataaacaaaaacacgcttttatgatagaatactcttcgaattccacgaataatatcatatattgcatgcaaacatacaccaaataaaattgacacaagaaaaaataacaacggatcagttacagtctctttcattatttcagtaaccttcctaataatccttctttctttcctggctcttctatattagagtataaaaaactgtcaatctttcccgtaatctctacttcacccttctcaaccagtaatttctttacatggagattctttcccttgatcattaacagtccttgatctgtgtcaagaatgatctcattaagatcaaaggaaacaacatcttttacccctgtgatcacgccaagagatcggtttgataagctgatcttatgtgctcttaaaggttgtctctcttctatcatactaaacttcctcccaaaatgttttatacatcttatgaacaaagcttataaaacatacctataaaaacttgtacagatctgctgcctcatctttcttcactgtctctgctatagaaactacttctactgctgtctctctgtttccaaactggatatctattctgtctcctggtttcacattcgttccagctttcgctgctttgccgttcactagaactcttcctgcactacaggcctcattcgcaacagttcttctcttgatcagtctggatacttttaaaaacttgtctaaacgcatgattatgtctccttctttcttctatgttatattgctgaaatagatatagaaaaactgccggatccatagaaaccggcagttaatgtaatatcaaatgaacattctattcgtttacaatatcttttaaagcttttcctgctttgaatttaggtgctttagaagctgcaatgtgcataacttctccgctgcgagggtttcttccttctcttgcagctctttcagatacttcaaaagttccgaatcctactaactggatcttctcacctttctttaattcttctgcaactacatctgtaaaagcttttaatgccttttctgcatcttttttagacaattctgttttctttgcaattgctgcaactaattctgtcttgttcattaaattttcctcctaatctcaactcaaacataattgtatatgtctttgaatttgcataagataattctataggctttcatcatctaagtcaagtaaaaacttcaaataaaccacgtttttatgctgttttcaggctttttctttcgcttttttatggaactgtgttataatgtgtgaaaacgacaaaaatcaacgattaagtgtctgacaaatctaaaaattaagaaagaggataaatatgattcaattaggaaaatttcaagatttatatattgtgaagaaaaaggagtttggtgtttatgtcaatgaccaaaaggatgtaactgaaggaagtatccttcttcctgccaaacaagttccagatggtgcaaggatcggtgatcagatttcatgttttgtttataaggactctgaggatcgcccaattgctaccgttcatattccaaagatcacattaggtgcgatccgccctctacgtgtcaaagaagttagcaagattggtgctttccttgactggggactagaaaaagatctgtttcttccatttaaagaacagttaggacatatccgtccaaataaagaatatctggtttctctttatattgataagagtgatcgtctttgtgcaacaatgaagattggtaaattattatcgacagatcatcattttaaagtcaacgattgggtgcatgccactgtttataatatcaaccctgatcatggtgcttttgttgctgtagaagatcagttccttggacgtatcccaaaacgcgagattcacaataaaatcgtaattggtgaacagcttaaccttcgtgttacaaaggtgaatgaagatggtaaattatccctaagccctcatgagaaagcttaccttcagattgatcgtgatgcgaaattaatcatggataccattgaaagctatgatggccgtcttccatttaatgataaggcgagacctgctacgatcgaacgtgagcttggacttagcaaggctgcttttaaacgtgcagttggacgcctgttaaaggacggactgatcacgatcacagacaatggaatcttaaaaaaatagcgaggtaactccatgaaatatatcaaatccgctggctgcttcagcctgttttatgtgatcttgtattttatactttccactggaatggggatttttattaccaacacatatctttttactactttattttatggtattttactcattgccgcttttctttatcttaagatctgtggagatgatacaaagaagacattacgaatgcataagatccatattggttcattttttctcgtgatccttcttgcctttacgatccgtccggttgcagggtttattactatgatcgccaatttgttttttcaagatgttacaaccaacactatgacacagaaagtgatgcagagtcttggattatcagtttttacaaccgctttccttccaggtcttgtggaagagatactgttccgtggagtactttattccagactgcgaaaagctaatcccatcaaaggaatcttattatctgctttgctttttggtatagctcatatgaactttcagcagttttcctatgcattctttttgggtatcgtatttggatgcttattagaagcaacggattccatttttgcaaccataactgctcacatgatttttaatggatcttccatccttttaacttatgcaatatcaaaagtttcactttttggtgtaaacaatcttgatactgcaaatacagtaacgatatcttcgatcattgcatccattcctgttgcattgatcggacttatccttagtatctttctgctcgttgcgattgcttatctgaatggacggctcggctatataaaaacatggtttcagaaagatatccgacagacctggccaaagaaacgtgttacaaacatctctttctgggctgcatttattgtttgttttctcttttcgatcatgatggagattacatcatcttttctttaaaccaaaagaacttcagaatatgctatttctttcatattctgaagttcttttattctttgtaattcttgtctaccaaataataattcagatcacaataccccattcctgtattagccccatttataacagctctgcttgtatactgccacatatcataagaaaatgggattgctggtgcggatgctttcgtataatgtgccacccagatcttatattctctgatcttactatattcaaaataatttcgaagtgctgaagctcccgaataaaccataggctcaaatcctgctttctttatctcatcacaaaatgttgtcgtgactgctgtcacattacgtcttcctgtctgaaataccgcttcttcttcgatatcaaatgccactgggagatctaaatctgtcggatcgattccctgctctttgaggagttttaagcagtgtctggcttctttttttgcatcactggttgtcttcgcataagaataataataaacgcctctgtgaattgatgcatatcctgcattgcggaaattggtatcaaatttactgtctttccttcctgctctcttctcattcatccctgaaccgatcttgatcatcgcatgattgacattatggtctttgaccttcttccaattgactgtcccgttataggatgatatgtcgatcaccttgatccggcctttttctacttgtgtcttgatcggcagaccgatattctgtacgatccatataaagatcactgcaaaaaagattaaaactccacagatcatctttaattcttttttattcttctttgtcagtttcatttttttcatcttgatctaacactttctatcatccttgtcattcttccactgcatgtacatatgtcctattatcatctctttcataactgcatgtcacaaatgtataaatacgatcgatcttcttatcatccagcttgatcgatggttcactcattctccgaatctttgtgatatattctttcttctgcgtttcatttgcaaatgtgatcggcatctgatcctgtgctttcaccgcataagcactgattactttcaaatgcattgtcttctttggagtatataaaatgatcacatgatgtttctttagaaaggattcttctctgaattttagcagcttggcaaacatcgttccatttttcatatggtgtccgtaaatgatattattatctgagataaacgacttatcacatccgtaatctaaaaagatcgtccctgaactgctttttttcttattgtaatccatatgaagatattcttcgttatctttaccttgaacgatcggataatcaattcctgtcccctttgcgtaaacccagccaacaatatctggattctttgcccgaagtttatcaaaatcaatcgttctatctccatttgtcttctttacattgtctttttttatcttttcataagtatctttcgcttctttataagatttataatatccatacagcttataggcgctaatgcaaaatactgcaatacagagcaagagaaagatatgatatagtatctttttcataaccacgattctcccttttcttttactataacagaaaaagtatctgatttcattgattgaaaccaaatactttcttaattttttatgattgatttaattttaaagctctacttcatctcttactcgaaatacgcatcttctctcgatgactccgatctcttcgagtgttgtcatcatgcggtatactgttgccattccaatggaagaatctcgtttgactgcttcgtaatagatctctttgcagcattcccattctccattcaagataacatctagtagaatctttctctgttgtgtgattctcttaccactttgttgtaaagccttctctacttgttcttggcacatgctgttctccaccttgccttgctgttgtatgcatgactgcgggataaagtctatggcatgacactttatctcgcattcatactacataaatgattatactatataaaggtcgttttgatgagttagtctcatctaattacgtatataaggttagcattacctaaccattttgtcaatagtttttcttaatttttttattttttcacggtattttttctcatgtgcttccattgaaaatacacactgtttatgatacaatgataaccaaaataaacatatcttgtagactagatatacaattattagtaaggaggaatctttttgaaaatacaagaatccgctgaaaattatttggaagctattttaattttgaaacaaaacaaagggtctgtaagatccattgatattgctcattatttgaatttctctaaaccaagtgtcagtattgctatgaaaaatcttcgtaattctgatatgatcaccgttgattctgatggtttcatctctttaactgaagctggtcataagattgctgatacgatttttgagcgccatactgttttatctaacatgctgatcaaacttggagttcctgcagaaattgcagctgaagatgcctgccgtatggaacatgtgatcagccctgaaagctttcatgcgatcaaagcacatctgaattctgaagaacatattaaagctctcagcaatcaaaacaaataatttgaaacaaaagcacttttttctgtatattacagatcttaaaagtgcttttttgttttctgatggtttcgataaattcttttcaaacaccgttctttatgaaagtgatataacttcatatcctgcatcttctactgcttttctaagctcaatattacttaattcacgatcatatgaaataattgcttctttatcttttaaagatacttttgctgaagctcctgcaactttattgatcgcatttgtcacattgttgacacagtgttcacaagtcatacctttgatcttcattgttttcgttcccatcacgggaccatctaaatgtttttcttttactttctttacagtacccgatccgccgccacagcaaggactttccccatgcatatgtttctttgtctgtttgatcgcaaaaactgcgataacaataaggatgagtacaataataatatctgccattttatgatacctctttttactttacattatttatttagtaatttacggatcagtttataaagctggtatccgatcaccccgataagatataatccaataaagattgcaaatgcataaaacatagaacctgttgaatttcccattgctgattaccttccttttttcttgactgatgaatccttcacctgaaaactgctgcatcctgagcagcctgcacagttgcctccacatccgccttgtttcttcttctgcacctgtttataaataacaaatgcgcaatatgcaataatcaataacaatatgataatgcttactggattcataatcgtccctcctttatatcatatcttttttatatgaaatttgataagcaagaagccggatgtttacacatccagcccctctattatataccatttcgactatgcctgaacagatctctttgaatatactttctgatctttgtatggatctggtctgaatagcaggaataacattacaagcaataacacgatacctactgctgttcctactgtaaatgctccacctgttgcaaatgtaccgatctgatatacgatcagtgttacaacataagcaaaaatattctggaaaagaatcgcaaaccagaaccattttctagactgcatttcttttgccattgtagagattgctgctaaacatggagagtctaacaggttaaacagtaagaatgaaaatgctgctacagcacttgggaaccaagttcttactgcttctgctactgtgacagcatcttctgatgcatctccagttacgtttgcaagtacacccattgttgatacgatagactcttttgctgagaatcctgataaagaagctgcaacagctttccagttgtcaaatccaagtggtgcaaagattggtgcgatcgctccaccgataactgctaataaactgtttcctggatcttcaacagctccgaatgaaccattgacgaatccatatccacttaagaaccacataacaacacaagctaagaacaggattgttccggctttgatgatgaatccttttaatctttcccatacatgaagtaatactgtcttagcagatgggatatgatactgtggaagttccattacgaatggagctggttttccagagaatggttttgtcttctttaagatgattgctgcaactaatacggctacgataccaatgaagtacatacatggtgccattaatccacctgctttataacttcctgttgcataacttgtcataacaccacccatcatagcgataactggaagtttcgctccacatggaatgaatgttgctgtcataattgtcagtcgtctgtcgttgtcttgttcgatcgtcttagatgccatgataccagggattccacatcctgaagaaatcagtaatggaatgaaggatttacctgataatccgaagtggcggaatacacggtccattacgaacgcaatacgtaccatatatccacagtcttctaagatagacaggaataagaataagattgccatctgaggaacgaatccaaggacagctcctaaaccaccaatgataccattaacgatcagatcctggattgctgcgcttgcaccgattccttctaagaagctttgagcggctggctggatcatctcacctacaaatgtatcatttgtccagtctgttactaatgtaccgatcgttgttacagaaatatagtatacaacaaacatgatcgcgataaagatcggaatacctaagatacggtttgtcacgatacggtcaatcttatcagagatcgttaatttttctccgctcttcttcactgtagtagaaacgatcttctggataaactggtaacgtccatctgttacgatactttccatatcatcgtcttcagctttttcaatctttgttctgttatcttctactacttttgcaccatttcctgaaagtactacgctttctgctactttgctgtcattttccaagaatttaactgcataccatcttctcttatcttcagaaatagatgatggaagtacatttttaacttcagcgatcgctgcctctacgtctttagagaaaatctcttttggcagatctacggtattcttcttcgcaactttgattgcttcttctactacttcatcaagaccttttccttttaatgcggatgtctcaacgattggacagtttaataacatagaaagacgttccacatcaattttgatcccacgtttttctaataaatctgtcatatttaaagcgatgacaactggtacaccagtttcgatcagctgtgttgtcagatataagtttctctcgatgtttgttgcatcaactaagtcgatgataacatctggattttcatttaataagaagtctcggctgactacttcttctaatgtatatggtgaaagagaatagatacctggaaggtcagtgatcgtgatgtcttccccttttctctttccttttaatttaccttcttttttttctacggtaacacctggccagttaccaacatactggttagctcctgtcagggcattgaacatggtagttttaccacagttcgggttacccgcaagtgcgatattaatagccatttcttttttacctccctggggaattgcttccctcttaaataatagcttttcttgatattagatattactaacttttattagatactactaactcttatgtattaagcttctttaactaatacacactgagcatcattctttcttacagaaagttcgtatcctctgactgtaatttcaacaggatctccaagaggagctactttgcggataaaaatttcgcttccttttgtgattcccatatccataatacgacgtttgtaagcaccgtctccatcgatctttgcaactataactgtgcttccaactgctgcgtctcctaaagtcatggtcatatctcctttcttctcaatatttcattgtcttcaaatctatcaagcatctatcaaataaaccgctacgtgacaatttattcctataaacgcaatataacaaacatattaaaccataatatgtctagccatatccttattaattgcaactctggagtctttaatgttcacaatgacatttcctccaattgctgataatacagttacttctgctccttgtacaaaaccaagatttgctaagaatcttcttgtttcttcacttccaccgattctctgaattgtacatgtttctccaattccaaccataatcaaaggcatgatatcttcccctttttctctattattgttagttgtaactatcttttgttagtgtaaactaatttccttttacaatttgttagtatattctaacttcaaaatactgtcaaggggttttttatattttttcgttatgcaatttcacaacgttgctctaaaatttctgttaatgcagcctgactgcttgagtgacttcttactacttcaatatttttattctttgcttcactgacagcacaacgtaccattttgtgtgaaactgtgttcgtaaataatacgactaaatccgggtttccaattttcttattcagacatgatggcatctgtgtaaatatctttgccttgcagttatgcttcttacagattgtttcatactgacgtaccatgcggtcatgtcctccaataattacaatactcattttgtgttccctccttctagatattgtcttgctgtttttaatacagccggacatatgatccatacgcccggctgtttattttcttattctttatttataaattagattgctgccagctgtttacccatggcttttaattcatcctgagcatcttcatctggagcttcctgacagattgcgtcttctccgccaacaacagttgctcctgctccttccatctgctctacccagtttctcatccattctccgtctccccatccgtaagatccgaataatccgattgtttttcctgaagcgaatccgcagacttcttcaacaaatggttccattgttgattcttctaactgttcaactcccatagatgggcatccaagtgcaaatgcttttgcatcttttaaatctgctgcgctgatatcgtctacagaaacaacttttgcctcagctccgccttctttgattccctctgcaacatattctgccatttctgctgtatttcctgttcctgtccaaaatgcaacgattacttcgctcatgacttatcctcctaatgattgtctttcttttttgtttgaatgttttatttttagttaagcatacctaggtacctgataatttgtgtacatgtcgacgagttctttaaaactctttccgtattccacaagtttgaccatctgaaaacgaactttatcgtaaacttcaaagacctttttcgtctgagaaaggttgtcgtaaaccttccagtagctgcaatataaacaattttgtccgttgtttttgataaatccgatcacatcacataatggatatccgagaatcaagccaagttcatgtggaaaatctgcctgccccgctttgtaaagcctgtaacgattcttaagtgtataaaggatattttgaatctgaaaggatgaatagccgcagtgttttaaaaatctttggttttctgaatccatcagatactggttaacttgctgttcacgatacagcagccagagacatttaccatttcctgaatagatcagtccacacttgatatcacttcccgcaagtgactgaattaattcttttgagtcaatatagtcgagagttactgcattggatggctttagccctgcaagcacaggtgcacaatgcatcgccatctgcatctgcatacattttttccattttacatgacttaattctacttgatatctcatcgattcctcctttggttagtcttaactaactatttgcatcatacacctatacgatggatttgtctatagcaaaaaatgagaagatttatcactatattttctgcttttatagtcattaatcttcccatttttatatcttttattctattttcatatccattaatacaatcggtccaaacactttcctatcgtatcaactgatttacacgttccgatgcttctttgatcgctctgccttgttcttctgtaatattttgtggtttgatccgtttcatcgaatgtttcagatcactaattgctgatttcaactctgatctttgttctctggataattcttttttatgctgggctaaatatgcctcacccttataaagcatattttctccctcattataacttcctatcgcatcacgtttttcctgatcttcggattcatatgccttagcatcttccattgctcgttctatgtctttatctgacatgttagaacttgctgtgatcgtaatggactgttcttttcctgtcgcaagatctttggcagatacattcagaattccattgacatcgatatcaaatgttacttcgatctgtggaaccccacgcatggctctcttgatcccttttaatttaaaagttccaaggacctgattgtcccttgccatcgcacgctctccctgcaaaactttgatttctacagttgtctggaaatttgctgctgtcgtaaagatctgactgtaccttgttgggattgtagaatttcggtcgatcaatctagttgcaacgcctccagctgtctcaatggataaggacaacggtgtaacatccattaataaaatctcatttaaccctgcttcccctgcgatctttccaccctgaattgctgcacccagagctacacattcatctggattcatattcttgcttggttctttacctgttaactgtcttactttctctgaaactgctggcattctggtagaaccgccaactaacagtaccatatgaagttcgctggtactgattcctgcatcagataacgcctgatgaactggtcctgctgtctgatcgatcagatctgaagtcagttcttcaaatctggatctggttaatgtgatatccatatgtttaggaccatctttccctactgcgataaatggcagattaacttgtacagtcatagaagaagataactctttctttgctttttctgcctcttccttgattctctgaacagcggtctgatctttggacagatcgatcccttctgcttttttaaattccccgatcagataattcatgatcctttgatcaaaatcatctcctccaagatgattatttccagccgttgccagtacttcaacaactccatcaccaatctcgatcaccgaaacgtcaaaagttcctccaccaagatcatataccatgatcttctgggatacggatttgtctagtccatacgccaatgcagcagatgtcggttcgttaatgatacgttccacacttaatcccgcaatctttccagcattctttgtagcctgtctctgagcatcgctaaaataagctggtactgtaatcacggctctcgttacttcttccccgagatagctttctgcatccttttttaatttggccaggatcatcgctgaaatttcttctggtgtatatttcttcccatcaatttttactttacgatctgttcccatctgacgttttacggatgcaactgtacgacttacattcgttaccgcctgtcgttttgctggatctccaaccagtcgttctccatttttcgcaaatgccactatcgatggcgtagttcttccaccttctgcatttgagatcacaactggtactccaccttccatcactgctacacaagaatttgttgttcccaaatctattcctattactttgctcatagtcttccctcctaaatcagtgttgttttacagatcaacaccagtatctgccaccgagacaacagttgcacatcaaatttaacatgcacatcttcatacaccagtctccacctgtggaatatggattctgataagtactttgtctttgctgataccaagaaccatttccttgcagctgttgtaataacatctgatattcataattatcaggttccatggaaactgcctgttttgcatgttccatagcagttacattatttccaaggccttgattggcagctgcactgtaatagtaccatctcgcatttcttctggctggttccatgccatctaaaacattccttgcttcctgataataaccattccttacataattacctgctgctcttaaatgcgtgtccttctcatatcctgtcgttgtcttctgtctttgctgagctccgccatttgtgtaataaccactaaattgtccaaaaatatcctcaaatggattccattctccatacggattcccttgttgatttccatatggattcccttgtccaccataaggattcccctgactctggtatccaccataagaactttggctgtatccggttgttttctccttcataacctgttgataagcttgctggagctctttaaatttctcctcagctgcctttggattatcaagattggcatctggatggtattttctgcttaatcttttatatgctttttttatttcttcttctgaagcacctctttgcactcctagaatttcatatggatcagacattcttttcttccttttctttttctcgtttctctcgtacctgttcgtatcgataccatactccggaatataagacatttctcaatatatctatatcatcgatcagtggaagctgttcaaaagctttcgaacactctgccatcatcatcgttagaatctgatggatcatatcttcaaattccggttttgtatatatatttttcagtggattatagttgtgattcttcagatcatcttcaatatcttcatatgcatccatcaaataaatgaatttaccaaggaaaaatccaaattgattcagaagttctttccactcatcatcctgatacaacatgatctctgccatgacctttccaaacatccctgacatctggtcgatatcctgattgtcttttttctcttcttctgacagcttttctaatatatcattgatcttattccatttttccctataaaaatttctggaaaacccacttttatggtataaaattttttctaataccaacttctctaatttgcggtcatcattccaatcatctttacatttgtaataagttaacaaaatattcatgtgcgcgacataatccgtgatattgtttactctttcctcatgtttttgcaatggatgtgtgacacatcgcttcatactctttgttgtttctaattcataaagactggttaaggtcatcaatacaaagaccatatcataggaaagtgtgatctgaccaaactttccataatgttcttttaattttctgcacaaaccacaatagtatccgtgatagacatcgaattcgcggaattttatctctgatttgttgacaatgatatacccaaacattttagctcctctttacgaatgtggtacgacactttggacaacgaacttctatctttccttttcctcttggaattctgatcttctgtccacatcctggacatttgtaaatatggtagttcttcatctgctgtgctttgtattttctattgctccagagtccccgcatattggatgttttattcaggaaccatctgttttcttcggctcgtttatagatgtttcttgaaaacatacggatatagcaataaatcaaaagtgctaatgcgatccaataaaaaatacggctaagtgatactacgccgccaaatacgattcttcctgtaaatagtgatagtacaaatgctgctaaaataatcttcattaaaaagcggttcagatcgtcatttccgtatctgccctgcatgaattggttgaatttatctctcatagacttctccttctttgatatctgttctattatggatatcacatttaagtataatggtaattatacgcaaacctatgcagaatagcaatgaattggttgtaaagaaattataaattttattttataattctaagatatcaaaaaccattctcatcatgctcgtgaatataattgacatttataattatttttgttaatatattccatgtaaatattttacattttatttcaaaatcttctttctcttattcttattaaaatacttttgatactctcattatacttttcttaactattaattattgctataaactacatttcaatataaaatgaaaggagaaacttatgagtcaaactaaaaaatcgctacaggatttaactttacttgatcgttttttatttgctgaagttatggaagatgcagaaacttttgaaaacgtattatctattattcttggccaagacatatccattaaaggacatccgcaatccgaacatgaaaagcgtacatcgcctttaaaacgtcaggtgcgccttgatgtatgggctgaggatgatacggatgctgtatacaatatagaagcacaaaaggaaaataccaaaaatcttcctcacagaagtcgtttttatcaggcattaattgattcgaaacttctggacccgggagagatagatttttcaaagatgaaagattgttattctattattattgcaccttttgatctttttggggaaggattatatcaatatacttttcaaatgaactgcaatgaaactggtcaacctttaaacgatggtgctatacgtatttttctaaatactcatggtcaaaatcccgaagatatcagttccgaattaaaagaacttttatactatatggaacatactaccgaagatatcttttgctctacaccacgccttcaggaaataaaaaaacatgtcaatatcgtaaaatccagcgaagagattggagtgaaatatatgcaggaatgggaagaaaaaattcttgagaaacgaaaagcacgtgctgagggacttgctgaaggacttgctgaaggacgcgctgaggga

SEQ ID NO: 744 - DNA, 659 bp, Unknown
  gut microbiota DNA sequence
ggataatcagatttttattgtgtttttaatattaaaatattactattttcctgaagtatttttaatatttttttatattgggttattactaattggtccataccaaaattgcaaatatcttcatacaccataattattaaaatcctcctattttaaaaaccaacaatgtacatgcatttgttttctcgcatttttatttttactccactttaacattggatgataatgataatattgttttccctgatctttttccttcttgtgtttttgcattgcagatactttatgaattgggcttgcagctttacatgcatcataagcatatccagaagatgtcacaaaaacatttccatttgctttcaatctcatagctgctttagatttagtctttatagcatcatatatatatactttcgcatttatcctttttgctttataataatgtatcttaggttgttttcgctttagtgttgaaattgcagttgcagcaacatatgtaattccagctattacaatatatttaagcgcctttaaaataactcctcctaagtctttcttaaggtctctgggaccttaaggatttttactattcagacaagattttttagaatacatgaaactccaaaatgcgtatactataattccagcagtagtcaaaa

SEQ ID NO: 745 - DNA, 2775 bp, Unknown
  gut microbiota DNA sequence
aaacagaagaggaaggtaaatagaaatggcaacattatacgaactgacagcagaatataaagaattgcttgatatggcagaagaacagaatctgacacaggcagatatcaaagatactatggaaggaatggactacgaatttgaagacaaagcagatgggtatgcaaaagttcttcgttccctggatggtaaagaagcattgatcgatagtgaaattaaacgtttgactgacatgaaaagagttgtggtaaacaacaagaaaacaattaagcagaatcttgaaaatgcaatgattgaaactggcaagacaaaattcaagacggcattattcagctttggaatccaaaaaaatccaccaaatgtaaggatcaaagatgaatcactggtaccagaagaataccgagttaaacaaccaggcaagattgacagaaaaggattaatcaaagcacttaaagaaggagcaatgtttactgaaaacattgaattagttcagaccaaaagtctaaggatcagataggagaaacacatgaaattcagagatctaaacgaagatgaaattgaatgcagagttgcaacagttaacgaaaatggatgttctttgttgctttataaggatgcaagatgtgatatgaacattctggatgaaacactgggagtcacaggatggagaagatctcatgaagtgatcggtggaaatcttttttgcacggttgaggtctatgatgatcagaaaaaagaatggatatacaaacaagatgtaggcattgaatcatatacagcaaaagaaaaaggacaggcatcggacagcttcaagagagcatgctttaatttaggaattggcagagaattatacactgcaccagatatatggattccggctaagcatgtaaatctcaaagaaggaaggaatggaaaactgactacatatgatggattttatgtagaacaggtcatcatagagaagaaaaaaattgttgcattatcaatcaagaataaaacaacaaagaaaagagtatttctttatgatacaagaccgccaaaggaagaagagactaagtaatgcatgaacttgcaaagataacaggaatcagatcagatatcgaaggaacagagatgaaagtctttgttccggagaaaaatctgtttaatacgattctggataagcgaatccatgatgtggagcttcggttggatgatggtagaacaataacaaatgcacagaggaaaaaggcatacgcaacgatcagagacatcgcagactatactggttatcttcctgaacagatgaaagagatcatgaagtatgaatatatcatacggacaggaaacgaatatttctctttagggacatgcacagttgatacagcaagagagttcatctcaatgttgttggagttctgcttagagcagggaatcccattatctgatttggcaatcaaccgagcagatgatattggaaggtatctgtattattgcatcaagaatcgtgtatgtgcgatctgtggtcgcaaaggagaaatccatcacgttgacaagatcggcatggggaatgatcgcaggacagtagacgacagcgagtacagaaagatatgtctatgcagaacgcatcatacagaagatcatacgatcggagagaaagctttccaggaaaagtacaaggtttatggaatcatagtaaaggagcaggagaatggcttggaagaattacaacagacccaacaagtacaacaatcacaaaacgatagtggatgggatcaagtttgacagcatcagagaagcagaaagatatcaggaattaaagctgttagaaacagcaggagagatctcacatctggaattacagccgatcgtggtccttcaggataaatttatttatcaaggtaggatgttcagagcgatcacatacagagcagactttgcttgctttgatcgcacagtaaacaggggtgtgattgaagacgtgaagggcatggagacagatgtttttaagatcaagaagaagatgtttctgaagaaatatggagatctgtacgatttacgaataacgaggtgatcacatgaagcaaaagagcagcttcctgatctaccatgaatatcgggaaccgttaaaattactgacagatgagcagagaggtcagttattgatggcactgattgattactctgaatcaggagttgttccagaacttgatggaatatccatgatggcattttcatttatacaaagccagatggatcgtgattcaaagaagtacgaaaatcgatgcagttctaatcgggaaaatgggaaaaagggtggaagacctaaaaaggaaaacgactcagaagaaaaccaaaaaaacccattgggttttgaagaaaccgaaaaaaaaactaaaaacccaaaaaagccgataaagataaagaataaagataaagagaaagatataaataaaaatactatgtgcaaatctgaagcagatgcactgtttgagagagtttggaaattataccctcagaaacgtgggaaggggaaagtctcagatgccaataagaggcgtttacttgatatcggattcgacgaattaagtcgtgccattgaccgatacaaggcggacttggcgttagatgactggagaaagcctcaaaatggcagcacgttttttaactctggatacatagattacctggatgtcaattacgaaagacctgaaaggatgcagagtgaaaaagctccaggaaaattggattgtcaaagggactatgattttgactctctagaacagcagttgtttg

SEQ ID NO: 746 - DNA, 439 bp, Unknown
  gut microbiota DNA sequence
ctattctgttagggattatgattctcccgacaatcatcggagtatctgaaagtgcaattcgtgcagtaccgggaagttattatgaaggttctctggcactgggggcaacacatgagagaagtattttcagagctgtgttaccggcagcaaagtcaggaatttttgcaggaatcattcttggtgtaggtcgtgcgattggtgagacgatggcagttatcatggtagctggtaaccaggcaagagtaccaaacggtattttgaagggagttcgtacactgacggcgaatatcgtaatggagatgggatatgcagaaggtcttcacagagaagccttaatcgccacaggcgttgtattatttgtatttatccttgtaatcaacctcgcattttctattgtaaaagtgcgttccaacaaagagtaagacaggagatgagtaaa

SEQ ID NO: 747 - DNA, 189 bp, Unknown
  gut microbiota DNA sequence
acaatcatatagacttgcaatatattcaactaattcaaatccaaatcgtaacaatctgtctttataaaaaacaaccaccttgtccactttattttgagatattcgtttcataagttcttttctatctaaattaggttttacattcataacttgatttaattgctcatgcgaataatatctatatccatt

SEQ ID NO: 748 - DNA, 526 bp, Unknown
  gut microbiota DNA sequence
aacaaaggttgtttattcatatgctgaagggaaacttacgaatgtttctcacaaaaacagcggagaaacagcttctgtggatcagacatatgcttatggaagtaatgggaagatgagcaagatcatcgatgcaaagaagaacgggtaccagatcgcttatacaggagaaaaagcagaaagatttatccgtccgaatggagaataccagcagctttcttatggagatggaacaacaacggtatctttccacaaggcagacggaaccaaaacagcacaggattccatgagttttgacaagactacaggaaagatcctgaaaaagacggatgccaatggaattgaaagcagttacagttatgatgatggaggaaaagacggagaacaaaatggctgggtaaatgagtatcttgtaagaaagatcaaaacggaagtggattatcaggagctggatgctgccggactggtgaaatttttgaaaacaaacaaggaaaaagaagaaacatttacgattgccagtatcgagtac

SEQ ID NO: 749 - DNA, 1603 bp, Unknown
  gut microbiota DNA sequence
aaactaacaatggtaacagggattaccgcatacaaattggaggtcattatatgaattataacacagtttacgtaggaatggacgttcataaggaaagttttactctttgttcttgcaaatatgaagatgaaaaggcatctcattaccagagaacaccagccagttacaagaatgtattaagatatcttgcatttcttcgcactatatatggagaggatacaagatttgtgtgtggctacgaagcaggatgccttgggtattctttgtatcatcaattggaaaattttaatgtggaatgtgtgatccttgcaccaactacaatgctcgaacaacgaagcaaaagacggatcaaaacatacaaaagagatgcggagatcattgccagatccttggcacagcacaattacagtccggtacatattccaacggaaacagataatcagacaaaagaattcatccgtatgcgtgatgatcataaagcggaattgaaaaagatcaaacaacagatcctttctttctgtttacgtcagggttatcagtatgatggaagtggtaactggacagcaaaacatgtgaaatggctgagatcattaaaaccagcagggctttacaaagagatcctggatgaatatctgctgacttatacaattctgacagataaactgaaccgtctggatcagaggattgaagaactagcatccaaagaagagtatacagaatctgtcagtaagttaacctgttttctaggaatcaagacacatactgcgttatctgtaattgttgaagttggagactttcagcgttttgtatctgcacgaaagtttgcagggtatcttggattggtacctggacagcattccagtggcgatgacagaaacggacttggcattacaaaagcagggaatacccatgtacgcagactgttggtagaatccgcacaaagttatacccgtggaaagatcggatataaatcaagagtcttaagatcacgacaggcgggaaattcaccgcaggtaatcaattatgcagacagggcaaatgagcgtctgagacggcgctattataagatggttctgaaagatggcaagaaatataatattgcaaaaacagcaattgcaagagagcttgcttgtttcatatggggaatgatgacagataatatttactaatataaatataacacatcgatcaccatatcaagaccaagccgccaaaggcggtactgtgtagtcttgacatactgatcgatgtgctataaatgataatcaagatgatgtaagccggtctctgccgcatacatcatccagcctgtaattaaagttgcaactgaaggcatcccgaaagagtttcgaacatgtttaggtttgaactatctacgaggaaactctgttggcacagtaatatctgtgatccacgtgagggagacagctagagttcgcggcggaccattgacctgttggtaaccaatccacgtatatcagagtggccaatgccgggaactgatacatcggaactctttctggatatcttcagaaacaataaaataaaaatttgttgtgatttctgttaatttactattgacaaaggtcattacatatcagtt

SEQ ID NO: 750 - DNA, 302 bp, Unknown
  gut microbiota DNA sequence
tgctgttactacaattaaacatggtaaagtagtcatctctatcaaagaaggaaaagatatttatcttgaacttcctatctaatttgaagagaacctatgaaagtatacgaatagcaaagggcagatatcattatacagatatctgccctttttatttccgctcccagacaggatactctctattcttctctgtccgctgcctcttcaacttcttccatccagttcattcttccgtaacgcaatgtcactgcatagatctctttctgtaatttcacagataactggttcttgcggattctcca

SEQ ID NO: 751 - DNA, 994 bp, Unknown
  gut microbiota DNA sequence
gagaagataacggaacgaaacttcatcatgctgtcggggaaatatcaaaaagaacagatagaactggaacagcagataaccaacctaagagaagaattaagtaaaatggaacaggatatgataggtgctgaaaagtggattgagttaattaaggagtattccgtaccaaaggaactgacagcaccgttgttaaatgcaatgatagaaaaaatccttattcacgaagcaacaacgaatgaggataacgaaagaatacaggaaatagagatatactaccgatttattggaaaagtagactgataatgaggggtcatatctttaactaagggaaaccggattatccgtaccagatgcagatatgttatcaaaattagcggatgtattagagattaacgtgagtgaattattgggtagtgaaataaaagaagaaaccaataagaatgaagtatcagaacaacttgcgaagatcagtgaacaattggcgcttaagaatagacggcgtaaaagaatatggaaagttattggatttatattgttggctgtgattgttattaatatgcttctggtggttttgggcacggtgacatataacgaaaaaaatgcggatattactacaattgaagagaaattttgattttgtagttggccaactgtagatttcgagtatatagagtggacaattcacaagattggaaaatttaaggtgatgtgtatgttttactgtattggtttatatatttaggtaatcgatagctgaaaattctcgcaatttaaggtttcgtagaaattaagataagataattttcaaacatcccaacaaatcggtgttgtagattttatctaaacttctgttaataagtacaagaatcatcaactaatacagtttaacatacacattgtgtagtgatttgaacagcgttccgttgtatgagtcagaaagaagataagaaaaaatatttataagaatacagggtgacaacatgagcactttttg

SEQ ID NO: 752 - DNA, 10959 bp, Unknown
  gut microbiota DNA sequence
tgcgttttttacaaattcgcagcgtcctgtggttgattgtctgaccgtagctgcgagcattttggctcgcagcgagggagttatcaaaggaacaggcgcgaatcagcgatttgtaaaaaacgctttcaaaaagtgctcatgttgtcaccctgtattcttataaatattttttcttatcttctttctgactcatacatgcaacactacctacaatcataatttagtagtgataaactttccttctactccgtaaaaaataaatcgtaacaattaaagtcaacatctccgccacaacaactcccatccagattccattcaatccaagcacaagtggcagtaacataatacacccaatctggaacaacaaagttcgaaggaatgcaatcatcccagaaacaaccccattattcaaagctgtaaagaacgaagaagcccagatattaactccattgatcaaaaacacaaatgcatacaaccggaatccatgtaacgtcatagcaaatagatccgcatcatatccaacaaagatattgatcagcggatgggaaaaaaactcagagatcaaagtcagacaaaccccagttacagcaattaaagacaaactcttcttcaacatattcttcaattccgaatgatttccagccccataattataactggtgatcggagcgcttcccatagaatatccaagatagatcgcagcaaagataaagttcgcatacatgatcacaccataagcagcaacaccatctgcaccagcaaggcgcattaactgtgtattataaagcatatttacaatggaagaagaagcatttgtcataaattccgaagaaccatttaaacaggtttttaataaaatatcttttctccagacaggtttcacaagacgaagacggctgctgttattctttcgtgcaaaatagatcaacggtacaagcccgccaacatactcacccatggcagttgcaaccgcagccccggcaacaccataatgcataactccgataaagagatagtcaaacacaatattgatcacgccagaaatcaaagacatacgaagactataagaaggtttctctgctgtaataaagaagttataaaagatcgtctgcatcataaacattggctgtgatacaaacataatacgtccataagtagacgcatattcaagcagctgtccacgcgccccaagtgccatacagatctgccttataaaaataaatccaaagatagacaggatcgtagctccgatcaaagcagtaaagatcagcatagaaaaatattcatttgctttttcttttttaccctcaccaagcgtttttgcaacgatcgcacttccaccagaaccgatcataaatccaattgctccaacacccatcgcaacaggaaggatcagattgaccgcagcaaatgctgtttttcctgcaaaattggaaataaataatccatcaataatactgtacatcgaagtacagatcatcataatgatcgatggaaatacaaaacggatcagacgtttgtaagtgaaatgatctgataattgaatcttcatgataaactaaaactccttttcctctaagacatattgtttcatatttttctttaaaatctgaacatattttctcgtaagagaaagcagctgttcacactccgaaggctccatagattcaaatgtagcattttccatatcaaagacaggaccgatatgtttttcagaaaattctcgtccaaactctgtaaaaaataagtggatatcccttccgacgccggctttacggatcaaaactcctttatcttctaatgattttacggaagaattcactgtttgttttgagatggagtaaagtttgcagatatctttctgagagcaaccatctccaagttctaacagacaatataaaatgagaaatgcggaatccgtaagatgcatggaaagagcgatctcatgatagacatcatcgatcatcttatagagagaatcaaattcctttaaggcacgattttgtttcgattccatagtgacttcctttcttataacaattatattaagtccgaaatcggactgtgagattatgataattatagtctgatttcggacttgtgtcaattattatttcataggaaatcactttacgaggtcattcgaatcagttaaaataaagagtcagagaataaagtacaaccaaagaaggaagttacctatgaaatttgcctatgatatcccagattcattctggagtttatttcgttcgatgaacagagaactttatatggaagccttgctgaagatcaacgaagaatatgaatataacaattattatttaagtaaagaagtatgccttcaggtattagaagactggaacgaaagccagcggatctggttatctcctgaagaatttgaatcagaaactgatgcaagccagacaccaccaaacaggatcttaaactggctgatcaagacaggctggttaaagaggatcgaagatttctcaacattaactaccaatatcatcattcctgattacgcagccgtatttttaacagcatttgaagaattagtcaacccatcaacggatgacacagagatctatatccagaatgtatacgcaacactgttttcattctggcatgataagaagatgaacttagccatgttaaaaacagcgcttgttaatacaaagaaattaaataaagccttgcaggatatgttacacaacatggaccatttctttagccgactactaaaacagaaatcatatgaagaagtgctggcagaacatttggaaggttacgtcgaggagatcgttgagaagaaatatcatatcttaaagacaaatgataacttctatttatataaaaatgatatcaaacgatgtttaagagaaatgagagaagatattccatggatggaacaggtacagaagaaagcagataaagaaaaaggtgaagatgtcttaagtatcattaatgcgatcgagcgtggatttgatgacatagaacatcgaatttccaatatggataaagaacattccaaatatatcagggcaactgtaacacgtatgaattacatgctgaatggagaatccgacacaagaggtctgatgatccagctgttaaagacgatcggggattctaaggacagcgaggaaaagatcgagaaggtcggacagagtatgaatctgtctcattttgaagtgctttcagagaagtctttgtataagaagagaaaacgaagagattttgcaagtcaggtagaagaagaaaagcagcaggaagaattatcaagagaagatgtcctaagattaaataagattcatacaagataccagcaggctgagattgaagattttattgaatcttatatgcaggatgaccatatggaagttaaggatattgatatcagggatgaagagtcctttgagaaattaatccttgcctacgattacagtacaagaagaaacagtaaatataaagtgatcgagagagacgataaattgatcgataatggaagttaccgctatccggcattaacttttgtaaggaggaaaccgaaatcatgataccgtattatgaagaattgaatgacgaagaaaaaaatgcggtcacgaaagtgatccgtacgttgttaaaacagacatttgtgttagaaagaaaatatgataaaaagagcggaagacttgtatacaataaagaatttagaaccattgacctacatcaggaatttttaagagaatattttaagatttcaggaatcgaattaagagaaaatctgcatctgggagtcttttatatcgaaggagaaactgtgatcggagagaagatttccagattatcaaccatttatcttctgatcttaaaattattgtacgatgaacatatggcagaggcatcatcgaatacaagtgtgtatacatcattaggagaaatccatgaaaagatcaatgatttccatctgatgagaacattgccatccatcacggagatgcgtcgttccatcgcattattaaagaaataccagatcatcgaaccactcgatgtattagaagagttaaatgaagagacaagaatgatgatctatccatgcgtgaatgtcgtgttactaggagatgacatccgcagattgatcgaaagtttcagcaaggaggaagtagacagtgagtttgacgaagacgaagcagccatttctggcattatcgaagatatgcctgaataactggcattatatagatcagaaagtattaagtttcaacgatggaatcaacttttttaccggacattctggaagtggaaagtcaacagtaatcgatgcgatgcagatcgttttatatgcgaatacagatggtcgtggattctttaataaggcggcagcagacgattccgatcgaaatctaatcgaatacctgcgaggaatggttgcggtcggagagaaagatgaagttacttatttgagaaataaaaacttctccacaacgatcgttcttgaatttacacagacagaatctgacgaaaaagaatgtctgggagttgtatttgacgtagatacggcaagaaatgatacatccagattatttttctggcataaaggcggcattttagagaatgcttaccgtacggaagaacatgcgatgacaatttcggaactccgcaaatatatgcagaaaaacttcaaaaaagaagatttctattttggaacaagcaacgagagatttagaaaacagatgtatgacatctatcttggcggtcttgatatggagaaattcccaagactgtttaaacgcgcgatcccatttaaaatgaatatcaagctcgaagattttgtgaaagaatacatttgcatggagcaggacattcatattgaagatatgcaggaaagcgtgatgcagtatggaagaatgcgtcagagaatcgaagatacattaaaggaagcaaagagcttagaagagatcaaagaaagtttcgttaaattcaagaccaaaaaagaggaacaggattattgccagtaccgcatgaacaaactggatgtcctgaaactaaaatcagatattcatttgttacaacaaaagattgaagatggagaaaaagatctaaagacgcaggaagagaatgaaacagttcttgagaagaaactagagaaactcgccaaagaatacgatgcattagtagcacagatcgcaggaagtggatacgaccagatcgcaacaaggaaaaaggatgttcaggagttgttaggacagttaaatcattccgtacagcgttgggaacagacatcaaaagacttaaaaaaatggtgtgatctcgatattacgccaaatcaggcaatctgggatatcgagaaatttgaacagggagatatcacagaagatgatctgaatcgattaaaacatacattggatatcttaagaaaagaaactgaggaagaacgacaagataatgcgtctgcactaagagccttaaagaaacaggagaaatctatttctgatgagttgaaagaactgaaaaagggtaacaaagcatatccaaaagaagttctggatgcaagatatgaattacagacgaaattaagcgaaaaatgtggtgattttgtaaaagtaaatgtgcttgccgatctgttagacatgaaagatgagaaatggcataaagcggtcgaaggatatttaggatcgaataaattaacactgatcgtggaaccaaaatacgtcaaggatgccatggaaatctaccgtgatatggatcagaagaaatactggagaatttcgatcgcagacacacaaaagattgataagcaggacatgaaggttgaggaaaatgcattgtcagaagaagttcttgcagaacagtcttatgtgaaaaagctgatagaatccttgatcgggcgtgtgatcaaatgtgagacgatcgatgaattaagaaattgccgtactggtatcacaccagatggaatgctttataaaaatttccagttaaaacgattagatccaaaacagtacacaagaaattcctacattggagacaacagtttacgccacaggatcaaagaattagagaaagaaaaggataagatctttgataaaaaagatccattagaaaaagaagttttaagtgctgccgttattttagactatgaatatcttccacagtcagccgaagaatatttaaaacagcaggaaacactggaacgtgcgaaagaacgtcaggaagaatatgaagatttagaaaatcagctgacaaaattaagagaaggtgccttaaaaggtctggaagaggaaagagaccagaacaggttaaaacaggaagattgcaaacaagagatcaatgcaatgaaagaagcaatctgggcaacacagaatgcattaaaagaatgcagacagcagatcattgaccagaatgaagcattgatccgtgcacagaatgaattaccggcaaatggagagtacgagcagcagtttgcacaagagatcgagaagacagacaccgaagactatgaacgtctcaaaaaacgtgcagcaaggaaatactatgatgccggaacgaagaaggaagaagaatatagaaagcttgtggaagtcagaactgcatatttaagggaatatccgaaccgtacattctcagcagtagatgagaataatgatgtgtatgacaagctttataaggaattatcatctgatcacatggaaatgtatcgtgaaaaagctgcaaaacaggccaaaacagcaatggaacatttcaaagatgactttgtatacaagattcgaagcgcgatcagggaagcttatcagcgcagggatgaattaaaccgcatgattagtggactcgactttgggaaagacaaatatcaatttaagatcacaagaaatacaggagccgatggaaaatattatccaatgtttatggatgattctctgaatatcgatccatctgtcttaaatacaacgatggatgaccagatgaatctcttctctatggaacatgagaataaatacggggaactgatgaatgaattgatcgagatctttatcccgccagaaggtgcaaccggtgaagaacttgagaatgcgaaacgtgatatgcagaaatattctgattatcgtacgtatctgtcctttgatatggaacagattgtggatggtgatgaaaaactgacgatcggattaagtaagatgatcaagaaaaactctggtggagaaggacagaacccattatatgttgcattactcgcaagttttgcacaggcctatggaattcatctttcaccaaaagtacgaagaaatccaagcatccgtctggttgtcttagatgaagcgttctctaagatggatgcagagaaagttgcaagttgtattgacctgatcaggaatctaggattccaggcaatcatcagtgcgacaaatgataagattcaaaattacctagaaaatgtagataagacttttgtatacgccaatccaaacaagaaaaatatttccattcaggaatttgaaaaatgtgaatttgataatttactcacagaagaatagataaaaatacagatacgaggagaaatgtatttatgaatcgaagtttaaaaggaatctgcttcacagttgcaggaggatgctgctggggcatgtctggtgtgatggggaaatatttatttgatgcaaaagatctgacggctacgtggcttgtgacagtcagattattaggggcaggaatctgcctgctgttgcttatgtatcagagaaaagggaattcaatttttcgtgtatggaaaagagaagattcagcggtcaatcagctgatcttcgggatgattggaatggctatgtgtcagatgacgtacttccttgccattcaggagtcaaatccgggaactgcgacagttcttcagtattctgcaccaatcttaattatggtgttctttgtattagtggaaaaaagatttccaaagaaagaagaagtgcttgttctggcagctgtgatcgtaggaatttttttgcttgcaacacatggaagtataaaaaacttagtgatcaccaatgcagcattattctggggattgttatccgcttttgcttttgcagtttataacgtgcagccaaagaaactactagacgaatttggtactttagagacaacaggatggggaatgtttgtcggtggagttttggtaactccatttacaaaagtatggagtatcccaggacattgggatatcatgacggttgcaatgacaattggagttgtattcttaggaacgatcgtggcgttttcctgttatctccatgggatttccatgttaggaccagttcagggaagtatgcttggatgcgtaatcagacattatggatttgtctttgaaggtaagaaggttttgattggagaatagtagataaatcgctgagttcatatgaattatatggattcagtgatttttttcatagaatgattattttattgaaaaaaataacctgtaaatatattgtgttaagtacaaaacaatgttaaaatagaagtaacctaaaaatagaacataaaagaaaggaggaatacgaaaatggaagaattaaccagactagaagaacgaatcatgcaatgcatttggaattatcaaggagaagttccttttcttgatctgatagaaatggttaaagaaaagctcaataaagattataaaagaacaagtatccgcggatatctgttccggctagaagagaagggatatatcaaagttaccaagaaaggaagaaaagcatatgtgcagccattgatcaatgaagagtcatatgggaaatatcaagctgagaaagttttagatcgttggtttgacggatctgcaaaacgattagtaagtgcattaggagagaaactgacaaaagaagacggggaagagttaagagggatcttagatgactttgattttgatgataatcataataaaaatatttagcggaatattcttatgtacactgcttggaacgatcttatatcttttttggaaggctgtaggacgtttgatagaacacaagggatatattgatatcaattatctgatatggaagatggtattattgatgtttgccataccaatcacgttgatctatgcaaatggatttgagaagagtacttatgtatttgaagttacaggtccgatcaagtgggtcattggaattttgatgatcatctggctggttggaacgatcatttttacgatcagatttctagagaaatacagagcaataaggaaggatattttaaatgcagatccatgtggagatgaaattcaaagtatggtaaaaagcatatcaaaaaagttaggggttcataaagaaattcaagtagtgatcttagaaaaagcaggcggaccaatgttatatggggttttgaaaccaagaatcattctgtcaagaatttatgatccgcaacagctaaatatgatatttacacatgaattgattcattataaacatcatgatctcatttggaaacacttggcgaacattatctgttgtatatactggtttcaacctgcgttaaaggatgttttttatcaattagatcaatggggagaaacatactgtgacaggacagtatgtgaatatctgccagatgtaaagggatatttttctacgatcatagatatttctatggaagagatcagatatggaagatatacaacagcggggttatatgagagtaaggaagtattaaagttacgaatggaacgaatgaaatcttatcgacaacaaagaaggttgcgaagaggaatttctgtaagtgtcttatttggaatgatcatactcagtgcaactacggtatttgcttcagggataggatttgtaaaggcatacgataagattgcagatgaaacaagagaggaaatcaatgttggaacggaaggggatataaaggatcagaaagcaaagtatagaatgtatgataaaaccagaatcaaaaagtgcatgataaaaaatgaaagattaaaagagaatgatggaaaaccatttacatggaagatcaagccgaaagagagaatagagacaaaagaaggacacttaaaaaagggaacttgtgttcaagtggctgtctgtatggggtttgaagaagaacaccctgaaacacatatagcaattggaattattgatgaggatggagaggaaacttatatagagaatggggtaaatctggtaagccacttaaaggtaaaaaaagatggacggtatcgggtatttttagaaaatctaggggcgaaaaaagcgatagcgggtggacattatatggtgataacggaagaagagtagaggagagaaaagatgtttgtaaaaaaggtattaatgatagtgcttgttagtgtaatatatttaattaatttaaatattccagtagctgcagaagaaaatgaacaagatattattttttcacctaattggatgttagaaaatggatataaggaagaagtagaggaaaatcaagaaatattaccatttgctacaagagttaatgtaaactggaaagttggactaaaaacagaaaagaaaacgaaaacatttcataaaaatgcaggaagtaaaattactgtagaggcaagtgtgtttccaacaaagaaaatacgtataggaattgtagcaaaaagtataggaagaatgtatgtagagacaacagatatggcaaaaaagacatttaatataaaaaaaacaggggaatacagtgtttttgttacaaataaatccgacagtacaatacatgtagtcggaaattatacaaaataataaaggaaaggaggagaaaaataatagcaagagttcatgtaatatattgggtggagccagtgttcataaaagagcatcgtatcatatgaattcttatattattgcaaatggtaactagaaacggtaactaatgatttgtatgatatagtccagcggtgtgatgtcaagagataaataacacaaaaaacatatatttttgtatatatctcatgaa

SEQ ID NO: 753 - DNA, 690 bp, Unknown
  gut microbiota DNA sequence
caatcgaagctgtatttccacagacagagatacaacagtgcatcattcatcagatacgaaataccacaagatatgtatcttataaagacaatcgaaaagtaatggctgacctaaaggcagtctatgctgcaccaacggaagagatcgctttagaaaatcttgaagatttcggagaaaagtggaactcaaaatatccaaaaatctataaatcatggagcgaacgctgggcaacactggctacttattttaaatatccagaacaggttagaaaacttatttatacaacaaatgccatcgaaggattcaatcgtcagttgcgaaaagtgacaaaaagcaaaactgtatttccaactgatgacagcttattaaaaatgctttatttggcaacgatggacatcacaaaaaaatggactggtcgcagaagagactggagccagatccgtgcacaattagatatattttttgaagaacgattagaaaaatatatgtattaaaaatctgtgtttttagacaggtttatttgacatgcctaaaatcttttgtataatgcagataagggctatgagtcaaaatttgactcataaccctcataactattgattaatcttatatcagttttttgtgtttacacaaaacttgaaacagtctcctttaatccttttaggtatattttttactttcattttaaat

SEQ ID NO: 754 - DNA, 377 bp, Unknown
  gut microbiota DNA sequence
atttctcttatcttaatttctacgaaaccttaaattgcgagaattttcagctatcgattacctaaatatataaacaatacagtaaaacatacacaccaccttaaattttccaatcttgtgaattgtccactctatagacttcaggtatatgataaaaaataaataagcaaccgaaagtgatgcattggaattttgccatattttgaataaattcgcagcccaattggacgaatgtctgagcttcaaagactttggtcttagacaaaactccagagcgagttttcgtaggaaattgggcgaatcagcgatttgttcaaaatatgagcaaaattccaccgcatcgctttcggttgcttatttattttttatcatatact

SEQ ID NO: 755 - DNA, 161 bp, Unknown
  gut microbiota DNA sequence
gcgggtgatgggaatcgaacccacgtgatcagcttggaaggctggagttctaccattgaactacacccgcttatagtcggggtgacaggattcgaacctgcgacctcttgatcccaaatcaagcgctctagccaagctgagccacaccccgtaagtgttat

SEQ ID NO: 756 - DNA, 21644 bp, Unknown
  gut microbiota DNA sequence
ctgttttcaatacccttgaaggcgagttacgcaaggaaagccggcggatcagcgatctgtaaaaaacgtgaggaaaattctctagctgctcttccgatcgtttatttattttttatcatatactcaaaatctacagttggccaactacaaaattaaaaatctaattgaagtgtggtttatcatatgtaaatgacacatctgatctataaacactacggaactgatcatacatgatcgtagcgatctgttttgcataggatggatctgttgcgtattcgtgccatagataattgatatttgggttgtaacggaatttataaagtgtattttgatgataagtctgattatggatatagtcttggcttacatacttagcggcaccataaattgctgcatcgacacttgtccagccttgataatatgcatagctgaatccgcaaagctgaggattactatcataggctttgattccgtagaggttgtacaccatcttcttagaaattgtggatgttatatattttccattgactgtcttaaatcctgtgacatttccagaactatctcttacaacagaacttccagaaacaacggttgtgatcgcttttccctgagataagatgcttgtaccatatccagtttcaagaattgtctggcatagtaaatatacaggatcgatattatactgttttgcagcagcgatcaagacatttcctttatttcttaagacactgtttgatcttaatttactatttaataagttattatatgcagttggatcaacttcacggtatgtatccagtgttaagaactgaaaattatttgttgtatcctttgatggatcgacatagcttgtgtaagttgatgtactgatgctcttgccaccgtaagttggatgttgttttttctctgcagttacataagctgataaactcttattgtaatttgtatactgcacagaaccacttggttgtgtttggacctgtgttgttgaatctgaaggaatgacaggctgtgtgatatagatcctttttgaagaagaactatacttataatttaatcccagtcctttgacgatcgcattagcaggaattaagatgatagtcttctttgtcttataatattttacctttgtaggggcaacgctgaaggttttctttaccccatttaagtagtatgtacgttttcctacataagctgtcagtgtgtcatcgccattcttaaggatcagttttccactgctcttagagtaagtacgtttgactttcggaccctgctttacaagatagtcataataaggaatcatattgactttattgatctgaatgccaacatatttagaagacaggttcttatttgcatagctgacatgtaattgttttcctttatagtaacgtgttttgccgctgtagcggatcttaagacttgctgcctgtacagagtttgcaggtacgataccaccgatacatgaaacagttaatgctgcagcaagtatttttttataatacattgatactcctccttttatactcttctagaataacacaagattcatggaaactcaataaatatgtaatagaaatgtaacaaaaaacagaggataaggtttgacaaagcagaggaactttgatattattaaacaagcactttagcatggtagcgtgctgattgaataaaatgtataaaggagcgataaattatgaaaaagtttttagtcgggttattaacagtcgcacttgcagcatctatgctcgtaggatgcggaaagaaagaagagaaaacaaagacagataactcattgaaagatgtacagtctaagaaagaattagttcttggacttgattcatcctttccaccaatgggatttacagataagaaagataatattgtaggatttgatatcgaccttgcaaaagaagtaacaaagagaatgggaatcaaattaaaattacagccaatcaactggaattccaaagaacaggaacttaatacagagaaagttgactgtttatggaatggtgttacatacagcaaagccagagcaaaagaaatgttatgttcagaatcttacatggataaccatcaggtactgattgtaccagcaaacagtaagatcaaatctttaaaagacattacaaaagatacagaagttggaattcagtcaggatctacagcagctgatgcagcagatagtgtaaaagaattaaagaattcaaagatcaaactgttagcagacaatgttcagattttaaatgatttaggacacggattagatgcggctgttatggatgaagttgttgcaaaatactacacaaagaaagatgctggtaaatataaagtattagaagacagtgtagcaaaagaaaaatatgtcattggattcagaaaagatgacaaagcactttgcaacgaagttgtaaaacagttaaaagcaatggcaaaagatggtacattaaagaagataagcgaaaaatggtttgatgaagacatcacaacaatcaaataattaaagaaataaattttaaggaagaaagggcttacgtgctaaagccctttttccgtttataaagatattataaaggaataacccgtcccttataaatatagataaaaataagtaatataggagtagaaaattatggatggaacacaaagttttccagaaatcgtaaagttattaattgaaaatggtctgcaatctacattgatcttattctttctgactttgatttttggactgattcttggtatgataattgctaaaggaagaatgtcaaagcttctgatcattcagatgccaattcgatttttcctattgatcatgagaggaacaccactgatcctgcagttatatggattctattttggattatattatatcgcaggattaagccttgatcgtatgacagcggcggttatcggtttttctttaaattacgcagcatattttgctgagatttatcgaagtggtattcaggcaattccaaaaggtcagtatgaagcagcgaaagtattaggatttaacagatcacagacattctttaagatcattttacctcaggttgtaaagatcatcacaccatcccttggaagtgagtgtatgacattggttaaggatacatccttagctcatgttattggtgttatggagatttacgttgtggcaacaaaccagatggcacgaagccgtggaatgatttaccttgttgtagcaggtattttctacttgatcatgaatgccattgtatcaaaagtattctcagtcattgagaaaagaatgaactattatcgttagggaggaaagaagatgagtattttatccgttaaaaacttagagaagaaattcggagatcttaccgtattgaaaaacatttccttcaacatcaatgacggcgagatcatttcgatcattggatcatcaggatcaggaaaatcaacattactgcgttgtatgaatcagttagagacgatcacatccggaacgatcacgatcgatggaaagacactggttgagacaaagaatggagcaccagtctacgcaggcaaagatattttgaaagaaattttaatggaaacaggatttgtatttcagaactttaacctgtttccacactatagtgttctaagaaatgtaatggaagcccctgtatgtgttgcaggagtacctaagaaacaggcagaagagaaggcaagggagctgttaaagaaattaggtcttgagacaaaggcagatgcttatccatgtgaattatctggtggacagtcacagcgagtatcgatcgcaagagcattagccttggaaccaaagatcttattctttgatgaaccgacttctgcacttgatccagagcttactggagaagtattaaaagtcatcaaatcactgacagatctaaatatcacgatggtgatcgtcacacacgagatggcttttgcaaaagaaatttcagacaggatcatttttatggataaaggagtcatcattgaagatgcatctccagatgaggtattcagttctgataatgaaagaacaagagaattccttggaaaataccatgatgtaaactagaaatgatagcaattgttagaagggagaaaaaacgatggttaaagatatgccgaataagttttcagaggtaacccctgagatcaaagaactggctaagaaatgtaataagaagattgatgaagagttgtttgcaaaatatgatgtaaaaagaggtcttcgtaaacgtaatggtgaaggtgtccttgcaggattaactgacatttccatgatcaatgcttatacaatgatcgaccgtgaaatcgtgccatgtgaaggtaaattatattaccgcggaattgatatcgaggatatcgtaaagggatttatcgaagaagatcgttttggatttgaagaaacagcatacttactgttgtttggagaactccctaaaaaggaccagttaaaacagtttgaaggaatgcttggagaatacagacagcttcctacaaactttgtaagagatatcatcatgaaagcaccaagctgtgacatgatgaatacattagcacgaagcgtcttaacattattttcatatgatgacaatgcaagtgatatttcactgccaaatgtactgcgtcagtgcattcagctgatcgcattattccctgtactttctgtatatgcatatcaggcatacaatcattatgagagaggagaaagtttattcattcatcttccagatccagaactttctacagcagagaatatccttcatctgttaagaccagacagcaaatatacaaaactggaagcaaaattactagatatggcgttagtgcttcatgcagagcatggtggaggtaacaactctacgttcacaacacacgttgtatcatcttcaggaacagatacatattcagcgatcgcagcagccctttgctcattgaaaggtccaaaacatggtggagcaaacattaaagtcgtacagatgttcgatgatctaaaagccaatgtcaaagactggtccaatgaagaagaaattcgtgaatatttattaaaactgctgaataaagaagcattcgacaaagcaggattgatctatggtatgggacatgcagtatattcattatcagatccacgttccaagattctttcacgcttcgtaaaacagctttctgaagaaaaaggaaaagaagaagaatatcaattgtatgcaacggtagaacgtcttgccaaacaggtcattggtgagaagagaaagatctacaaaggagtcagcgcaaacatcgacttctacagtggatttatctacagcatgttaggattaccacatcagttatatacaccattatttgcgatcgcacgtatcgtaggatggtcagcacatcgaatggaagagttgatgaacggtaatcgtattattcgtccggcttataaagctgtggcaccacatagagaatatacaccaattgatgaaagataaattgtgattgaatgacggaaattattggtggaatattataaaaagagatcatgtgtctgcaacccactcgcgttcggacttccacgtagctgtactaagctcctgaatggtctaacgaccatccactcgctaagtgcagacgtgtccgtacggttgcagacacatgatctctttttataatattcaaataatttacgtgattcaaatcactacatagtgtgcatgttaaatgatattggttaataattttgtattcgttaatagacagccttggaacttctatcagttaaaattataattcataaccaacattgttcaatatacagttgcttgaattttcttgattttatgattgaaagtcttcaggtatttagagaaaaaatgaaagatagcctgtgagcaacgatcgaattccataggagttttgatagaatcgcagctggatcgggcgattgcttgagcgtcaaagactactggtttcagtaactttcaacgcgagttatcgcaggagatccagcggataagcgttctgtcaaaactccgtcaatggaattcgtgttgctcacaggctatctttcattttttctctaaatacgcgacgatcttcaactcatacaacttaaaatttccctatgaattgcacaacgcgtatcttatccaatacaaatatcgctacatccataaacaaatgtgccaacagtgtactaacgatcacgccatttgactttaacaagaaatcagaggaaaatccataccaacagataaatccagaataagcgcccattaaaatcagcaaaggcaggtatttcacgacgctttttaaagattccttgatgtaatcaagcgttgaatcgaaatagacaaaacgaccgatcgcaagcatcacaaaataaaagatcaaagaatcataatttgaatcgttataaataaattttatgtataacaagatcagaatgatataaaaggcagagatcagtcgtacggaggctttttgttcggatgagatcgttttcagatgaacaaagatccgatcaaaccagaatgttaaaaatacagaacatactaaaaataccatcaacaaaatatcttgatatttattccagaaataagccgcctgagggatcctttcgtcgaggacataataaagagaaaggaagatcagtacggaggtgcttgaaaataccatttcataaaagctttcgatccagctgataacttttgttttatgtgtttgttcaatttgtgcaagttcaacttctgttggattttcaatattgatcttataatgtttttgaagctttgcggtaagtaaaacgatggcaaggacaacaatcaggccgatcaaagaaacagccatgaagctgccagcattttgtgcattaaaataatgtgtaacataatattgtgattgtgacatatataaccccttctttaaactaaaataatgacatgaaaatcaaataatctcactaaacacatattttaacacctttttatataaattcaatggatactatatttcatcataaaaacttaagaaagttttttgaacaacagaaaggcagtggatttgtgtgagaaatttatctatagacttgtgagcagagactggacaatgttataatataaacagcacattttttgaaagtggtgagagaagattgaagaaatcagtaaggatcgcagcaatgatatttaccattttcgctatattgatagcggtagaaattatcatatcttataaatgtctgactgttacggattacaagattaagtctgataagatcaaggaaacgaccaagatcgtattaatatcggatcttcataatagtcagtttggaagcaagaataagcgcttagtggataaaattcaaaaacaagatccagatcttatcttgatggatggagatatgttgaatgaagatgggaagaatgcacagacagcagtagaacttataagtgcattgaaaaaaacagcacctgtatattacgcattggggaatcatgagattgcgtatagacagcgcagggataagaatctatatcagaagttacagaaagcaggtgcgaaggttgtagagaaagaatatgaggatataaaggtaagaagcaacaagatccggattggaggcctttatgagtatgcatttgcagtagatggggctggaaatatggttaagaaaaatattccgtccaaagtaagagattttttgatggattatgagaacacagatgcatttaagatcatgttgtctcacagaccagatagttttgtttttgggcaggcagcagatacatggaagattgatctggtagtcagtgggcatgtacatggtggacaggtaagaattccatgtaaaggaggtctttacggaggagatcagggatggtttcctgaatatgcggatggaatccatcattttaaggcagtggatcatatggtcattacaagagggcttggaagtgataaggaaaaactaccaagatttcacaatattccagagattgtagtgatccgacttgaaaaacgttaaagcaaagagggtgagatgatgaagaaatatcagattgcagattttatttttggaattcatatggaagaatcgttagaaataccagagaattttaaaaaatttgtgattgatactgatgaagaagtacaagtggaatatttccttgaggttgtggataaattaccagaactggatggagaatgtgtatcacaaagaattgatctgaaagtatataagaaagacgatctggaatatcgtcggatgaattttatgggaatggaagaatcctatggacaatatgaagaaatttcacaaaatcaggtgaaattgtacttaaaacgagaatttgtgcatatgataaatgttgatacagtctttgtatctctttttgcgatggaaaaaagaatgttggcaaaggatgcgatggtattgcattgttctgtactcaaagtgaaatcaggagtgatcttatttagcggaccaagtggaattggtaagtcaacgcaggcaggattgtggacgaagtatcggaaagcaagagttatcaatggtgatagaactttattaaaaaaagagaatggcagatggatgtctcttggatggccaatctgtggttcttcagagatctgttataatgaagcttatcctgtgaaagcagtcatttttcttggacaagcagaggagaatgatggaaggagacttcgttattttgatgcgatcaaggcaatgatcagtcagatcacagtgaatggatggaatccgcagtttgtggagaaaatatggaatcttacagaagatttcgcggctcagatcccggtgtttgagtatggatgtaacatggaagaagcggcagtagatactttagagaatctgcttttggatattttagaataaaggagcatgtaaagatgaacttaaccaatgtatttatagatatattaagaagtgctatgacgcagacttcctgtgatatgatagagggactttctacacaagactgggagaagatctatgatattagtcagaaacagcaactggcaccgatgatctatcagcagattttttcaaatgaatcatttcaaaatagtgatccagggtttcagcagttctggaagggagatacgatcgatcaggcaggaaatcaggcaagaaaaagtattctgtttttgatgttgtttgataaaatgcgccagaatggattgactccattgatcgtgaaaggaattgtttgcagagatctatatccaaatccagatcttcgaatatccaatgatgaagatctttatatcccaagagatcagtttgggaagatggatgaatttttgcaggcagagggatttatgagagaagaactgatcaaggataaagtttatcaggaagttccatatcagaatccaaggaatggattatattttgaactgcatatggatctgtttcctcaggaatccggagcgtatgggcattttaatcaattatttgaagatgcgtttgatacttgtatggaaacagatattcaagggagtaaagtattgacgctgaatccaaaacagcattttttatatcttgtatgccacagtctgaaacattttcttcatagtggatttggagtcagacaggcatgtgatctattatactttgcgaagaaataccatgatcagttggactttcatgagatcaggaatatcatgaaagaatatcatatggattcttttgctatgaatgtattggatattggagtctgctatcttggatttacttgggaggagctagggctttcaaaaccgtctgatgtagaaattgactgcacagcattattggatgatatgttagatggtggtatttttggacaaaatgatatgaatcgtgtacatagtgcaaatattacgttgaatgcagcagagaatgaatcagtcaatgcagcttccgggatcctggcttctttatttccagggaaggaatatatcaagacgaactatccatattcaaggaactatccgtttttactgccagtggcgtatttacacaggatatttaaatacttaactcatcgtaacacagatgcgatcaatacaggagaaaaaagcagtgcacagattgggatggaacgtgtcaaattattagagaaatataagattgtagagaaataaatataaaagtgaaaagaggtgattcctcatgctggatcaggagaaattttttaacacatacaaagtacaggaagcatttgaggattctggactttcctgggatacgcttgagaagatttatgaggattatacgagacgtttaccagagatgaaaaagattgcagatcgtttacaggatgagatatcaaaagtaatagattttcatgtacattcaattcataaccgatgtaaggatccagagcatttgattgagaagatcatacggaaagttggagttgaaaaacgtcagaaatataaaaatattaatgaacggaattatctgaggatcgtgcgtgatcttatgggtatccgaattttgatcttatcaaaagaagaatggcgtacggtacatgactttttgctgaaagttgatgaagattccagatatgatatgcatatggcggagatgccaagggcttatatccgttatggggatcgtgacatttttaattatacgattcataaagaatatacagataagggatatcgttcacagcattatatttttaaatatgggaattattattttgaagtacaggtacgaacgattgctgaagaagtatacgcagaatttgaccattatgtaaagtacccatatcgtgagaataatcattttctaaagcggtatacaagtgttgtggcagaattgttgaattctgtggatgagatcatttcgacatgttttcagtttggagaagcaggctggcttgacattgagaaatattttgcacaagacagctacagtgacttgcagagaatgtcgaaagaaccgcataagagagaacaagaacagattccaagagccaatgacggagtgatcgatgctcaaagttatatgaatcggatgatcttaagaaagggataaaccagatggagagatatgacgacggattcgcagaagaaagacaacggatcgaacgattagtagaggagatcattgctggagaacataagattgataaactgccgaattcttccgcaggatttagtggagctgcacaggcagaatatttttcgaaggcaagatatcatttagaatcggatgtaagtaatctgatcgtgaatcataaacagcaactggatgaattacaattgttaaagatgataaaggggcaagaatgatagaacacaatttatatgagatggaaaattacagagagctgatcgatgaggtcggtgtcgataaattccgtgaacggtttgaggaactgcagaagacagcgatggaatttattgaaatggcaggattttctgagacatcttactgtaatgaaagaattttaatgcaggtgattcttgattattttatggatgtgatgcggttaaaggaatttcatagtattgagaggatccgcacagaaaagctgtttgcatacacgatttcctggatcgttcggagaaaaccaattcagtttcgggattattccgaagaagagagagatatttttatcaatgaacgttttgctgcatatctgctcatcaatgaatgtctgatgtgtggaacgaaacattttgtacaggaagcttacgcagaaaaattagtagaatatacagaaatgctgctttattatttcaaataccgtcagtgcgatccaaagacattagaacttttgatcgaatcatttaagatgggcggacttgtgcattagaaggaaaggggatttaggtatgggaatccttgtttttgatgtaggaacctcgagtatgaaaggtgcattgctaaacgataaggcagagattttatgccagtttcacagaaaatatcatccaaccttttattcttcagtcaaggtaacgcaggacccagaaatatggagaaaagcattatatgatatagcaagagatgtgggtgactggtgtaaggatcagaacgaagaagtagagatgatttctttgacggcacaaagaacatcgatcataccagttgatcataaaggagatccattatgtgatgctgtgatgtggcaggataaaaggaatattgaagtttgtacgaggctttctgcgatgaatggacagatcatcagaaaaagcggtacaatggtgaatcctgtattttcagggagtaagatggcatggcttaaagagacacaaccggagatttataagaaagcagacaggatttttgttgttgcagattatttattatatcatatgacagggcagagaaaacttgatcgtacttatgctagccggtctcatttgatgaatttaagaaccgggcggtgggacagcgtgcttcttgatatctttggaatcgagaagaataagctttgtaatctgatcgacccaggagaacttcatggatatacaaatgagaaatttgcggcaagtacaagacttaagacgggaattccagtctattcggctggtggtgatcagcagtgcagcgcgcttgggatgggaatttatgaagaaggtgacatggaggttacaagtggaacgggcgcatttatcatagggatcgcagagaaagtaccaattgtgcttctgggtaatccgatcattaattattctgcggtaaaaggaaaatatattgtggaagcaagtatcttaacatgtagtgcggcatttgactggttttgcaataatttttataaagaagtgaatggagatgtttatcaaaagatcgatcaggaaatctcacagtctccaccaggagccaatggatgtatgttgcttccattttttcagggaagggcaacaccacagtggaatccaaaagcaactgcatcatttacaaatgtaacgctgagtacgacaagaggcgatatggtgagagctttgttggaaggaattgcttatgagatccgcaacaatttagacattgtggaaggtcagattggcaaggcagatcagattcatattggtggtggcttgagcaacagccatgaatttaatcagattcaggcagatgtctatggaagaaaactgatccattatcagcatagggaagcagggatcattggagcatggacaagcacaatggtggaaagtgggaaagtttcagatcatgaggaggctctagaacgggcaggtaggaataattcattacagatttatgaacctgttgaaaaaaatattgagaaatatcaggaacttcgagcagatatgaaccatttataccaaaaaatatattaggaataaacaagaatatttataaaaaactgaaccactgtaaaaggggcaactcataggagtaatttatgagttgtctctttttttgtacattttaaacaaaatgtatgggtttgcacttgtgtgcatatggattgtatttatggaagaacaatatatttataaatgtcaatctaaaatatttattttgcacatatgtgcaaagattgagaatttgttgcacggatgtgcagcgaatgataagatgtaaacaacttaaggagatgcacataaaagcaacatagaaaatatggagaatgaattaggaggaaccaaatgagtgaagtaatcgaagcaagaaacattaagttgaatgtagacgcatctgattggagagattccatggtcaaatcaggacagctcttagtagatagcgattatattacaaaagattacattgatttgacgatcaaatgtgtggaagaaaacggaccatatattgttatcattccaggacttgcattatctcattcaagaccagatgtgagtgtaaataaaacaggattaagtttgattacattaagcaagccagtctgttttgactgtgataatgatccagtagacattgttcttactctggcagcaactgacgacacatctcatctgcagaaacttcagtccatggctgagtttatttcagatgaagagaacattgaattcattaaaaacgcaaaatcagctgaggaagttgccaaagcgatcaatgaatttgaaccagaagagtaagaagggagaaagaggatggaaatattaaacacagtatttacatttgtatcgaacaatattttgacgaaagcggagttcttcgtaggactgatcgtcttagttggatacatcttattaggaagaaaatggtatgaaacattagcaggtttcttaaaagcagttgtaggttatatgattttaaatgtaggttcagctggattgatcaacacattccgaccaatccttgcaggattaaaccagaagtttcatttaaatgcggtagttattgacccgtattttggattgaatgcagtaaatgcagcacttgaaaatatcggattatccgcagcatggactatgacatcattgttacttgcatttatctggaacatcatcttattgatcttccgtaaattcacaaaacttcgtaccttattgttaactggacatatcatggtacagcaggcaacaaccgtaacatggatcgtattcttatttatcccaggacttcgtaatatctggggagctgtagcagtcggaatcttagtcggtacataccaggcagtattttctaacttaacagttgaaccaacagatcgtttaacagacggtgaaggtggatttgcgatcggacatcagcagatgtttgcaatctggttagcagacaagatcgcaccaaagatcggtaaaaaagaagattctattgaaaatatcaaacttccaggattcttacagatgtttagtgacaatgtagtatctacatccgtattaatgtttatattctttggaattatcatgttagtacttggggaagatttcatgagaagtttagatgacacattctcacagacaacagcatttggattctatattttctctaaagcattaagctttactgtttacttaaacgtattacaggcaggtgttcgtatgttcgttgcagaacttacagaatcattcaaaggtatttcagacaaactgctaccaggagcaatcccagcagtagactgtgcggtagcttatggattcgcaccagcaaacgcagtaacagtaggtttcttctgtggagcacttggacagttcttagcgatcgcaggacttttgatcttccattcaccagttatgatcatcgcaggattcgtaccattattctttgataacgcaagtatcgcagtatatgcaaaccacagaggtggagttaaagcagccatgatcttaccgtttatcagtggaatcattcaggtattaggaggagctgtttgtgcttacattttacagttagtagcattcggtggatggcatggaaacttcgacttctcaacgatcttccttgcagtatcttatattgttaagtatttaaaggtacctggagttatcctttgtgttatcgcaatgttagttattcctcagattcagtatgcgaaatctgataaagaaaagtatttcacagtaggtcaggaagacgacgagtactaaaaagcaatatcaaatcaatttttaataaaacaatcaatcagccaaaattcaggaggtatttattatgaaaatcaaagcaatcgcagcatgtggaaatggaatgggatcaagtcagatgatcaaaatgaagatcaacaaagtattcaaaagattaggaattgatgcagaaatcggacatatgagtgttggagaagcaaaaggtgtagcaaacaattacgatatgatctttgtatctgaaacatttacatcgcagtttagaacaggaaaagatacaaaagtcattggacttaaaaatttattatcagaaaaagaaatcgaagcaaagatcagagaagcattagatatgcctgcagaataaatcggggtgagatagatgtacgatatcaaaaaaaggccattagggatatatgaaaaagctcttccaaatgatttcacatggcttgaaaaaatgcaggcagcaaagcaggcaggatttgattatattgagatttctattgatgaatctgatgagagattagcacgacttgattggagtgatgaacagatcgaagaaatccgctcttatatgaaagagacagggatcatcattccaagcatgtgcttaagtggtcatagaagattcccatttggaagcaagaacaaagaaataagagataaagcatttgagatcatggaaaaaggaatcatcttagcacagaagttaggagtcagagtaatccagcttgcaacttatgatgtatattatgaagaatctgatgaagaaacaaaagctttattcttagaaggaatgaaaaaatcagtcgagatggcaagccacgcaggagtgatccttgcaatggaaatcatggatacgccatttgttggaacgattcttcgtgcaatgcactatatcaaagaaatccgttccccatattttaagatttatccagatatgggaaatctgacgcagttttcagcggatgttgagagtgaatttgaacttggaatcagtgaaacggtagcgatccatgtcaaagagacaaaccctggagtatttaaatgtgttccatttggagaaggaaccgtaagatttacagacatttttaaaaaattaaaagatttaaattacacaggaatgttcttgatcgaaatgtgggcagataacacaaagaaacaaacgatggaagaagcagttgaaacaatcaggcaggcacgcttatttgtagaagataagatggaacaggcagggatcaaagtacctgcataaggaggaaatcatgtatcgaatggtagtgaccgatcttgatggaacattattaaacaataaaaaacaggtttcagaggccaatgtaaaggcaattcaaaacctaaaagatcaaaatataacctttgttatggcaacaggacgatcagatgttatgacgagagcatacacaaaacaattaaaaaatgtcgatattgtcattgggtgtgatggagctgtcattcgaaacattaggaccggagaaatcttatgtgaaaatcatttaagaagtgaaacctgtcatacgacatttgaaatttgtaaaaaatatggattacagtattatgtctttgcaaaagatgaactagtatccgatgatcctcagaatgagagatttctggtccatcagaaattcaatcagactgtagaggaagatgaagagataccaatgcagattgcggatgatttgaatgaatatgtaaatgatcatatcatttacaagatcgttgtaagtcacaatgacacaagttatttagataaagtagccgaagtgatcaaaaaagaaacggatgcagatgccattcgttctgggaaaaaagtccttgcagttaaagcaaggggagtttccaaagcagaagcgatcaaaaagcttgcacaaaagttaggtattttgatcaaagatatcatcgcatttggtgatgaagtaaatgatattgagatgcttacgttggttggacttggaatcgcaatggaaaatgcagatgatgtcgtgaaagaggcagcagaccagattgcaggaagaaatgatcaggacggcgtaggaaaagaattagagaaaatatttggaaatgcaggaaagtaagaaaggagttaagaagatgcttgatgaattaaaacagcaagtatacgaagcaaatatggaattaccggcaaaaggactggtaacttatacatggggaaatgtcagtgggattgacagagaacgtggtttgtttgtcattaagccaagtggtgttgactatgaaaaactaacaccagatatgttagttgtcatggatttgaatggggaaaaagttgagggagatttaaatccttcctctgatacaccaactcatatcgagctttacaaagcatttccagaagttggaggaatcgttcatacacattctccttgggcgacttcatgggcacaggcaggaagaagcattccatgttatggaacaacacatgccgattatttcttcggagatattccatgtgcacgatctttaacagccgatgagatcaacggagagtatgaaaagaatacagggattgtgatcgcagaaacatttgaaggaaaaaatccaatctatgtaccaggtgtcttatgtacaaaccatggcccattttcatggggagcagacgcagcagaagcagttcataatgcagttgttatggaagaagtagcaaagatggcgtaccgctgtgaacatctgaaaaaagatattgaggaagcaccacaagtattacaggacaaacatttcttcagaaaacatggagaaaatgcttattacggaaatgacttataggatatagagatagaagatttcggatagaaaaggagatcaaggttatgagtaaaattagtgaaatgacaagagaaagctggattgaaagcacattcccagagtggggaacatggttagtagaagacattgaaaatgaagtagtagcaccagaaaatgtagcaatgtggtggcttggatgtacaggtgtatggtttaaaacaccagctgacacaaacattacgatcgacttatggtgtggaaatgggaaacgtacacatggtgatggaaaaatgaaagtcggacatcagatggcaaatatgtgtggtggacgtgcaatgcagccaaaccttcgtaatgtaccatttgtaattgatccatttgcatttaagaaagttgatgcagtattagcaacacattatcatcaggatcatatgtctgcagaatgggcagcacacgtgatcaacagtggaatgacaacaacagatgaaaacggaaaagaaattccagtaccattcatcggacctaagaaatccgtagaattatggcagaaatggggagttccagcagaccgttgtatcacagtaaaacctggagattccatcaagatcaaagatattgagattattgcgttagattcctttgacagaacatgtatcgtaacaacagactctacaggtccagacagagaagaattaacaggtgtatgcccaacagatatggatgacaaagcagttaactacttagttaagacaccaggtggaaatatctatcattctggagattctcacttctctatctattttgcaaaacatggaaaagattacgatgtagacgtagcattcggatctttcggagaaaaccctatcggtatgcaggataagatgacatccatcgatgtattacgtatggctgaaaacttacagtgcaaagttgttgtacctattcactgggatgtatggacaaacttccaggctgactgtgatgagattaaagtattatacgacttcaagaaagatcgtaatgaatataaattccatccattcttctggcaggttggaggaaaatatacatatcctgcagataaagataaaatctactatcatcacagaagaggattcgaagactgctttgaagcaccacagaacatcccattccgttcttgcttataggaagaaggtggcataatgaaagtatcaaagaaagttattggaaacttagaaaaatgctattctgttgcgcctttaacttacaaaggaaagaaacatatgctcgtagcagcagaaaaagtaaaccagtgccgtttatatgatcttgaaggaaatcaggaagaagtaatctgggaaggaccgggaggaaccatgtcaatggttcaggtccctggttccgacggacagtttttagcgacacataaattctactctccaaatgattccaaagaagcaaagatcatcttagcttacccggaagacggaaaatggaaggtaagaacattagcggagcttccatttgtgcatcgttttgatattatttcaagaaatggagtaaactatgtgatcgcatgtactttaaaatcaggacatgaatacaaagaagactggagaagtccaggaaagattcaggtatgcgttcttccagaagatttaagtagtgttgatgaagaacatccattacagtttgaagtattaaaagaaggtttattaaagaatcatggatactgtaaagcagaagttgatggagttttaagatcttatgttgcagcaaatgaaggtgtttttgaatgtataccaccagaatcagaagaaggaacatgggaaatcaaacagatcttagatgaagcaagcagtgatatggcatttgcagactttgacaatgatggtgaattagaaatgttaacaatctcaccattccatggagagaagatcagcattttcaagaaacaggatggagaattcaagaaagtctatacttatgaaaaagatgctgaattcgctcatggaatctggggtggagagatcgcaggaactcagggtgttttaattggacacagaaaaggggagagaaatctgttattcttccgatgtacagatcctgaaaaattaacatttacagcagaccttttagatagtgatatcggaccagcaaatgtacttcattacacgaatgatggtgaagattatattttatctgcaaacagagaaattgatgaaatcgcattgtataaagtggaaaaataactacaactgcaggaaatctgagaatgataattaacagattgtgtactggactgatatatagcaatgcggtataataaaaagtgctttggataatgaatgggaggtggaaaacaatgaaggaatatgattcacttagcgataacgaaaagcgcaacatgcttgccagtgttgcaaacctctattataatgtggaaatgactcagaatcagattgcggaacgtttttttacctcacgttctaagatttcaagaatgctaaaagaggcaagacagcttggaatcgtagagatcaagattttagagccatgggaccgcaatgtagagctggaacaggaatttatgagaagatttgcgttgaaagatgtgagagtgatttctgtcaaagaagcaaataatacgatggtccttcagaaattgggtgaagttgcagcatactatctagataatctgttaaatgataatatgattcttggaatttcatgggggaatacaatgtatcatactgtcaaagcggtcaagacaagtaagaatatcccgatcacagtcgtaccgatcatgggagcagccaatgtaaggactccagagagagattccttggatctttcgaaagaacttgcctatgcatatggtggaacgtatcactacatttatgcaccattgtttgtaaactcggaagaagtcagggacagtcttgaacaagagccgaatattaaaggatgtttagagcttgcaaggaatgcagatatcattctaaccagtgttggttctatcgtatataagagttggaaatcttatttaagtaccagagatttatataatcttgagaagaaaggtgcgatcggacatatcggaggacatttttacgatatggaaggaaatgaagtcataacaccgtttgttaataagatgatcgggcttggaattgaagatatcaagaatacagagaatgtgatctgtgtcgcaggactggagatgaaggcagaagcgattcttggagctgtgagaggcggatatattaatacactgatcacagatgaagaggcagcgaaggcagtgcttgcattatgtaaataatattaataaaaaagcaacgattaagatcaagttaaaataa

SEQ ID NO: 757 - DNA, 14226 bp, Unknown
  gut microbiota DNA sequence
ataaaaaacaacgacgtaagtattatattcaaaagaataagatgcttacgtcgtttgctttaggattttatcggaatttcctatgcaataaaatttattaatttgaaatttcctgataagtattcagatcgtcaggtaaggtcacagtcacagattttccaggatcatgataagtcaggttcatttttaaagtgatcgaacctgtctcattgtcaccgctttccataaccatctggatggattctttcacaggaagatctttgtcattcaatgtttttgtaccggtcaaagaagaaatcttaatggaattacttccaccagttacagttgtcatctgggaggtaacatctttaacgtattgattcaatccatcattattgatactgtatttaagaacagtatttccatccttttcactaagtttcagatctttgtaatattttgcagacaaagaagtctgacctgtggttgactgaatctgtttttgaagacctgcgatatccatttttattttctgctttgttccattggtgttcatgtaataataaccatcagaataatacatattcatatccatagtctgcccaagcatgtttaaggtagaagtcatagacatttttaactgatctttatcaacagtctgtagttttgtgtcaaaattcatcttgatcgtaacgtttgaggatgaagaagcctcactatttgcgatcttataagaagcttctccactgaaatcagcatcttttaatttggaactttgtttaagacttgattccaaaacttctttcgcagtacgtttcttctgacagccgctgattgaaaaaagcagcatacaggaaagaagcaatgcagtcactttttttattctaattttcataatgaatccctccatgaaagagttaatagttattaagtttagtttaccatataatcataattttgtgttaaactaaaaataagaataggaacggaggtacttgaaatgaaaaaaacagtatacctgacatcaaaacaagatggattaaaactacatgtactgcttatggaaccagaacaatctccaaagggaatcgtacagatctgccacggtatggcagaacataaagaacgctatgagcctttaatgcaaatgttgtgtaacaatggctatatcagtgtgatccatgatcatagaggtcatggtaagagtgtcaaaaatgcgtcagaccttgggtatttttatgatgacagtggaaaagcgatcatagaagatgctcatcaggtaacaacatggatgaaagaacgatatggggaagaacttccatatcatttgttcggacatagtatgggatctttggtggttcgttgttatctgaaaaaatatgatgatgagctggactctctgatcgtatgtggaagtccaagtgaaaataaagcagcaaaggcagcagaatttcttgcaaaaactgcttgtaaaatgggagcacacaaaaaaggaaagttctttcagaagatggcatttggcttatatggaaaggcattaggagaagatgaatccgaaaatggctggatcagttataacaaagaaaatgtaaaagcttatgatgaaaatccattggatggattcgtatttagtaataatggatttttaaatctgtttttactaatggatgaaacttacaacaaaaaaggatggcaggtaaaacatccgtcacttccgatcttgtttatcgcaggagcagatgatccatgcattggttcaaagaaacagtatgcacaggcaatgacaactttaaaaaagcgagggtataatcaggtacgtggaatgttatttttaaatcggagacatgagatcttaaatgaagatgatgtagagaaagtttatgatgcggtattgcatttcttagaacagcattccaaaaagagatgactgatagtaactagggagataagaaagagcgtgataaactagaagcaagatcatgaaaggggaggaaagttcgtgggaaaatggtttcgtcagatattgcagggagaacattcactgtttcggttatcccttccatttcgggtaagattatttaatgtgcttgcattagttggtggaatgatcagtctgatcaatgggatttcatcatatgcgaataatcaggatagtgtgattctaggattgaattttgggattgcagtgttgtctttcgtgttgttgttttatgcatacaaaagtggcagatatcagttttgttatgttgttacgatcattacgatctttcttgtgatgttcccatatttattttttaaatccggcggttacaaaggagggatggtctctttttatatttttggaatcttatttacagtctttatgttggaaggaaaggcaatgttttttacagcatttacggaaatggtcgtatatatagcaacgatcatgatcgcctatcaaaatccgcagatggttgtatggttctcctctgaaaaagaagttgtgatggatctgttgataggattttgtgcatctagtatttcggtggcagcagtgatgtatctgcattttcggatgtacaacaaacaacaagaaatcttagaagaagcaaggatcgaagcacagtcagcgaacaaggcaaagagtgcatttcttgctaatatgagtcatgagatccggactccgatcaatgtaatgcttggaatgaacgagatgattcttagagaaagtgaaagcaaagaaatccgccaatatgcaaaaagcattgaacgttctggaggttatctgatctcattgatcaataatattctggatatttcaaggatcgaatccggaaaaatggagattgaagaaggaaaatatgaactcaggcagctacttgatgaagtgatgttgatcgcagagaaacaggcggaacaaaagtcgttaaaaatgaatctgatatttgataagaccttgccagcgtatctgatcggtgatgtgatacatatcaaacagattcttttgaacctgatcaataatgcagtaaaatacactaaagaaggtcagattgatattaaagtcagtaaaaatgcagaggaaacgaagcttattttcgaggtaaaagacacaggaatcggaatcaaagaagaaaatttacccgttttgtttgatgcatttatgagagtagactctaagaaaaataagaagatcaaaggaaccggattaggacttgcgatcgcaaaacagctggcagaacagatggacggtatgatctgggtagaaagtgtatacggcaaaggaagcagtttttttgtgcagcttccaatgaagaaggtatctgatgggaagatttccaatgttgaatggaaggaaacggatgaacgaaagagaagatcatttgttgcaccgcaggcaaagattttaattgtagatgataatccggaaaatctcatggtgacaagatcacttctgaagcgtacagctgtgtttgtggatacagcagccagcggagaggaatgtgtccacaaagtcaggcaaaatatatatgatctgatattacttgattatatgatgccgcagatggatgggatcgatacgatcagggaattaaagaaagatgtacaatttcatattccagtgatcgctttaactgctgatgtgacgaaaggaattgaacagacatttttaagagaaggattttgtgcgtatctttcaaagccggtgatgtggagcaaattagaagacctgctgatgaaatatttgagagatgatcttgtatttattcgtgaggatctgaaagaagaacaaaagatcaaagatgaagaatttaagcagctgaaggggcagctaaaagaaaatgatataaagattgaagaggggcttagacttctggatggagactttatgcagtatcgtaaactgatggaattctttatggagtaccaggaagaatatatgagacagatgcagcagttgatgacacaaaatgaagtgaaagtcgatgagatcacaaggatgatgcacaccttaaagagcaatgcaaaagcgataggtgcgattcatttgtatgagattgcaaaagaaatggaagatagagggaaacaaaaggatatggaatacatcatgtctgcatatgatctgcttaaattggagtggggacgagtatttaaggcatcacgggaatttattgaacagacgaaaaatgttctgtttgatcagaaaaaagaggaagaaaaagacaagcaaagtaaagaagaaatcaaagaaaaattaaaaatatttatcaccagatatcaggcgaaagaagcgaaagaacagattcagtattatcgaaaaggtaagatatccgaggaagaaagaaatatcttgaaagagatggaaatacggatcgatcagcttgattttgatgaagcagaaatccttatgaaacgatgggagggaatggaatgagagagaatcatattttgatcatagatgatgatcttatgcttctaaagacagcagaagagattttatctgaccaatataatgtcagtgtcgcaaagagtggaatacaggcattaaatctgttaaataaaaatatcattccagatttgatcttattagacattgatatgccacagatggatggatacgaaacattagaagaaatcaaaaaaatctcaggatgtgaactgatcccgatcatatttttgactggattttcagaaatggattatgaagtaaggggcttgaaagcaggggcagttgattatatcgtaaagccatttgcaaaagaaatcttacttgccagggttgaacggcatttggaacgatatcagcagagacagcacaaaaaatccatggaattatcagattatgccaagcagatcaaaagccagttaacaccaacagaatggaagatcgcaatagcgatcgcagaaggaatggaaaacaaggaaattgcggagtctatgcattattcttatgggtacgtgaaaaatcttgtagcaaggatcttctcaaaattagagattgaaaaacgacgggaattaaaaaagctaatggtcaaggaataaattttaagttgtagttggccaactgtagattttgagtatatgataaaaaataaataagcaaccgaaagcacagcggtggaattttgctcacattttgaacaaatcgctgatccgcccaatttcctacgagaactcactctgaagttttgtttcagacaaaagtctttgaagctcagacactcgtccaattgggctgcgaatttgttcaaaatatggcaaaattccaatgctgtgctttcggttgcttatttattttttatcatataccagaagtctagagtgtggacaattacaagattgataatttaagtagttgtgtatgttgaacgttatttgttttcaatttttgtagtgatagacagaaagttataatattccaccaataatttctgtcattcaaatcaacgctttaaagttgcgtatcgtcagaaattttgttataattattaattattacaaaaaggaaaggaaattatttactatgaagaaagagaataacaaaaaaagtgcaagcgctttgatcggtgcggcatttcttatggcaacttcggcaattggacctggatttctgacacaaactggtaaatttacagatagtctgcatggaagctttggatttgtaattttaatctccgtgatcttagcagcgatcgtgcagttaaatgtatggagagttctgtgcgtatctggaatgcgtggacaggatgtggcgaataaggtacttcctggacttggatatgtgatcgcatttttagttgtagcaggtggtcttgtatttaatatcggtaacgttggtggaggtgctttaggttttaatacacttcttggaattcctactactgttggatattttattgcgggagcaattgcgatcatcgtatttttatcaaagaatgcattaaatgctatggataaccttacaaagatccttggtgggatcatgatccttgtcatctttattgtgatcctgatcgtacagccgccagttggtatggcagcaaaagaaacaatcatgccaacagcatctatgggagatatttttccagcgattcttacattacttggaggaacagtcggtggatatattacatttgcaggtgcacatcgtctgatcgattcaggaatcactggaaaagagaacttaaaagagatcaataagagttctgttatgggaatgggaattgcaacgatcgtacgtatcttcttattccttgcagttttaggagtggttgtagcaacagcaacttcaccagctcatacattagatgcagcgaacccaacagcggatgcatttttacagggagcaggacagatcggttatagattctttggacttgtgatcttatgcgcagcggtcacatccatcgttggatgtgcttatacatctgtgtctttccttaagacattcagcaaaacgattgagaagaatgagaaatggtttattgtaggatttatcgcgattagtactgtatgtatggcacttgctggacagccagcggtattattagtacttgcaggagcattaaatggattgatcttaccgatcacattaggagtttgcctgatcgcatctcagaagaaatctgttatgggagaagattatcatcatccagtattattactggttcttggaatcgtggtagttgttgtttcaggatatcttggaattacatcattaagcagcttaagtgcattatttgcataagcaaaattgtctggataaacagataagtttaaaacatagaagcacagactgaccgaaaggagttatgtgaaaaaacatggaagaagtaaagattagtactgcgggagattctgccttactcattgaatttggacaggaaatttccacagagatcaatgcaaggatcacagcctttgtacatcttttaaaagcgcagcgtatcgaaggtgtgcaggatatgatcccggcatttaccagtctcttgatcaattatgacccgagggtggtaaattacaaaacattaacaaaacgtctacagaagttactaaaactggatgtcaatgaagagacatcgacatccagagtttttgaaatcccagtatgttatggaggagaatacggaccagatattgaaaatatcgcaaaaaatgctggtttaacggaagaagaggttataaagattcattcttccaaagactacttgatctacatgcttggatttttgccaggattttcatatcttggaggacttgatgaaagaattcatacaccaagactggcgaacccaagaatcagaattccggcaggaagtgttgggatcggtggctctcagacaggaatttatccgcttgattcaccaggaggatggcagttacttggtctgacaccagtaaaaacctatgatccagaacgagagaatccaattctttttgaagctggagattatatccgttttgtacctgtttcagaagaagagtatttaaagatcaaagaacaggttgaaaatggaacatatgaatgtatcattcatacaaaggaggtgtagattatgggaattcgtgtattaaaaggcggaatgatgacaacggtgcaggatcttggaagaacaggataccagagtcagggatttagtgtatccggagttatggatgttcgttcttttaagattgcaaatctcctgctggataacccggaaaatgaagcagttcttgaatttaccttaataggaccaacacttgaatttacatccgagacgatcatttcaatcacaggtggagatttccgcccgcagatcaatggaaaacctgccaagatgtatacagcaatttatatgcatcgtggagatattttgacatttggcggagcaagaactggaacaagaggatatattgcattttcaagttatcttgatgtgccagtagtcatgggaagccgttctacgaatatcaaatgtcagatcggtggatataaaggccggaaactagaagatgaagattatattgcattcagggcaaagcgaagatatctgccatattatttatcaaggagtctggatcttgatgaatttgatcaggaaaagataacattaagagttgtcatgggacctcaggaaaagatgtttacgaaagagggccgagaaacatttttaaattcagaatatacagtaacaagtgaatttgaccgcatgggatgccgattagaaggaccatttatcgcatataagacgacttcagacatcatatctgacggaatcgcctttggatctgttcaggtaccaagtcatggaaaaccgatcatcttattagcagaccgccagacaacgggtggatatgcgaagatcgcgacagttgtttctgtagatattccgaaacttgttcaaagaaaaacagaacaaaaagtaagatttcaggcagtatccgtagaagaagcccagaagctgttagcagatgagatgaaagagctgaatgacttcagaagccagatttatacaccttgtaaagaagtattagattgcagactcgttgcaaaacgaatcagcacactatttaaatagaaaaggagaatgaaacggtgaatttagataaaattgagaaattagtaaagatcatcgagaattcctctatgcttgatttcagcattcaggaaggcgatgtaaagatcaaaatgagcagaagaggaagtgttggagcgcctgctgcaccgatgtcagtttccacacagggtgttgatacagtagaaagtattgattccgaagatgaatcatacatcacatctccgatcgtaggtaccttttattcggctccatccccagatgccaaggcatttgtgaaggttggagacagagtcaaggcaggacagactgtatgtatccttgaggcgatgaaattaatgaatgagatcgaaagtgattatgactgtgagattgaagctgtcttagcaagcaacgaacagaaagttgaatatggacagccattatttaaagtaaaaaaacttgaagactaaaggaggcattgtatgtttcgaagtatattgatcgcaaaccgtggtgagatcgcagtgcgcattattcgtgcttgtcgtaatatggggatcaagagtatcgcggtttattcaaaagaagataaagacagtcttcatgtacaattagcagatcgaagagtatgtatcggagaaggacctgcaaaaaacagctacttaaacatggaacgtatcatttctgcagcaaagaatacggacgcagatgcgatccatccagggtttggtttcttatctgagaatgctgatttcgttcgcttatgtaaagaaaatggtattgcatttatcggaccaagtgcagaagtcattgacagcatgggaaataaatcaaacgcaagaaaaacaatgatggaagcaggagttccagttgttccaggaaccaaagaacctgtctatgatgcagctacaggggagaaattagcagatgagatcggttatccagttatgataaaagcatcttcaggtggtggtggaaaaggaatgcgagtttccagatccaaagaagattttgaattcaatttcaatactgcgcagagagaatctgccaatgcatttggtgatgatacgatgtacattgagaaattcatcgagaatccaagacatgtggagattcagatcatggcagatggacatgggaatgtcgtagccttgggagaacgtgattgttctgttcagagaaaccaccagaaactgatcgaagaatcaccatccccagcgatcacggaaaagatcagaaaatctatgaatcacgatgcgatccttgcagcgaaagcagtagggtataccaatgctggaaccatagaatttatccttgatccaaaaggaacctattatttcatggaaatgaacacacgtattcaggtagaacatggggtcacagagatggttacgggaacagatctgatcattgaacagattcgagtggctatgggaatggaattaagttttacacaggaagatgtggagatcaacggacatgcgattgaatgtcgtatcaatgcagagattccagagaaaaactttatgccaagtccaggtgtgatcaaacatttgcatttgccagctggaaatggagttcgtgtagataccgcaatttatacagggtactgtattccatccgaatacgattctatgatcgcgaaagttatcgtacacgcaccagaccgtgatgcagcattacagaaaatgagatcagctcttgatgagatggtgatattagggatcaatacaaaccttgatttccagtatcagctgatgaataaccgtgaattctgtgaaggaaaagcggatacaggatttatcgagagactcttgaaattagattaaattcgataaaacggaagaaatggaggtataaattaaatgtaccagatagatttaaatagtgaccttggagaaagttttggacgttacacgatcgggaatgatgataagatcattccattgatcacatcagcgaatgttgcatgtggttatcatgcatccgatccagtggttatgatggagacgatccagagagcaaaagaagccgggatcacagttggggcccatccgggacttccagatctgatgggatttggacgaagaagcatggcgatttccaacgaagaagcgaaagcatatacactataccagatcagtgcgataggtggaatgtgtaaagcggccggagtgaaattacagcatgtaaaaccacatggagcattatataatatggcggctaaggattatgatctgtctaaagcaatctgtgaagcaatttatgaatatgataaagacctgatcgttatgggattatctggaagcgagatgatcaaagcagcaaaagactgtggattaaagtcagccagtgaagtatttgcagacagagcttatgaagaagatggaacactggtgaatcgaagaaaaccaggagctatgatcgaagatgaagatgaagcgatcaaccgagttattcgtatgataaaagaaggaaaagtgacttcgatcactggaaaagatattgatattaaggcagactcagtatgcgttcacggagatggagagaaagcattattatttgtggagaagatccgtaagacattcgttgagaatgagatagaaatctgtcatttataatggagatatttttaagataatgaagaaatggtagatggatctagagaagaattcatctgccattttttcatttcatagcaatttgtgactctattgatgccatgtcattgaactgttgttatcgaaaagcagtacttgaacattgggattatgttgttggaaatgagaaagagaagtataagaaagaaggagacaaatgcaagataaagtaagagatttaagaagtgcattaaaacgcttgaaacaaatggaagggcagtacatagaaactgatgtagaagttgatccaatggcagaacttgcgggagtttaccgctatgtaggtgcaggaggaactgtaaagcgcccgacaaaagaaggtccagcgatggtatttaataatgtcaaaggacataaagatgccagagtagccatcggtgtattagcaagcagaaagcgtgtggcagcgctcttggactgtaaaccagaagaattaggaaagaaactttatcatagcgtagataatccgatagcaccagtggaatatcagggagatgcaccatgtcagcaggttgttcataaagtggaagatccagactttaatttgtatgatctggtaccagcaccaaccaacacaccagatgatgcaggcccatatattacattgggtatgtgctatgcaacgcacccagacacaggagttcatgatgtaaccattcacagattatgcattcagggaaaagatgaactttctattttcttcactcctggagcaagacacatcggagcaatggcagaacgtgcagaagaattaggacagaaacttccaatttcaatcagtatcggagtggatccggcaatcgagatcggttcttgtttcgaggcaccaacaacacctctgggatacgatgaattatctgtagcaggtgcattgagaaatgaaccagtagagctttgtaaatgcttaacagttaacgaaatggcaattgcaaatgccgaatatgtcatcgaaggggaagtgattccaaatgtccgagtacaggaagaccagaacagccacacaggctatgcaatgccagaatttccaggatacacaggacctgcaagttcacagtgctggctgatcaaagtcaaagcggtaacacacagagaaaatccgatcatgcagacatgcatcgggccaagtgaagaacatgtatctatggctggaatcccaacagaagcaagtatttatggaatggtagaaaaagcgatgccgggacgtcttcagaatgtatactgcggctccgcaggcggtggaaaatacatggcagtcttacagtttaagaaacgagaagccagcgatgaaggaagacaaagacaggcagcacttcttgcattttcagcattcagtgaactgaagcatgtatttttggtagacgaagacgtcgactgtttcgatatgaatgatgtattatgggcaatgaatacaagattccagggagatgcagatatcatcacgattccaggggtaagatgtcatccgctggatccatccaacgatccaacatgttcttcaagtatcagagatcatgggattgcatgcaagacaatctttgactgtactgttccatatgatcagaaagagcgattcaagagagcaagatttatggaagttgatccggaacactggttatcataaaatacagaatataaataagaaaaggaaatttatttgaatgaagaaacgactgatcataggagcaacaggggcaagtggaattccaatcttgatccagtgtctaaaattggtgcaagagcagaaggattttgaatcttacttggttatgacagatagtgccaaactgaccttggaacatgaaacaaaaatgaaggtggaagaggtcgaaaaacttgctgatcatgttctggattcaagagagatcggtgcaggaccagccagtggatcatttcagacggaagggatgctcattgtcccatgtagtatgaagacaattgcaggaattcacagtggatatgcagacaatctgatacttcgtgcagcggatgtaacgatcaaagagcaacggccattggtgcttgcagcaagagagacaccactgagtgcgattcatcttagaaatcttcaggaattggcaatgattccgaatgtgcggatcattccaccaatgatgactttttatcatatgccagagagcatagaagaaatgatgtatcatattgcagcaaaactattagaaccatttgggatagaagcaaaagaatatcgaagatggagcggattgtagaaagagaggtttctatgaaaatattatcatttggatcattaaatattgactatgtatataaagtttctcattttgtgaaaaaaggagaaacattgtctgcagaagagttgaatgtatatacaggcggaaaaggattaaaccagtccattgcactttcacgtgcaggaatggaaacatatcatgcaggagcgattggcatggatggactatttttgttagatcaattaaaagaagcaggagtaaatacagatcttgttaagatccttgaagacgtaagaacaggaaatgcgatcatacaaaatgatgaagagggcgataactgtattattctatttggaggagctaatcaggcaatcagtaaggaacaagtagatgaagtctttgaacattttaaaaacgaagattatttactgatccaaaatgagatcaatgaacttccatatatcgtaaagaaagcaaaagaaactggaatgaagatcattttaaatccttctccaatgaacgataagataaaagaactcccattaaatcagattaattattttcttttaaatgaaatagaagcaatgcagattcttgatatggaagaaccaaaagaaattgatgggaaatatattagtggtctgttacatcagaaatttccagaagcaaccatcgtattaactttaggaagtgaaggatctgtatgtatatctggtgatgaatatgtggaacagtcaatttataaggtaaagacagtcgatacaacggcagcaggagatacctataccggatattttatttcaggtatcttaaatggaaaaacgatcaaagaagcaatggataccgcatccaaag

SEQ ID NO: 758 - DNA, 379 bp, Unknown
  gut microbiota DNA sequence
ctgtttgaccatctgctgtgctgtctgtcttggaagtccggaaaagaaatctgcattctctgtgacacgcatcatcttttcaaggtgtgtataagagatcactctgcggacgtgcatgtttggataagatcgttgtaataacgcaacttcttgaaagacttcgacttcgttctctgtccgatgttctttgtcataaccggtaaagatattccgcacacgaaaaagagctgcattgtacaacagcttggactttctgcacagatcgtcaaaatatggatataacagatcatccgaagaaatgattctttgtgtcacacggtatgccatatggttgtctcctttctgatatgttgaaaatatcgtacttttatagtacaat

SEQ ID NO: 759 - DNA, 4381 bp, Unknown
  gut microbiota DNA sequence
atcatccaaatgtattaaatcagaaatttccacaacttgccctgcaagtaattggaaactttctgaaaaaaagcatacatatctggagcatcagctaaagcaactgcatcttttaaacaatataaaaaagatgtgtatcttcaaacaattacaaggacagttacaattagttgtaataaatcaggaaaattatattaatttctttaaattatttccttttgccacttgtacacttgatgtatatgataaaacataaataagaaaccagaatcacagcattggaattttgccatattttgaatgagttcgcagcccaattggacgattgtctgagcttagaagtctacaagtttctactaacttcaaagcgagttttcgtaggaaattgggtggatcagcgactcgttcaaaatgtgagtaaaattccaccgctgtgattctggtttcttatttatgttttatcatatacttatagcctacaattggccaatcaattaaattttatctacatacctctgatgtatccgcaaatccccatccaattccggatgaaatgcaaatcccatctgtttcccatattctaccccaacaatatttccgtcaacttctgctaatacttttaccccatcttctacgctttccacatatggtgcgcggataaatgtcattgggacttctccgactccatctacttcttttgttgtaaagaagcttccgagctgtcttccatatgcatttcgtttgacgcacattgggattgttccaaagtatgtttcttcctgatctttaatatcttttgcaagaagaataagtcctgcacaggttgcgaggactggcattcctgcttcgatctgtttcttgatcgtatcaaacatatcaagttcttttagaagtttcccctgaacggtgctttcaccgccagggaggatgattccatcgtatggtttttctaaatcttctttgtttcgtaattcaatacaggaaacgcctagttgttcaagcattttttcatgttcgataaatgcgccctgtaatgctaaaacaccgacttgtttcatcttattttcctctttctgccattaataattcgatttcctgttcgttgattcctaccattgcttccccaaggtctttggataattctgcgattcgtttggcatctgtaaagtttgtcactgcctgtacgatcgctgctgctcgtttggctgggtttccagatttgaagattcctgatcctacgaagactccttctgctcctaactgcatcattaaggctgcatccgctggtgttgcgactccacctgctgcgaagtttacgactgggagttttccattttcgtgaacgtatactacaagatcatatggaactcttaactgttttgcagcttcaaataattcatcttccctcatgctgactaactgtgcgatctggctgttcatctttctcatatggcgcactgcctgtacgatatctcctgttcctggttctcctttggtacggatcatggatgctccttcattgattcttcgaagtgcttctccaagatcttttgctccacacacaaatggaactttgaagtttcttttattgatatgatatacatcatctgctggtgataatacttcgctctcatcgatatagtcaatttcaattgcttctaaaacctgtgcttctgcaaaatgtccgattctgcattttgccatcactggaattgtgactgcttcctgaattcctgcgatcatttttggatcactcattcttgatactccacctgctgctctgatatctgccggaattctctctaatgccataactgcgcatgctccagcttcctgtgcgatctttgcctgttctggtgttgtaacatccatgatcactccaccttttaacatctgtgccaattctttatttaattcgtatctctttgttgtttccatgttgtaagcctccactgtatttttctaaattcatttgctatgttttctttacatatgctatgggactgattataattaatttgtggcctttttaaaatcatcaatttgaatatgttcaataaggccagattggagaatttacatatcatgttaacctataactttgcaaataaagggtcagattccctttatgaatatttatacaaatgtatcaaaaatgacatattactgggaaatcttggcgttcatgagaaacttccttccaaacgaagtttcgcaaaaaatctgggtatcagtgtgatcactgttgaaaatgcttatgaacagttgatggcggaaggatatatttattccattccaaagaaaggattttacgttgccgatcttcgggaattgaatcttacaaagactctttctgtaagccctagcagtacattactttcttttaaagaaaaagttccttatcttgcggactttacaagtaatcagacagacagtgagatcttcccctttacaatctgggcaagaacgatgcgtgaattattaaatgaaaaccagcagcaattgatggaaaacccaccttgtggcggtattatggcacttcggcaggcgattgccgattatcttcatgcatttcgcgggatggtcgtaaacccagagcagatcatcgttggagctgggacagaatatttatatggtcttttgatccagcttcttggagatgataagatttatggaattgaaaatcctggttacccaaagattgctaagatctatgatagtatgcatgtgtcttattccgcgatcgatcttgacgagcatggtgtctgcatctactccttggaagatcatcagatcgacattatgcatctttccccatcccaccattttccaactggtatcatcacaccgatcagccgtcgttatgaattgcttggttgggcttctaaggatgagaaccgttatattatcgaagatgattatgacagtgaattacgccttggcggaaaaccgatccctacactgcaaagtattgatgtctctgataaagtcatttatatgaatacttttacaaaaacattatcttctaccgtaagaatcagttacatggtacttccggcttctttgacagaacttttttataagaaactatctttttattcctgtacagtttctaattttgaacagtatactctggctcgttttatggaaagtggaagttttgaaaaacatatcaaccggctgcgtaattattatcagaataaacgagatgctattttagaaattttcaagactgcgcccttggatcaatatattacgattaaagaagaagattccggggttcattttatgatgaaattaaagacagacagaacagaaatggatatgatatctgatgctaaatcaaaagggatcaaacttgcaccattatcaaaatattttgttgaccagacatccaatatgaactttcagaatgtttatgttatgaattattcttcgattgatcttgaacaattgcctttaatctttgatgcattgtgtcaggttttaataaaataagtaagggctgccataatggcagcccgctccaacacttattaagttgctattagattgacttaagatttacagaacttatggaatttaacgaacttcaattcctccccctgtattgcaataaaattcaaatgacagagaaacctgctttgtaaaaccagaaggattttttatgactcctaaacataaaatttctcctgttctgccaccatcgatcacacgttttgtaattgtaggtgacttcttccatgaaaatccataaccacttactgttactttagcactttttatttgtgttataaatctacgttttttagatgcattatagcgtgtcacaaaagttgctgtacatttcattataacagaatgattatcagccacagatactttcttattctgactttctgtcactgtttctccagaagctctggcagacatattatcattcgattcattggaatattccccgccattgtcatctataacaggtttttgagtatctaattgaattgctgcattgactgccttttgaaattctttcggtgttaacatatcatcctcattaatttcatcaattggaagcaagtcaaaatctttacttcctattttttcatttgcttctctaataattcttttatattcctgatagtattcttgctttttatcttttatcccttctgcatgtgcaatgatcccagaacaagaaaatattatacttgcagataacattataactgttaatttttttgcgattttaaacatatttgtctcctttcttcagagaacctgagaaaactttgtttataattattttgttttaaactataatttatgatatacttctctatatccatataatacttatccttttaaaaggattttggtt

SEQ ID NO: 760 - DNA, 440 bp, Unknown
  gut microbiota DNA sequence
atttccggtcatattctaagctgaccgatgaccagataatgtgattatgaatgtgcgacttgtctatgtgagtgcagaccacaaaggcatggttgcctttagtaaatcgcttggcaaattccacacccagccggttagcttcttccggagtaatctcgccggggcggaaggactggcgcacatgataggcaatcacatcatccgcaccgcgcactcgtccggtagcaacgatatactgcctttttgctaaaagaaactccgcatcaaccgttctgctgtcacacgcaaatcctgcgatgagccttccattatctgttttctgtggatttgctacatagtcgatgatgtcactgatcgcccgactctctgtgcggcctttgccgacatgaagtggcatgattcttgtagttgccataaaaagccctcctctcaaaatattt

SEQ ID NO: 761 - DNA, 205 bp, Unknown
  gut microbiota DNA sequence
atgactccaacgggatttgaacccgtgttaccgccgtgaaagggcggtgtcttaaccacttgaccatggagcctgattgttcgaccgcttcacggtcttaatactttattcagtatttaactccccgagccgggctcgaaccagcgacagcacggttaacagccgtgtgctctaccaactgagctatcgaggattattataaggt

SEQ ID NO: 762 - DNA, 26144 bp, Unknown
  gut microbiota DNA sequence
aattatgtgagtttgtgttttcgtcccctatcggggcttttattttcttaatcctggtcttacaatccttgtatttatgcgggttaaaaagatgttttgcggtgtaaacttattttgagattaatttttatctttttcttattcaaaataaggctctacaccgcataaacaggtcatcggggcaaaatcatatttcttctatataaactttgcacttaccgaattcatattcacgtcctgcatactcggtacacttcttaatatgaggtgaaacacctagacgaacatcatttatatgttgcggtttttcattctttttcctaaaaatagttttatcaaatattttactgatcacacgaacggcatctttctttgagaaaattccataaagaattgttttcgttgcaaaaccagctcctccgcctaaatatagaatatcctgttcttcattaacaggtccaaatccattcagaaaatgataataactttctaaaaaatgattaattgcatccagaatagtttcatcataatacgtattgatactctcgtcaactgttaactcaaattcaatcttcgttcccggttttatacattctcttaacattggcattcttgttcttttgcctcttgtatcaacatctattttctgacataatgttaaatctgatattttcaacggcttgctatcgcttatgatcattcctttcataacatcttgtacagcattcatttttgatatatcttttatatttaaagtgtggaatacatctacttctatttgctttatttctctttgaagatattttttccctcctcccggcttcctcaaaccactttcaatcatgccttgtacttgtgaaagttttttcttatcatgtactaattcgtctacgcataaaatagttcttagtgcaccttttaaactacttccaggaacaaatggtttcccatatacatctttcacaaaaagagaaatttctttcgtgttcctatccaatactgcatctgaacaatcaaaagaatattctgcccattttttactttcagcgtatgtaattcctttattcactaaccacatatacagatctttttcttttggatttaataaaaatttttcgtattctcctgtaagattttttttctttaactgctgatacatttttatcagattgggaacaacaatttcttttttttgtctgttatgaatatattccttcttacctaattgtttccctgaaccaatatacagcggaccttttgtctctaatgttactttgtatgtactcatgtattgctgcattagatcacccccataaatattggtattgcatatctgtatactggatgtttcccataaatagatacatcataaatatctccctgatatggtattttaaagcaagaccctgccacaaaaccataaaagtctttcttcttccgaaaagtatctgcatatgtcatagaatttacaaatccacttcttttaatcaactgaaactgaacttctgtacaaactttttctatttcatcatcttttggaagagaaattgataacgacatcatcttttgatatttattcacatttaatcgttgttttaattgtggatccatatttttatattttgcttgaaattttccatatcctgaagttctttttccaccgattcctgaatatgataatccttcaatcaacgatgatataaactgaaatgcttctgtatcttcatatccgattataacatacaatcctgcattcttactaaaatggtaggatcctatatagtatggcaaggcatctagtccttcttcatatgaaatagatgctttctgtgtcatttcatatttaccaagtctgcttaacttttctttttctttttgtgcatccagatttcctttcatatattcttctattttattaatgggaatatattttaatttcttaaatgctttttttacttttgagttcccttcttcttttgtttcaacagtcgtcatcggttttggaacatacaaggtatcatcaatatatggcaacccatcacttaattttagctttccactcttacaataatgaactaatttttcaattccttctgaaattccaagagcttcatgacataatgcagaaaagaatgtgtccgccataaaaataggctccccatctgttaacatcccttttccaatatgcaaacctgtcgaaaactgcaatttacatattttatattccattatttttcctcacttaatatctcattacataattgcatcacttcatcgctaagatttccaattacattttcagcttgtagatcttcaaatttgacttttccatatccacggcttccacttcctccgagataatcatattctaatagtgtcagcccatatctgattgcttcaaaatcttcctgaatctgagtttcatcttctacattataaatcagttccaactcaaattctgaacctctgatcactcgttcaatctgtcttggatttgcaactgcagttaatcggttgattgaattttcaaatttaacttctgtcgcagaatgaatatctaactgttttaactcatccatgttggataagatcatatcagaaaaaatcaatctgctatttctatgttcttgtacagttttcttcgcatttccaaataatcggagtacaatttctgggtcatcatcatgtttcccgatcattgcactgacactatcagaaaacccttttgccattaaagttcttaacttcccttttaaggtagttcccggaatcatcggaagatcactttgtttatcacgtataactggtgagtctactgctccaattgctgaaaatgcagaagatcctcctatatgcatacctgttactacttttattttccctgaaatttttatcttattatacatatcttccctccctatgtttactcatctctaccactgaattttctatatgctactaatgcttccatatatctgcaaaaaagcaggaactgacttttgctgtcctttactttttttagttcttctaatattttagctttttgaacaaaatctttcacggatgtttctcttcctgattcatacacaatccgcaatctcaaatattgaattcgttcctgactctctgaggataaaacttctcctgattcatggactacttcattataaatttctgaaaccattgctaaaatattacgaattttgcttgttgtcagtgtaatatttcctttgcggtctgtcatcagatttttgatcacttgttctgcttgatcaacataattttccttattaattcccatctaatcatcctttctatctcttgtcaaataagcatataaataaattgccatctctagctgtttcgcttcttctttattttttatccactgatacatagattttgaaaattcctgatatatctgtttcacttcttctgctgcattcttctctggctctattcttgccaactgatatgcaaaccttgcaatgtttatctttccatcctcttcctgattccatgtagcccgaatcaaatctaaaattcgatataagaatgcttttcctcgttctttctcacatgtctcaagatattgttttaatattctaaatttctcttcaatgatcgtttctataaattctgtccagtggaatgtatatttcggatcaaaaacagcaactgcatttttccctgtcatttcttttgctgcatcttctaattcgcctgtttgctttgccataacagatattggatattttgaaggatataagccaattccccctgagatttttaatgttccctgtgtatatttctttaatgcataataaagatctaccgcaaatcctataatatcgtcccagcttcctacaataaacagatcatctccacctgaataaacgatcacagcattgcgctttttatcctctttttctttcaaataaaattcgccattctctaataaatggttgatatgatatttaaaaaacatcgatagctttctggaaaatgttgctgttcttgataatgttacatatcgatcttgattctcttcatttttaaatcctgaaacaaatgcttctccaagattatcaatatcagctcgtaaaacacctaatctttcgattccctgtgctcctttcgctaattctccaaaatcgtttccatttttataatctcctacccaaagttttgtcgcaatagaataacctgaataaaattcatttttactataagctctaatataattatcctgttccatcctctgtcgtaatttcttttcattgctttctgttgtcagataacaatctcctggcaatggtaaggaagtctcttcatgttctttactgatcacaaagaaattattgctcatcatcttaacagccatttgttccaatccccaacagatctcacactgatcattttcttttaggtgatccgtccttctgcaaatactacattctcgttctcccgattcttcctgtctatgatttagccatacaatatctttcgctgtatatctcttgattttttttgctgaaatattttttgatattccccgaaagatttctgtatagcttccagctggttcattttccagatcttttgtactacatacagcataacccgctccaacatacaaatctgtctgaaaaacttccaagaaccattgattaacctgcttttcatatctttctatgatcgactttgtcttttcggtatttgccattaaaatatacgcatgtccaccacctgaataaattagatttgctcttgataattcaactttttctaacaactcatctatcagatgttccatcatgatctcaagataaaaagatctggcacgaagaccttttaatgcacctttattattgatcgtatagataaaatcctgaattcctgatatatccatgctataaagcaaaaatgttttcttttgatagaattcttttgcttgtttataaagtattttttcataatctgtttcgttattttctttcatatattcatagatacaacttccgattgctgctgttatttttacatgatcatataaagaaatatctatcatttgtttttgtgatgtagaagatggaacaaatgacaaggttgcttccaatatttctaacaatgagttaatgtatttatcatcatatgagaattcctttaaacactcttgtatcttctgataaatactacgataaaaagattcatcatattgtatcttatctgttgttggaaagttgatctctttatcctttccaagcattgccggtctgtaatgttcatttcctttattatggtttaatatattaaagatactttctaacgctatatctcgaacaaagccaccttctccatcttctttatctcttcgatctaatcctgatgctatattatcagcaatatatgtaatgtaagccaaagaatccttattcagatctgcctgtttgatatttcggctgtgatgatatcttatctgatctaagatatcttgatcttttatatccacatcatttttcaaaaaatcatatccactctggctatgatttctgccatcgtcacttcgatataatactttgccaatatcatgcagtaaaccaccgattataacttttcgctgattatcattcatcttatcacactcctatctgtatccttcccatacccaatgctgttttaattcctaccgcagaatattgtccgaatactgccaacatcttaatcaaattcaccagttgttgtggacctttgactcgcattgtgatcgtcccaacaaacgctggtattcttactccttctaacgaaaaattcacgcttcttaaatgatatcttgtgatcatcacgtaccgttcaatatgttctaacgtttcttcacttccaaccattgttcctgatgaaaaagtatcatatttatgtatcaaactttgaaatatcagacgaaccgttggcataaaaatataatttccctgactcttaaaggccgttggcgaacaaaattttattgtaatattccttggctgctcttcaaaataatagttttctatcaatgtatcgtaggagatttcttttaaatttctttcgcatacctttagacgcaattctctatgtttcatataaaactgatccattttcattaatggctctatgatctgtatctttgcttcttctgtcatcgtacagattctccatatgaattcatcttcttttatattacatacttcctgtacaaatggttttaacccgtcttcatgcattcgttccccatatgctctgtcaatatgtcccatcaaaatcccatgcataaccgatgatatattgtaattaagtttttcttctgattgatattttaattttatttccagttgtgtgatcattgccctatctttcctatgattatctcattcattgcatcatatgaattccaatcttctttttttatgttccaacgcagtttctttacataattctttaaaaatccgtaaatttcttctggcgtgtatccactgtattttttaacccagctggctgtaattgatactagattatgtgctgagatatttcgtgttgttatttctatatcacgaatctgttttgtcatcctctttatttctgcatctttggataactcatctatgatcgctgtcaaatgatctgaatatacatcttttcctgtaaatccacctctatccaaatatgcttgatctagagcatttttcaatgctttattactttctatctttgaatgatcccatttccattgttttgttttcgtattttgccaacaatattttttccaatcaattcctgtatattcttttgttgctatcttaaacaattctacaactgctggtgtgatagctcttaagaaatctccatactgttctttttttatctttatttccaagcttaataaatactcaaatattttctgttgttgttctatcctaactggaataattgatatattatatggtttcagaaggttatcaatttctcctatatttaattgcaaacggctattcgctgccttcaataatgccatggtttcatcatcaaatggttctgtcatttccccagctatctgtaatgcagcaacataatcatatgctttgatatgtttaatgatcgtttcttttcgcacctcatctaaaagataaaaatgttcagattctttgcatcggttcacaaataattcttcatcattatcttcattcagttcccaataaccttctacatcataatcatctctatcttcctcatgtggattaatctttttcttcggagtacttacctgaatcgcctgcatatggatttcccccatagccgctaaaatctgtaatgcactcttcatagccggtgttcctgaagatacattaaggattatttcactttctggattcttatctctaatatcatttaaaatttctcgatattctttcataaatgtatcaaatacctgaacctcttccaattcatttttttgtatttcaataatttcaaaatgcttatccagctttttccccaattgttctaaacaatatctatatctgtcgtctttttcctgaaattcacacatctcttttgataaataaagatagactatatctggcttatatattctacaaatatgcaacatcgctccatctctaaaattagagatgggatctgttccccctattggtgaaaataaaattttcttcatactctttccttcctttttattaattttgtatattttttctccttattataccatatttaatgtatattttacacaatttatagtgttttttacttctatcataaataactttaaaactaaatcacaaaatataataaaacccacaaacagtaacatgttttcctactgcttatgggtttattctctcaatttataaatcttctatttctttcaagatttcttctacttcaggtatatcaacctgacattcttctgctattttttcctttgaaaaaccttgtttttttaatcttatacattgtaaaaataattgctttccttcctttcttccttcctttcttccctcttccaatccttcttctctcgcagttttcatcctgctgatttcatcactatatgccatttcttctcgcaaatacaaatatcgttctctttcatcctgactcattttatacatctcatctttcaccgcctctctatatggatttcctttaatcgtatcgtcaacttctttccaatcttttgctgcaagtaattttgcccaatagtatagttccgtttctttttcttccttggcagcatcttctaatttctttaattgtaccacgtgaaattgcaatttgtcattatattcttcccctgtttttatatccaataatttaatatgatgatgaaaaccttgactcctcatcaaattaaaatctaaaatacctatatgtatacatggttctaattctccatatgattgtccgtgataaaatccatctgtaaacatcctgcaattataaaacaaacttcgttccgtccaatcattctgataacgattttgcatttctatattgattttcttattattgttcagataaatttttacatccagaatcccctctttttcctgttcactttccccctcttcaaatggatctgtaacttttaaatctgctatctcatcctccttcaatcctaataacgccatcaaaaatccttttgctatgtaagtatttttaaatgttttccgaaaagcataattgttcgttaattgaatattcaatccattactatccgctgcttttttctttagataatcatctcgtgcataaagtttgttgtttgtcataggcattactcctttatattcttacatttattgtaaattttattatacccacgattttgaaatgtatcaagatattattgtaaatatttctattattttacattttaattcaaaataaaaaggcgacttcatatcgccctttatttacaactaattatactatctcaatctgacacatcttcatagcttccaacgcattcctatgactctcaggagtcactcccgcacagcatgaagaatcaacacttaccttcacttccggcagtgctgctttaatcagcattgcattggatatcacacagatatccgtacataatccgatcagttcgatttcaacttcctgatcttcatatgtttccttcaatatctgtgccagttccatagaaccaaaagttccttttctacagaaattatggacttctgctttcgtctctgcgattgcccgcatgatttcgctgtttaatgcccagccgtcttctccacagatacaatgtttgactggaagattctttccttcctgtgtggatagatagtcttcctcatgtgtatcgagcgttccatagatatcaccctcaaaattacggatcttttccgcaacaggtgttacgatctcctgtgcttctttggttccaaggcttccgtcgatgaaatcattctgcatatcgacaacaattaatatatttctcatgaaagtttagctcctaccagctggtttacaagtttaccgtcagcttttcctttgactcttggcatcaggttcttcataacttttcctttatctttcattgtcggcgcatcaattccaagttctgccaatacagcattgatctcagcttcgatctgttcttcgctcatctgctctggtgcgaactcttctaagactgctaatcttgctttgcattcatcaatgatatctgtacgatcagcagggcaagtatccattgtctcttttgtctgtttgatctcttttgcgataattgtgttttcttctgcctctgtcagatcttctctcttatcgatctgtgcgttttttaatgcacttaataacatagaaagactttcttttctctctttgtccttattcttcatcgctgtcatcatttctttgcggattacatcaatcatactcatagtttcttatcctcctgtataaatgttctcttgacatctattgtagcacaaaatactatcttcgtttcactaattttacaacatgactcaattatatttcccaagaattccggcttccttccaattttctctgatacgacaacaccagataatcttctttatattttctgatctccagaatatctggcttcgtgatttctggaaaacctgcttctgaaaatacatgaatatatctcttctcacaaggtttgtcgtcttcgatcacttgtcctgcatcgatataggcactttcgatatccagacgtttcccctgtcttgcagtgatctttgtctgttcatatacttcaacatccttcgtcataaacaaaaacaacttcactggatggacctgaatgcttgtctctgaaataatttcaagatcacatggaatatgttgtcttataatataatttttcaaaatacagagctctttaaattcattcatgttcgttgctttcaaaatccccatgccaccaagttctggcatatctccaatacttttttcttcaatgatcataactgatcttcccatttctttttgaaaatttgcctctattgcatgtttcagggttgcacctacatataaaatatctgtttttttatctctttttaaaatcggataaactggaaattccatctgttcctgccaaatagaatgcatatactactacctcctaaaaattgctctcgtaatagtatatgcataattcatcttaatattgacattttcctacggttcttggatatggaatgacatctctgatattagcaattcctgttgcgtacattaccatacgttcaaatccaagaccaaatcctgcgtgtcttgtggaaccatatttgcgaagatctaaatagaaatcataatcttctggtttcatacctaattctgtgattctctcttccagtttcgcaagatcatcttctctctggcttcccccgatgatctctccaatagctggcactaaaaggtccatggctgcaaccgtcttgttgtcttcattcatcttcatataaaatgctttgatctcttttggatagtctgtgacaaacactggtttcttaaagatcttctctgtcagataacgttcatgctctgtctgaagatcaattccccaagatactttatattcgaattcatcattgtgttcttctaataattttactgcttctgtataagtaactcttccaaaatcagaagatactacatggttcaaacgttctaataatcctttatctacgaatttattaaagaactgtaattcttcctgtgcatgctccatcacataattgatgatatatttgatcatctgctctgcaaggatcatattatcctcaagatctgcaaatgcgatctctggctcgatcatccagaattctgctgcatgtcttgttgtattggaatcttcagctctgaaagttggtccaaatgtataaatattgcggaatgcctgtgcaaaagtctctcctgcaagctgtccgctgacggttaagctgactggcttcttaaagaaatcctgttcataatcaacttttccttcttcagcgatcttgttaagatccatcgttgttacctggaacatctctccagcaccttcacagtcctgtcctgtgatcaatggtgtatgcacgtatacaaaatcacgttcctgaaagaatttatggatcgcatatgcaatctgagaacgaactctgaatactgcctgaaacgtattcgttcttggtcttaaatgagagatagatcttaaatattctaatgtatgacgttttttctgtaatggataatcggatgggcattctccctcgacttctacactctttgcatgaatctcaaatggctgtttcgcatctggtgtcacgatcacagttccattaacgatcacagctgttccaacatttaatttgctgaccgtatcaaagttgcccatctcctgatcatatacaacctgaatcggttcaaaaaatgtaccatcattaataaccagaaatccgaatttctttgatccacgattgctttttacccagccgcagatctctacttctttctgatcatattctttgtaatttcggaataatgttcttcctgtcatcatttccatgttatctttgtcctccgtttttcacttagaattcaaataaattcagcccgatttcttcatcaaacttgcggtcaactgtgccttcgatctcagttaatacaagttctccggttccgctgatcactgcttctgtcagatgacctccatagacattccctgattcatccgcaacactgatatggaagtgtgtataagtttccccattcatagtattgatattcccaccaatggaaacgatctcaagatcaccttcccatgtatggcctttgaatactttttcctttgtatcaaaaacaccagctgttactttgcctgctgccccgattcctgttaagtatgcaagtttgatattttctttttgggcgacctcttttaattttgcacagatttcttcgcctttgtcaattcttattacgtattgattgttgaattttttgtattccatgatcatcgactcctttttgattttataatcctgcatatatcttaacgcacgtgctatttcttttctaggtgttttcattgattttattaaaaaaatggatgtcttcttgtctaagaaaacatccatctcttcaatctttattctactttcatttacctgacccctaccatggaataatcacaaataaaccacccgcaagcaatgctccaataattggacctacaactggaatccatgcatatccaaagttagaatcccctttccctgggattggaagaactgcatgtgcaagtcttgggcctaaatctctggctggattaatcgcatatccagttaatccaccaagtgacataccaatggaaacgatgattgcaaatacgaagaaatagttaagtcccatagaacctgcattttccacatttccgattccaagaatcgcaaaaactaaaacaaaggttccaatgatctcacttaacaggtttaatcctgtgtttgcaatagaaggtcctgtacaaaatactcctaattttgttccctgatctttggttacctcaaactgccctgcaaataagacatacacaaggactgctcctacaaatgctcctgcaaactgagcgatcacatatcctggcaccatagaccaagagaaattaccaatcgccgcaagtgcgatcgtaagtgccgggttaaaatgagctcctgatgaagatccaaaaataaatgctggtacaagtaccgcaagtccccatgcaaatgtaatctgcacagcccctgcacctttcattcctgatctttcaaggtttacatttgctacaactccatctccaagcaagattaaaagcattgttccgataaattctgcaatataaggtaacatagtttttccctcttttctcttaattttttagttttgcatgatatattaatttttagcccatccgaaagaatattttactgccttttcccatcctgctaatttttcttctctttcgtcctctttcatttctggatggaacttgcggtcaatattccagttgttgataacgtcatttttatctttccagtatccaacggcaagtcctgcaagataagctgctcccattgcagttgtctcaacacatcttggacgacgtacttctgtattaagaatatctgactggaactgcattaagaagttgtttgcacttgctccaccatcaacttttaatgcacttaatttgattccgctatctgcttccattgcttttaacacatcatatgtctgatatgccagagattctaatgtcgcacgaatcacatgatatttattgacacctcttgtgataccaacgattgttcctcgtgcatactgatcccagtgtggcgcaccaagtcctgtaaatgcaggaactacataacagccatttgtatcttttacttttgaagccatatattcagaatctggtgatgaatctaccagtctcatctcgtctcttaaccactggattgctgctcctgcaacaaaaatagacccttctaatgcataattaacttctccatctaagccccatgcaatggttgtgatcagtccattatcagaaaatactggttttgttcctgtattcattaacagaaatgcccctgttccatatgtatttttggcctcccctgctgtaaagcatgtctgaccaaacaatgctgcctgctgatctcctgctgctcctccgattggaatttcttttccaaaataactttcgtctgccattccataaacttcactggatggtcttgcctgtggaagcattgattttggaattccaagttcttcaaggatttcatcatcccattcgagagtattaatattaaatagcatagttcttgcagcatttgaataatctgtaacatgaactcttccttttgtcagtttccagatcagccatgtttctactgttccaaataaaagatctcctgcctctgctttttcacgtgctcctggtatgttgtcaagaatccattttacttttgttccactaaaataagcatcgatcattaatcctgttttttgtcggaatttctctgtcagacctttttcttttagctgatcacaatactcagatgttcttcggcactgccagacaattgcatgatacacaggttctcctgtattcttatcccagatgatcgttgtctctctctggtttgtaattccgatggctgcaacctgatctggtgtaatatttaacttgttcattgcttctactgctactccaagcatggaagaccagatctcatccgcatcatgctccacccatccaggatgaggaaaatactgtgtaaattccttctgtgcaacactgcagatcacaccttgctcattaaataagatacaacggttacttgttgtccctgcgtccagtgccataatgtattttttcataataactacctcctatgactcttttattatatgttcatattacattatgcataattttgtgtctattatttttctttttttgtgcatttttttaaatttaaaaggtcgaaaaaaccctcttttttcactaaattttgttcaaaaagagagtattttcgtgaatttctaattttttattttattattctacaacagtcgtaaatttttcccaaggaatatcaacttctgcgccttcattgatgatcgcatctacatgcattaacaatgggaagtcatctaaagatacaacgcctctttctgccagtttacgtacggcacgagctgttcttgttgcaataacgatagactctaaagttacaccctgtaattcttccattgcctgatcaaatgtcagtccacgtcctaataatgtaccaatcttacgagttcttccaccgaagactgttacatataagtcaccagctccgtgaatgatgttttctggtccaccatgaatcagttctaacagatggatcatttctttgacaccctgtccaaacaatgctgcctgagaattataatgtactgctccgatctctccatctctcttctctgctaaaccaactgcaagagacacacctaatgcataagcattcttcatggctacggcacactcaacacctacaacatctgtagaaagactgatgtgatagtaatctgttgttaataaagatttgatgaattttaatgtttccatgtcttttccacagaaagctacatggctgtcatcatggtctgctaattcataacttgtacatggtccaccgatggcgttaaagttaatatgttttccttctggctgtctctgttcgaagatatgtggataaggaactaaagttccgtcatctaaatctaccataccttttgttactgttaataaaggtacatcttctggtaatactggaaggatttcgtcacagaaccagtcaagtccgaaactgctgactccacctaagattaagtctgctccttctaatgcttcttctaattcttcgatctgataatatttgatcccatcatgaagagttctctttaatgtgatatggaaattatccttctttaatccatcaatgatatctctgtctaaaggtgatcctaccagacgtacctcgtgtccattttcgaatgctgggaatgtgatcgcagagttcatctgacctgcacaaacaaatgtaataacgctcatttgttatcctcctgaaatttaaatattttacttaatcattttatttattctgctacttttttgcaagctacaacgtcaactcctagtcctaatacgttagggatcactacatccccgatcgctacaggagctttcattgttactttatctaattctttcatgatatcatagattttaccctttggaatatcacttgcggttttgactggaactcttcttgcagtctttgcttctactctgactgtagaagtgatcactcgtgttggatttaccagttctttttctccgtaagcggctcctcttgggcatccatttccagtaaccttatatccattttcttcatcaacttttaaatgacatccttttggacatacgatacaaattaaatctgtcatctttatgcacctaccttttctacagatactgtaatctcaccattttctactttatctaaaaatgctttcggaataacgatcttttccatttctcctggtgccatgtgttctctcttaaaggaagcaagttcctcaccatttgatcttactttgatcgctacatctgtaaatacgtttcttgcacggaacataacttcaactttcttgtctacattagatggacgtactttctgtggcacgattccgttgaccccatctccatttttgatatcgatgcatgtctgatcttttgtttctccattttttacgtattctgcagcactctttcctgccttctggctttctgctgtaacaaagtctactaggtcatgaacatgaacgacatttccacttgcgaagattccttctgctgaagtttccatgttttcatatacaactggtccacttgtggctggatccattgtaattcctgcagatcttgttaattcattttctgggatcaatccaacagataataatacagtatctacatcaaattccatctctgttcctggaattggttgattcttttcatcaacttttgatacgataactttctcaactcgtttatcaccctgaatatctgtgatcgtatgtgataaatacagtggaatatcataatcatttaagcactgtacgatgttacggtttaatccgttagaatatggacaaagctctacacatccaactacttttgcaccctctaaactcatgcgtcttgccatgatcagtccgatatctccggatcctaagatcagtactttcttacctaccatatatccttcgatattcacatatctctgtgctgcacctgctgtaaacactccagccggacgatcaccagggatcgcgatggctcctcttgttctttcacggcatcccatatttaagataatggatttaccttcaagtttcatataaccatttttcttattcatggcatgtacacatttttctgtttcatctacgtcaagaaccatcgtatcaagcatcacttcgatatttgtttcatttaacatatcaatgaatttacctgcatattcaggtcctgttaattcttctttgaaataatggagtccaaatccattatgaatacactgatttaagattcctccaagttcctgatcacgttctacaaccagaactttttcggcaccatttttacttgcttccactgctgctgccagtcctgcaggtcctccacctacaacgattacatcatacttcattatttggcacctccatcttttgtttctcctgtgataatgtttgttcccaaacgatcctgtggaatatctgctaatggtttattcagctctcttgcgatgatctcctgaactcttggtccacagaaaccaccctggcatcttcccatacctgcattacatcttctcttgaccgcatcaatggatgttgctggaattggacgatgcactgcgttgatgatctcaccttctgtgatcgtttcacaacggcagatgatctttccgaatgctggattcttttctactaatttttctctgtcttcatgacttaaatgtttgaagcggtcgatatgtctttcatctacgatatcttcttttgcttctaatgtaagtcctgaattttcaagcatctttaaaatatctggtgcaattgcacatgcggatgataatcccggtgactgcattcctgcgatattgataaaccctttgttgtttttgtcttcataaatatggaagtcatgatctgctgttcttgctctgactccagcaaaatttctaatagactctctaaaattaattcctggtacagattttaatgctgtatttctcacaaaatcaagtccctgttttgttgttgatacatcattcgctgcacttggctgtgaatctggtccaacgatcaggtttccatgaaccgttggagcaactaaaactccttttcctttttcatttggacattggaagattacatgattgaccagatttccctggctcttatccattaggtaatattctcctttatttggtgtgatctcaaatgttttttcattacacatctcattaactttgtctgcgaaaacacctgctgcattgcaaatgtattttgcttcgatcactccgttgtttgtttctatcttatatgtatcattttctttttcgattccggaaacttctgtattaagtttcacttcaactccatttaatacggctgtttctgcaagtgccagggctaattcccatggacttacgattcctacatttggagaacttaaagccgcaacggctttgtctgaaagatttggttcttcttttagaagtttttctttatcccagatttccatatcaggaactccgtttgtgatacctctttgttttaattcttccagtgttttcttttcttcttcactgaatgcaactaccaatgctccgatctgtttgtaaggtacatccagtttctcacataattcttttgtatagacatttcctttgatattgtactctgccatctttgttccaggctttggatcatatcctccatggatgatcgcgctgtttgcttttgttgttcctacagaaacatcattttccttttcaacgattacagctttcacattatattttccaagttcgtaggcgatagcgcagcctgtgatccctgcaccgataattgctacatcatacactgttattccctcctgtttttcacttgcttttgttgctttctgactctatctaaccacaattttttttgcctgtcaaacccgtcaaacgcccattttatgcggttttcagagtttttctattaatcattttatttgattaacaaatgatttctttcaaggtttttggattatttttcttaaagtacgtgttcacttgttttttgtattaatcaattgtataatattaataatcgctagcttattttgattagtaattcaaattaatcaaaataatttttgatttatctattgcaaatgaaatgtatagaaaagagggtactatttatgggaaagcgaaacaaagtaacaacaagagatattgctgaatacactggtgtatcacagtctactgtctctatgatcttaagcaacaaaccacatgtgtctttttctaaagaaacaatcgataaagtaagacaaggtgcaaaagaacttggttacaagaagcctgttgctggtgtaaaaaagaaagaacaggcacttgctaagagtatcatcgttatttgtccacttctttcgaatggttattattccatgatcattcattcgatcacagaacgtgccaaagattatggttataccgtatttactgtcagtacattgagggacgtctctcaagaagaactctatttaaaccttttatctgggtttgaacttgcaggcgttatttctttatatccaccaacaaagattgcacaggcaaatgcattatctaagcaagtccctgttgtttccatcggtgataaaccagatgcatgtcgttttgatgcagttgaacttgacagtaaaaagcctggatatattattgctgaacatcttctctctcttggccataagcatattacttatatctgtacaccgatccgcccaaaagagattggccggatccatcgtcttgctgggctgcgttcttgttttaaagatcatggtcttgatccggaatgggtggaggtaaaatctcctacgattgctgcttacggaagatattctgcggataattctgaatatcaaaacggatatgatatggcttctcaagctttagatgaacatacttcttccactgcttttgttgggaataatgatatgacggcttttgggatcatggctgcgatctctgatcatggattccgtgttcctcatgattactctgtctgtggatttgacaacattcctttatcttccatgcctcagattgctttaactacaatcgaacatgcttctttggcaaaaggtcgtgaagctgtggatattatatataagaagaacacgcagaaaaatatctctgccaaacatcattatattatgcgaatggaatatgaacctgaactgatcgttcgtaattctactggaaaatgcaaaacaaaaaaatgtcacaacatctcctgaaaaatatgacattagtatgcattgattttcatacactccgtacgttatcatataaccatgataaacgtttatgagtaacaaataaggagggcgcatggccagcaaacttctaagtaatgaattccagaaacacatttgtctggattatgaatgtactacaattgaagaagcaatccacaaagcaggtgatctcttagttcaagtcggatgtgtaaaaccaccctacattaatggtatgatccggcgagaacaagaaacttccactgatatcggattgggggttatgatcccccatggcacagaagacactctgaattttgttttaaaaccgggaatcagtattgttcagatcccacatggagtttcttatcatggaaataccatacatctggtgatcggcatctcaagccgtgaggaagattctctgcaggagctgatgcagattactgatattttattaaaacctgaaaaatgccatcaatttttaaatgcttcttcaaaacaggaattcattgatatgatcaatcagaattatgtagaagaaggagagttgtaaaaatgaaagaaaaaactagtatttcacaaaaactccagaaatttggttccgttcttgcaggaatggttattccaaatatcggagcgtttatcggatttggtttaattaccgcattctttttggaaacaggatggactccaaatgcaaaacttgcaaaactgatcagtccaatcttaaattacttacttccaatcttaattggacatactggtggtaaaatgtttggtggcgatcgtggtggagttatcggtgctctcgttactatgggtgcgatcgtagccgttgacggaactccaatgttcttagctgccatgatcttaggacctgttgctggtgtttgcattaagaaatttgaccaggcagtggatggaaaaatcccttctggattcgaaatgatcgtaaataacttctcacttggtattatcggtgctatcctttgctgtttcgcaatgttagtattcggaccagttatggaaactgtaactactgtattaacaaatggtgtaaactggatcgtagcacataatgcattaccattatctgcaatcttcgttgagccagccaaagtattattcttaaataacgcattagaccatggtatcttcggaccaattggttatgaacaggttaagactttaggacattccgcattattcctattagtgccaaaccctggtgctggtcttggattattattagcttactggttcttcggaaaaggagaaatgaaagaagctgctcctggaatgatcttgatccacttcttcggtggtatccatgaagtttacttcccatatgtattagcaaacccattaacgatcattggtatgatcgctggtggtatcgtcggaacaggaacacttacattcttaaatgttggtactgttgccacaccatctcctggtagtatcttctctgtcgtagctctttcacctaagaactgtatgttcggagttttattaagcgtcgtattatcatgtgttgtatcattcttattaaatgctattttcgtaaaacgtatggtagcaaaaggtggagacacatctctcggagaatctgtagtaccaaaagaagcaatgggatcttctgctagttcaaatgaatctactgcaataacaaatgacagtagtcttggagttgccggaatagatatcaaaaatattaaaaaaatcgttgttgcgtgtgacgctggaatgggatcttctgcaatgtctgcagcagcattaaagaaaaaagtaaaagccgcaaatcttccaattgaagttatcaatacagcaatctcaaagattcctgatgatactgacctggtcatcactcatgtagaattaactggaacagcaaaagctgcccagcctaataaacaacatttatctatttcaaactacctaaaagctcctgagtatgatcagttagttgaaagatttaaaaatgaattataattaaacaatcaatgaacacattatcaaaggctaaggacttatctccttagtctttgatgttatcacaatacaaagatatgactatagaaaggaatttttatgaaagctgttatgtatggtgctggaagcattggccgtggctttattggcgcattattctctgaaatcggctatgaagtcgtttttatcgatgtaaacgatgacgtgatccatctgatcaacaaagagaaaacttatcctcagattattatgaacgaggaacaacctgttcactggatcaaaaatatccgtgctgtggatggaaaagactctgaagctgtcagcaatgaaatcgctgacgctgatattatagcaactgctttaggtgctgcagtccttgagaaagtggctcctgtcattgcacaaggacttttaaagcgttgggagaaagaatcttcgaatactctggatatcttaatctgtgagaatctgatggatgctgatgtactgttacgagactatttattaaaagctcttccagaagataaacatgctctgtttgagaaaaatgttggtcttgtagaaacttccatcggaaggatggttccacctgcagatcctgatctgattccagaagatgaacatccattggctgttcgtgtagaaccttatgatttccttccagttgataaagctgctttcaaagggatgattcctgaatataagaagatcattccttatgaacctttccattactatctggaacgtaaattatatgttcacaacatggcccatgtcacaacggcctttttaggacaatatttaaataaaacctatattcatgaggctgcccatgatatttatattcagtctatcgtacgtggctgtatgacagaaagctgtatgatgctttcagaaaaatatcaggtacctttctcaaagttaaatgctcatatgaatgatttactgcatcgttttaaaaattcttatttaagagacaccgttacccgcgttgcacgtgatcctatgagaaagcttcaaccttcagatcgtctgatcggcgctgcaagaagctgtgaagcactacatattaccccagtatatctttcatttgcaattgcacttgcactttcatttatggaaggagaagatgctttaaatcttatggaaactgtctgtaagatcaagaaagaagaacctattgccaaacgcattatttatttttataataagattaaaaataaaaatatttctctggatcaattatatacaataattgataatcttcaatctgatatccagggtgaaactatttagaaagaaaaggtgagttatgctgatctcagatcgttcaaaagaaatcattgaaaatttaatgaatgcaaatggtccgttaaccgtatcggctctctctaagaagcttggtgttactgaacgcaccatttatcgacagattcctgaagttaccgagatcatagaatcatatgatcttactttagataattcttctggaaacggttttatgatctttggatcgctctataatcttaaacgattaaacagtgcttttgaagaagtcaaaacagaacaaaattattccaacaaagagcgtgttgatatcattcttttgactttattaaacgaagatgattatatcaaaactcaagctcttgcaattgatctaaatacttcttctcagacaattcgaaatgattatcagtctatgaaagaaaaacttcagggacataatgttcaatttgaaaccaagaaaagtgaaggagtccgattaactggccatgaaattccaaaaaggcatttatttgtaaatgtcttacttcaaaatattgctcctgataacttttttgactggctgaaagacaacaattatcgaccaaaccattttattgatcttttaaagaattttgactacgaagaacctttaaaagttctttatcagaaaatgcaaaacgttattcgtaaaaggcatctaaatatttcagataaagaacttcaggaatttcttgtcttgatcgctatttttattaaacgacattcctatataaatgatcaagaggatatcttaaaactaacgatccaagactcaaatacagattatgaagatcattttcgtcaagatatcctcaaaattcttgaagttgattttaaaattcagctttacgataatgaacgggattattttcattggatgatccatctatacgttggacgttcacactatgaattgaatcaacagatttctgcttttcagaatcttgatcatatcagcagcctgatcaatgaaattgaaaagaaatttcattttccatttagcgaagacaagaatcttgcggaaaatcttctattacatattaatatggcaatggaacggattcaaagtggtattaccgtaacaaatccaatgttagaagatatttatcagtctgatccaaaactttatgaaatcgtgaaagaaagctttcgtaatatcttccagcctataaaaatccctgaagatgaaataggttatattgttatttattttattgcatctatggattatctaagcaagaattcgatttctgttttggtcgtatgttctaccggaatcggttcttccaagatgctgcgaagccgtctggaacgagaattttctgaaattgatgttaaaaagatcatttctttacataaattgcatgatgaagatttaaaacaatatgattttattatctctaccgtccctttggatctggatgaaagtaaatatttgtgcgtttctcctcttttaaatgatggagaaaaagaaaaagtacgaaaacaaattgatatcttaaataaaagataaagaaatagtacactaaatttctattaaacggaaatctggtgtactatttcttttttatacctaagatttttacaaaaagaaaaagaccttagatattctctaaagtctttcttagttgcgggagccggatttgaaccaacgaccttcgggttatgagcccgacgagctaccagactgctccatcccgcgatattaaattacaaaagaaacactaaaattagtgcttctaaaaggcgtcgaccagatttgaactggtgatcagggagttgcagtcccatgccttaccacttggctacgacgccacattaaattatatgctctttccgtaaaaagatgactccaacgggatttgaacccgtgttaccgccgtgaaagggcggtgtcttaaccacttgaccatggagcctgattgttcgaccgcttcacggtcttaatactttattcagtatttaactccccgagccgggctcgaaccagcgacagcacggttaacagccgtgtgctctaccaactgagctatcgaggattattataaggtttattcttattacatcatataccttcaaaacaacatacaagaatctttctacatctcttacacttcagccttctttggttaaagcc

SEQ ID NO: 763 - DNA, 1484 bp, Unknown
  gut microbiota DNA sequence
acaacaaattaaagaaattttattatctgaaattcacgaggtgtctatcaactatgaaaaatactgcaatgatcccaaacgtgatttttccagaaaacgcaaactaccatttgaactaatgctgaaaaacatcataggaatgggaagcaaaagtattacaaatgaattgattgacatctttcaggcttccggtgaaatgccgtctgcatcggcatttgtgcagcagcgcacaaaaatcagaccagaggcactaaaagccgtgtttgatggattcatgagcaggatactggcatcggcggacaaaatgagaattctggcagttgatggctctgatattcaggttgaaacaaatcccaaagacaagacgtcacacatttccacttccatagacaaaaaatcctttaatcttttacatttaaatgcattgtacgatttggaggaacatgtttacactgacgcaataattcaggctgcaaaaagccaaaatgaacatggagctctgaatgaaatggttgacaggtctgaaatcccgaaggctcttgtgattgctgacagaggatatgaatcttacaatgacatggctcatatacaggaaaaaggatggttttttcttattcgcataaaagatggacgtaatggcataaaaatgggacttgagcttccgaggagaaatgaatttgatcttgacgtgtcattgaagcttaccagaaaacagacaaatgatgtaaagagattgcttaaggataaaaatcattatcgttatattgcaagttcagtgacatttgattttctgccttcacactccaaaaaatctgaacagacacggttttatgagataaatttcagaattgtaaggtttgaaataacaccgggaaattatgaaacgatactcacaagtctggatgtgaataaatatcctccgaaagaattgaaacgactgtatgcgctgcgttggggaatagaaacatctttcagagacttgaaatatacggttggaatgttgaattttcattcaaaaaaggtgatgtgcattcatcaggaaatctacgcacatttaatcatatataacttttctgaaatgattacctcacacgtagccattagcaaaaagaaaagattatatacatacaaagcaaacttttccgtggcagttcatgtgtgcagattattcttttatgaaaaagcgacatcacccggattggaagccataatttcaaagaatctgattcccatcagaccggacagacattatacacggaaacggtcagaaaagggattttgtggcttcctatatagagtagcataataattggaaattgaaaaccaattttagacagacttagatctgtcttattgtgatgtctaaaattaaaaagaaagcgattgaagaaaataatttctcaatcgctcttgcggtttcattgttggaacaatgttaacttaatgacattgaccttggattccttctcattttttgtatggat

SEQ ID NO: 764 - DNA, 260 bp, Unknown
  gut microbiota DNA sequence
ttttcaattcatagtatacaggtaaatccacgatcctacaaacttgggggtcattacatattgtctccctggctgcgagccaaaatgcccgcagctacggtcagacaatcaaccacagggcgctgcgaatttgtaaaaaacgcattcaaaaagtgctcatgttgtcaccctgtattcttataaatgttttttcttatcttctttctgactcatacaacggaacgctattcaaatcactacacagtgtgtatgttaaacgg

SEQ ID NO: 765 - DNA, 73861 bp, Unknown
  gut microbiota DNA sequence
ttaataatttttgtattcgttaacagaaggtaaaagaacttttacagcaccgatttgtagggtagtttgatgaactgaagttattggtggaatattataaaaatggttatatgtctgcgacgcgctctcgctcgactcactacgcagctgtactaagctcctgaatgatcggaagcgcagcattagaattttaccacgttttttacggattcgcagccggcttggtgcgttgtttgagcctcaaagagttctgttttcaatacttttgaaggcgagttacgcaaggaaagccggcggatcagcgatctgtaaaaaacgtgagtaaaattctctagctgcgcttccgatcgtttatttattttttatcatatactcgaaatctacagttgaccaacttacaaaaatttaaatttatttcttattcaacgtctgctaatgctgcaagattttcttctcctgtacggattttaataactttatctacgttgtatacaaagatcttaccatctccgatatgacctgtgtaaagagctttcttcgcagcttcaatgatgttttctactgggatatttcctacgataacttcaactttaacttttggaagtaatgttgcatcgacttcagcacctctgtaacgttctccggcacctttctggataccgcagcccataacctgagtgactgtcataccagttacaccaacatcgttcattgcttttcttaacttgtcgtatcttgttaattttgcgataataacaactttatacattcctgtaggtacaagatctggagctttgctgacctgtacagctgctgctttctgtactttagaagctctttcgtaatcttcttctccaagaacagtatttgcattttcttccatgatcattgtgttagaaatatccatcatactgaatccagcatatgctgatgttaaaccatgttctggtccatccagaccgatgatctcttcttcttctgttacacgaagaccaatcgttgctttgataattgtaaatgttaaactgatcgtcacggctgtccaagcgcagacacaaacaataccgatgatctgaatctttaataatccaaatccaccaccatagaaaagtccatttaattcacttcctggtgcagtttttgttgcaaataatcctgttgctaatgttccccataaaccgttcataaaatgaactgctacggctccaactgggtcatcaattcttaatttataatctaataaccatactccaaaacaaacaagtaatccagaaactgctccgatcacaattgctccaaaagcatctgtgacatcacatggtgctgtgatcgctacaagtcctgcaagagatgcatttaatgacattgatacatcaggttttccatattttacccatgtaaataccatacaaacaactgttgcgactgctggtgaaattgttgttgttacgaagatagatcctaactgttcaacagatgttgctgctgcaccgttgaatccataccagccaagccataagataaatactcctaatgctccaagtggaatattatgtcctgggaatgcatttacttttgtaatatttccatctttatcttttgtgaatttaccaatacgtggtcctaagaattttgctccgatcagtgcggataatccaccaaccatatgaattgcacaagatcctgcgaaatcatggaatcccatctgagataaccatccaccaccccagatccaatgtgcttcaattggatagatcagtgcagagattactgcagaataaatacagtaagataagaattttgttctctctgccatggctccggatacgattgttgctgttgttgcacagaatactaagttgaatacaaaacttgaccagtcaaaatttgcataagatgtaaaaatgtcaaatccaggttttccaatcaatccgatcatatcttccccgagtaataaactgaaaccgatcagaataaatacacaagtaccaatacagaagtccatcaggtttttcatgataatgtttccggcattcttagctcttgtaaatccggcttcaaccattgcaaatccggcctgcatccagaataccaatgcggctccgatcaggaaccataccccaaagatctgggtatttactgcgttcataatttcttttgtcatatctttgtcctcccatttcgaaagtttttgttttttcattcaggagaaacgcgcgtgtctttactcaatgaattgattgaaggattttagaaatccttcttgataaaaagaaaaggcgttatgaagaatgatctgtgtcatctcataacgcctttgttatggttggaattataaacgccttatttttatttgtcaataatatttttagcattttttatgcaaagaatgtatcttttttagcacaatcttaactatttaattcgttctcaagcatacggtatccgactccgacttctgtaaaaacatactttggaactgctggatttttctcaatcttgcggcggatatttgccatatttactcgcaaaatcctattgttcgtatctgcatgaggtccccagatatctttgatgatagactcatatgtaataacctttcctgcattctctgcaagaagggataccagtttatattcaatctgtgtaagacggatttcttcttctccaagaaagactcttcgcttatcaaaatcaatctttaactgacctgcatgatacattggtgtcttcgtctctgctcccattggctgtcttctatgtcttagggcagtacggattctagcaagcagttcctgattgccaaatggtttggtgatatagtcatctgctccggcatccagggcttttactttctctgattctctgttccttgcagaaatcacgatgatcggagtaactgcccattttctgatctcggagatcacatcgattccatccatatccggtagtccaaggtctaataagattacatccggacagtatgattccgcacactggatcgcctgatttcctgtagttgctatgattggtttgtagccattggtttttaagatcgctgatataaaattgccgatgttttcttcatcttcagcaatcaatacattaaattttatctctgtcatagttccttttcctccgtcaattctttttcatccattggcagactaaaactaaactctgctccatcctcatagtttcttgcatagacatcaccttgatgtgccataacgattgatttacagatacttaatccgatacccatgcccttacggctttcatggtctaatgcacctgcacagccgtcaaacaactgatccaagcgctctggtgcgataccatttccgtgatcacggatatagaatacaactttgttatcttcttctttgatatcaagttcaataggtgcatcacttccggaatgtacccatgcattttccaaaaggttcataattacctgctcgatcaaagtcggatccattggaaccattaaaaaatcttctgggatctttacctttaattcactgtctggatatcgcttctgataacgctggatcgcttctgctacaacttcttcgagaggttccggtactttctttacatgtggctgtgtgtcacttccattgctctggatcctcgtgatactaagcaggttttccaccatgtttaacaaccagtttgcatcttctttgattcccatgacaagctgatctttggcttcttcatccagctggtctttggcttctaaatatgtcgaacttgccccgatcattccagtcagcggagtcctaagatcatgtgagatcgctcttaataaatttgagcgcatcttctccttttctttctcaatctgaagctcattgatctgcttgttatattcatttaattttgcaagttctttctctctcttgacagctgcttctttctctcggtttaagcttgttgttgtcatattcgtgatgattgcgatcactaaaattccaagaaatgtcatcggatatccgtcaatcatgaaattaatcttaaagtatggaaacgtaaatctccaattaataaaaataacgcttaacagtgaggaaacaattccccatccatatccttttgtatatcttgagataaaaaaagttgccaatgtataaatcattggcacattaatgttgtgagctgtctgatagaaaaaaatatgcgcaatgatggtcgcaatgatcaggatcgtaatcgagatcaaaaaatccttctcccactgcatcaaacctttttcattctgccccatgtttattctccattcggccggatattcacatctatcttacattttgagacgtgatcagagttcatactcagatcataatccactttaaggtgcatctgttcttcttcttcgatccagtcaatattgcttgtattgacccccatcaaaagacttccaaatggtgtatcgtagtaagagaggttttcttttccctcttcaaagaccatatgagaagactgtcctccttttcttgtaagttccacgctctttggcccgatctttatgacattttttacgatctcgttgtcttcagaaagttcatcgtataaaatataatgttttccatttctcaggtaataggcacctgtcgtcatcatctcgatcggatcatttggatctacatccatctgaagtcctgaaatattaattaatatatcttttgtcatcttatcttcacttcctaataattctcaatatctaccggctgtacctgatccacacggcatggaagtactttgtcggcaaatgataaaaactgatccgccatatcactgacataatattcatacttcgcagtatgatcttctgatgccgccatatctctctgtgcgagcatctgctttaaagtcttcgcaacttcataggcagggtttacaagtgttaccttatcccctacaaatcgctggatcggattgatcaacaatggataatgcgtgcatccaaggatcaaagaatcaatatcatactgcttaaattctcttaaatatctggataccatatcttctgtaatacggtcatcgatcagtccttcttctactagcggaacaaataatggacatgcttttgtaacgacagttacagatggatctagtttccttaaatattggccatactgtccactcttgatcgttgcatttgtcccaatgatcccgatattcttattcttcgtcgcattcattgctgcgatcgcacctggctgtaccataccgatgatcggcacattataaagttcctgtaaatcagctaaggcgagcgcactcgctgtattacaggcgatgaccactgctttaacacccttactcaacagaaaattgacgatctgtctggaatagcgcacgatcgtatctttggacttcgttccataaggtacacgtgcagtatccccaaaatatatcatactttcttccgggagctgacgcatgatctctcttgcaacagtgagtccgccaactccagaatcaaacaccccgattggtgcattcatatcaaattcctcctaacgatatcttgtcattgcctgatcgatcaatgtatcaagtaactcaggaatgtcaagtccgcatgctttccataacattggatacatactgatcgatgtgaatcctggcaatgtgttgatctcgttaaatacaactcttcctgattcttctaagaagaagtcaactcttgataatccaaatccgtcaacagctctaaagattgcttctgcgtcttctttgatcttacgtttagattcttctggcatctctggatcaacaaccgttttagactctgcattgttgtattttgcatcaaaatcatagaatgcagcttcttcggccgcaaggatctctccaacacatgtactcttcacctgtgttctgtcacctaataccgcacattctacttctcttccaacaattgtttcctcacaaaggatattacggtcatgtttcactgcttcgtataatgccgcttccaattcttctctattctctgctttagaaactcccttagaagatcctgcacaagatggttttacaaagattggatatgggatttccttttccacacgatccattgcttcttctaaatgttcaaaatcactttctctgacatgaacaaactttgcctgatcgattccaatatgatctacgatgatctttgtgtatactttatccattgaaaccgcagatgccaatacaccacatccaacatatggaattttagacaattcaaacaacccttgaacggttccatcttcaccattcataccatgaagaactgggaagatcacatcaactttctgaagtttatatgtaccttctgcaaggatcactaaagaacgagttgttgtatcaggagaaataaatgctttcacttctccttctctccagcttccatcttcgatgtctttaacactatctactaatagccattttccttcttttgtgattccaactaaaattacattatatttttcagtgtccatgtttttgatgactgttgttgctgacagacatgaaacatcatgttcagaggaatctcctccgaagatcactactacattctttttcattgatctaaactcctttatcattataaaaagtatttcatcattatcatttgattatagcacaaatttttcaaaaataaatccttcaaagtaaggttcattctctttatatgcttttttatcgcgaaatgtccatccgtaaattggaatcttgtaaaatctgcggcagatcttgagtggaagacagtctttatatttatagtgataggctatgaaatctggttttgtaataaaatttgtcaataaattcttcacaataaaataaccgattttacgaataaacgtcccttcttctttttcttttaaaaactgctcacttaactgtccacggatcacttctggacggtttttcttaaaccaatacagggcatacggatgaaaacattcaatacaatataatcctttatattgatctaaagctcttgcaactttcttgcataatttacgattgcatgtttccatttttaattctactaataatggtactttgccatcaacttctcttaaaacttccacaaaccttggaattctttctctcgttcccatcaaacgatatctgcataattcacgataagtaagatcagcgatttttttatttactccacatgttctcttaagatcatagtcatggtgaactaccattacaccgtctttggtcagctgaacatctaattctattccatagcctgatccctttgctttcttgaaagctgccatggaattttctggaattccttcttctccatgaaatcctctgtgtgcatagtattttacatttaataccggatgttttcttttctttcccggatcgatcatcttgatgtatacaataattaagaccaatatccataacaggatcatttctcatccctcttttcttctgccatccgcgttaatgtttcgcgttcatttaactgtggatcttctaatacctgatctaacagccaagataaaatttgaccgatttcttttccctgtggaactcccatatccatcaagtcttttccattgatctttaattctttgatggaaaggcagtttttctcttcgatgatttcttcgaataatttctttgtttcttgtaatacctgttctttcttatctctctgataatcactttgtgcactgatatctgctttctggacctccatcagtcttgtaaacaactctggggttaactggctgacccatcgtctgactgttttcttattgacttcttctatagaagcaaatctacggtcatgccatctgacaagagtcgttacctgcttgatcgtctggttgtcaaactttaatcttcggaggatcttccttgccatctcttctccgatcaccggatgcattttaaaatgatctttatctggaccttcaactctcgccgttggttttcccacatcatgaagcagcattgtccaccggtaaatatgttctgctttgatctgtttcattgcttcgatcgtatgaattccaacattgtatttgtgatgcggattattctgcggtgtttccatcataatatcaaattctggaaaaatgatcttcgtcacacctagtttatatgcattgaccaatacttctggatgtgccgatgtgatcagtttctcaagctctacctgaattcgctcagcactgatatcttttagaaattttgcctgatttttaattgcttcttcggttttttcttcgatttgaaatcctaattgagcctgaaatcttagagctcttaaaattctcaatgcatcttcatcaaatcgtttctttgcttccccgacacagcggatcgtttgatttttaaggtctgtcataccatcatacatatcaatgatcccttcactgtcattatatgccatcgcattgatcgtgaaatctcttcgtaacagatcttctcttaatgactttgtaaaatgcacttcattgggacgtctatgatcttcgtattttccatcgacacgataggttgttacttcgtatggttcatgattcataagaaccgtaactgttccatgttcgattcctgtatctaccgtatgatcgaagatttctttaacttcctgaggtgaagctgatgttgtgatatcccagtcacccggagttcttcctagtatggaatctctgacgcagcccccaacgatatatgcctcaaatccatgttgttctaatttctgtattacctttgctgcctgtgcgggcatcttgatcttcatcctatcacctctccttttctttgttcttatatctgcttctcatatttatttactattcttacaaatgtatctcgcaaacggaagaattgccggaaatgtatcttcataatccccggcaattgttatcattatactcttagtaagcttttccaaagtaaaccatcttcttcgcaggttttccacagtgaacacatacgtcacttaaatgttcctgctcaaatggcatacatcttgttgtagctgttgtctcgtctttgatcgcttcttcacattctgtttctccacaccacattgcttttacgaaaccatcctgtttctcgatgtgggctttgaattcatcccagtttctagcctctactgtatgttcttccagatgtttctttgctctctcaagcatatcgttctgcatctgttctaatacttcaccaagttttgtctcgatctcatctaaagatacaatgatcttctctcttgtatcacgacgaacgatcaccgcctgattcttctcgatatcttttggtccgatctcgattcttgtaggaattccgcgtacttcctgttcactgaatttccatcctgggctcttatcagaatcatcaacttttactttgtaagaagaagcaagtctctttctgatctcttctgctttatcaagcactccttctttcttctgcatgatcggtacgatcattgtctgtactggtgcgattcttggtggtagtacaagacctgaatcatctccgtgaaccatgatgatcgctccgatgatacgtgtagacattccccatgatgtctgatgtacatactgaagtttattatctttatctgtatactgaatatcaaatgctttcgcaaatccatcgccaaagttatggcttgttccagactgtaatgcttttccatcgtgcattaatgcttcaatcgtatatgtggaatgtgcacctgcgaatttctctttctctgtcttctgtccttttacaactggaattgccagatactgctcacagaaatctgcatacatatttaacatctgtaccgttcttgcttcagcttcttcttctgtcgcatgtgctgtatgtccttcctgccagaagaactctgaagttcttaaaaatggtcttgttgttttttcccaacgtacaacagatacccactgattatataatttaggtaaatctctgtgagactggatgatctttgaatagaaatcacagaataatgtctcagatgtaggtcttacacaaagacgttcctgtaattctttatctccaccatgagttacccatgcaacttctggtgcaaatccttcaacatggtcttcttctttctttaaaaggctttctggaataaacattggcattgcaacattttccacacctgtttctttaaatttagcgtctaaaactttctggatattctcccagatcgcatatccattcggacgtaagatcatacatccacgaacgcttgaataatctgctaattctgctttcttaacaacatctgtataccactgtgcaaaatcatcttccatcgcagtgatcgcttctactaatttcttatcttttgccattgcaaaatgtctccttttctatggttatatacacagtttttgtgtacaatgatactaagaataatattactgtaaaatgtcggatttttcaaggggtgacgttttatttaactacacaaaaaggagttttttatggcaaatgaaaacaagatggggtatcttcccatcaaaaagctgatattgcagatgtcccttcctccgatgtgctccatgtttctgcaatattcttacaaccttgttgacagcatgttcgtggctaatatcaatgaaaatgcacttgaggcagtttctctttccttcccgatcacaacccttatgatctccctgtccatctggattggggtcggtatcaacgttttgatcgcaggttatcttggagagaaagaacaagaccttgctgactgtgcaacaacacttggattgctggtagccttgatcgtcggtatctgtatcaatatccttgcactattgatcatgaagccgtacttttcagcattcacaaacaatccagctatttttgactatgcgatgcagtatatgtccgtctgtacttttatgcaggttccaaacatggtacatatcgccatccaaaaggtctttcagggtactggaaatatgatcactcctatgtggtttcagatcgcaggagttatctttaactttgttttcgatccattactgatctttggaattggaccattccctaagatgggaatccgtggtgctgcactggctactgtccttggatatgctttatctatggtgattgcttttcttctgcttgtttttacaaaacagaaagttcgtatcaagatcaaaggattccatgttgattctcatatgttaaagaatctgttttcctatggatttccttcatttgttatgaatgctcttggatcttttatgctgacatttaccaatctgtttttaacagcttattcagatactgttgttgccttttttggcgcctatttcaaagtacaacagatgatcttcatgacagtaaatggcttgatccaaggatgtttgcctgtcatgagattcaactacagtgccaaacagccagaacgtttaaaagaagcttttcattttggcacacaggcggcaactgttatgatgatcggtggaacatgcctgcttctgtttttaccaaaacagattttgttcctgtttgcagcttctgaatcaatgatcaaaatcggagttccagccatgcggatcctgtcgatcggtttagttttctgtggattttctattatgatcgctacttatcagcaggcaattgagaagatccaatctagtatgttgatccacatcttacgacagggaattttattggtgcctttgatgtggctgtttaatcatatgtttgggataaatgggatttggatctcatttccagtaacagaaattttagtgtttattgtggctgttttattacaaactgttattccaaaaccacaataaaaattattatttcttgtattaaaaaaactcactcctgtgaaaataaaaaaggtagcagattccttttccgacgaaattggaatctgctaccttacattttatactttatcacatttttaaatattacagtaaagatttatataatccaataatatcctcaacacttgcatccttagggtttccaggtgcacatgcatctgcataagcagattctgctaagaactggatatcttcttctttcacgatttcttttaagtctgctggtattccgacatctgctgataattttttaaccgcatcaacggctgcttttctgtattcttcctgtgtcatatcttcgacaccttctacacccattgcttttgcgatatatttgtatttatctcctgttgcatctgcattgtattccataactgttggaagtaagatcgcattcgctactccatgaggtgtatcataaactgcacctaatgcatgagccatagaatgtacgattccaagtcctacatttgagaatcccattcctgcaatgtactgtcccattgccattccttctcttccttctggtgtattctcaacagctcctcttaagctgtcagagatcagttcaatggctttgatatggaacatatctgtcatttcccaagctgcttttgttgtgtatccttcgatggcatgtgttaatgcatccatacctgttgctgctgttaatccttttggcatagaagacatcatttctgggtcaatcactgcgatcactggaatatcatgagggtctacgcatacgaatttacgtttcttttcaacgtctgtgataacgtagttgatcgttacttctgcagctgttccggctgttgttggaactgcgatgattggtacgcaaggtttcttagtatctgcaactccctctaagcttctcacatcttcaaattctgggttgttgatgatgattccaacagcttttgctgtatccatagaagatccaccaccgatagcgatcaggtaatcagctcctgctgccttaaatgctgtaactcctgtctgtacgttttcgattgttggatttggtttgatctgtgaatatacttcatatgcaagtcctgcattatctaatacatctgttaccttctttgtaactccgaattttacaaggtctggatcagaacaaacaaatgcttttttgaatccacgttttgttgcttctgttgcgatctcctgaattgctcctgctccgtgataagatgtttcatttaatacgatacgatttaccattttatacactccttttatattgacatttttttaactatcttcagtataaaattgttttttcgcaaatacaagttacacatttggcaaaatgtaaaaaatgttacacttcatcaaaagtgtaacattttgttatctttatatatctttgaacagatcatatagctttggaggcatcgcatcgatcagctgatctgcgagctgttccggcgacatcttcatccctgttgtcgcccattctacagtcatggcaattgaacctcggcaatacattctcaacaagaattctaattcttctggaattttatcaactccctgtttgtgaatgatatcacaatagaattgataaatgcactgataatcatactccatcagacagttctgactctcgctcgaaaaagctgctgcgaaaaattgtccttcacctttgatgaattcaaatttcttgagcaacccttctcttaatgtcagactgatacccatctgtttaaacgacatctgagccaatacatcaaaataccagttgatcagatcatatttatccttaaaatgccggtaaaaggttggacgagttacatcgcactgatctacgatctgtttcactgtaatcttatctactggcgtatgcaccaacaactctttcattgcatttgctaatttatatttcattctctctgatacgtccatctcgtcccaccttctttcatatatggttttattgtaccttatttgacacaatttataaaggcaaaaaaggctgttatctgcttttgtctctccaaataacaacctttttatctattatcaagaagtttcatgtttaataagaggcatttcctctttgaccacaaagtgcttcgaattcttttaatttgttttttgcctgctgggagacatttcttggaacctgaatctgaacaactgcgtattgatctcccttctgagatggattcttcataagcggcattccttttccacgcagtctgatcttagatcctgactgagttccttctttgatcttacagataacatttccatataatgtcttgatcactgcttcacctccacaaacggctgtgctaaatggaacattgatcgttgtatacacatcatttccttttcgctcaaatccttgtttctcaccgactgttactttcaggaataaatcacctgcttcaccgcctccgattcctggatttccttttcctcttaagcggacactttttcctgtatcaattccagctggtatatgaacctgtaatgactgcatcgcaccattttgatcttgcaaatgaatgactttatcgcagcccgtaactgcttcatcaaaactaatagagatatctgcgtgtgcgtcggaacctttctgtctgaaggatccacttccgaatccaccacctccaaatccatcagaagagccaaaacctccttgatggaaactgcttcgatggaatcctttgttgtttcgtccgccaccgaacatacttccaaagatgtcaccaaagatatcatcgccatctccaccttcaaagtggaattcctgatatcctccatgagcaccaccatagttttggtaattcttatagaactcagattctgctccggttccgtcaaaggcagcatgaccatattgatcatataattttctcttctctggatcacttaatatattataagcatcggtcgcttctttgaatttctgttctgctgttttatctccaggattcatatctggatgatatttctttgccagtttccgatatgctttcttgatcgttttttcatctgcagttttactgattccaagaacttcatataaatcacgttttgctgccatttcgtttcaccttcttttcctttcattctcaaatagatagaaagattccccgggaatctgatcatcccggggaaagttcttttatccttcgatcgttacgaatttcttttcttctactttcttctccggagctttcttcggaatatctagcatcagaataccattctcgtatttaccgtggatatctttctctgtgatatctttgccaacatagaagcttctgctcatgtttcctgcgtaacgttcacgacggatatatttaccttctttatctttctcgtctttatctaatccttttgctgcactgattgttaaatatccgtctttcagttcagctgttatctcatctttcttaaatcctggaaggtcgatcgctacttcgtagtttccgtctttttccttcacatcagtcttcattaagttctttgcgtgtttaccatacagttctttatcaatatctgggaaagaaaaatccatccagtcgtcgttaaataagtttcctccaaaaatactaggcatcatcatcataagtcatctctcctttttctttataataatgtttgggcgtgtcagggtaattcctgacacttgccttttatgtgaagcatattgagaagttctcaatataacttgttgtatcttatggagcctttggttctttggcttctctcttaagcccttccctcttgctctagttgtactataacacctattattagcactgtcaataggtgagtgctaatttttttaaattttatttctaacatgttatcaaaccaacaaatcacaacctgcagtactccacaaatttctccatctcttttgtcatatatttatttgcatgataaaacacttgtcgatacattgtaatatcaatatctttcacatctaattttgcgatctttccttcttcaatatccttttctacaacaaataatggaagataagaaagcccttttcctgtctttagcatcttcttgataaacgcggtatcactgcattcaagtactggcgataatgtctgtttatgcagagctaattcctgttctaatgcctgtctgtagtttgcatttcgttctgttagataaaacggtgcatttaagatttcctcaacctctatattctttttccctgataacttataatttggtgcagacacaaagatcacaggctccgatttttccatgactttcacccaatttttattccatcttggcgtatccagaatataaatgacatcgagttcattgtgttccatcttctggatcaggcgttctggagaaccaatcgtgatctgaattctaacctgtggatgttcttcccgaaaccgctgtacgatttcctgcaatttgacagtgcagagtgattcgatcgttccgatatgtaatggattttttaactctgcagtatcattcattgcatcttttgccttgtgcatttcatcaatgatcttatttgcatgtattaaaaattcttttcctttcggtgtgagtatcactttttttcctgtacggtcaaataaccgcactcccaattctgtctctaattgacggatctgtactgtcacggcagattgcgaataacctagtaattctgcggtttttgagaaattcttcacttgtgctatctgcataaatgtctgtatctgacggaattccattttttctcctttgtactattatgaataattttcaatgttatcattaaatctatgaatttgattcatctatacgtggatgatacaatacaaacataaagacgtcaaacattttttgtgcacattaaacaaactacgatgatatgtgattatgcttttagaggagtaattaaaaatggaaaagaaaaaatttaaacttggtctggtaccaaaactcattattgccatcattattggtatcctgtttggacagttccttccaactggattctgccgctttgttgtaacactgtctggattcttcagtacctacttaaaattcatcattccactgatgatccttgcttatgtaaccatgggaatcgctgatctgtcacagggtgctggacagctgcttttaattaccgttgctcttgcttatggttcaactttacttgctggtacagcttcttaccttgtatcatccaatctgttcccacactttatgacttctggggcattagatcagattgctgcgactgctgatgcgtcactgaaaccttatttttcactgacgatcacaccgctgtttgatacattatctgctgttgttcttgctttcattttaggattatgcttatccacaatgaaaagtaaagagatcggaaacagcctttacaacggaatgagcgatttctcaacgatcatcgataaagtcctgcacaaaacgatcattcctttattgccattatatatctgcggtacatttactgatatgacgaaatcaggaaaaacatttgcaatccttggaatcttatggaaagtattccttgtagtgatcatcatgcactttgtatgtatcacgatccagtttataattgcaggttctgtcagcaaaaagaatccactctctcttattaaaaatcaggttcctggttatactacagctttaggaactcagtcttctgctgctacaattcctgtcaatctggaatgtgcaaagaatgacggtgtcagtgctcagatccgtaactttgtagtgcctctttgtgccaatatccacatggcaggttctatgatcacgatcacagcatgtgcaactgctgtatgtttgatgaatcagttaccgatcagccttgcaactgttattccatttattatgacacttggtgttgcaatggtcgcttctcctggagctccaggtggatctatcatgactgcattgcctttcctttacatggtatttggtacaacagcaggagatacaaacggaccaatctgtgctttaatggttgcactttatatcacacaggattctttcggaactgcatgtaacatttccggagataatgcgattggaatcgtcgtagattctatttacaagaaatttattttaaaagaagatacagtggaggcttaatttatgtcttttatcagtgcatttgatgttatggggccaaatatgatcggtccctcaagctcccacacagccggagctgcaaggatcgcatttctcgcaagaaaaatgttaaatggtacactgaaaaaagttcagtttacactctatggatcttttgcaaaaacttatcatggacacggaacggatcgtgccttattaggtggaatcatgggatttggaaccgatgatatgagaatccgtgattctttcgagattgcaaaagacattggacttgatttctcttttgtaccaaatgaaatagaaactgatgtccatccaaatacagtggatatcttaatgacaaatgaaaacggagatcgcatcttgatccgtggggaatctttaggcggtggaaaagccagaatttgccgtatcaatgatgtagaagttgattttaccggggaatacagtaccttgatcgtgatccagaaagataaacctggcgttgttacttatatcacaaaatgtctgagtgatcaggatgttaatatcgcttttatgcgtcttttcagagaatctaaaggaaatacagcttattctatcgttgaatccgatggtcttcttcctgaaaacatcgcagaggagattaggaaaagcccaaatgtctcagatgttatgatcattcagctgtagaaaggagactgaaatattatggattttaaaaacgcaaatgaattgcttgatttatgtaaaaaacatgatcttccaatctccgaagtgatgagacagcgtgagatcgtagaaggggaaaaagaagctgatacggttcatgatgcaatggcaagagttcttgagatcatgaaaaatgctgcttttactccgatcaaagaaccagttcgttccatgggtggactgatcggtggcgaggcaaagaagattgcttcccggtatcattctggaattggaatctgtggtgatctgttagaaaaaagtatgatctatgcgatggcgactcttgagacgaatgcatccatggggttgatcgtagcatccccaaccgcagggtctgccggaatcgttcctggacttttacttgggcttcaggaagttcataaattagatgatgaacagatcattcaggcactgtttaatgccagtgcgatcggatatcttgctatgagaaatgcaacggttgcaggtgctgtcggcggatgtcaggcggaagtcggtgttgcttcttcgatggctgcttctgccactgtcgaactgcttggcggtaatccaaaacaatgtcttggagctgcctctaccgttttaatgaatatgttaggtcttgtttgtgaccccgttggcgggttggtggaatatccatgccagaaccgtaatgccgcaggtgttgcaaatgcgatcatcgcagctgagatttctttatctggaatccatcagctcatcccgtttgacgaaatgttaaacgcaatgtatatcgttggtaaacgactgccagctgaactaagagaaaccgcccagggaggctgcgctgcaactccttctgcatgtgctgcatgcggaggttgtgcgtaaaaattccttcagaacacatttttaaatagtaggtaataaatcaatctcttttttgcctcttttgggtgttttcatatattggtatctaaaagagtgtctgcatcacttaatgatgcagacactctttatttactatatcttaagcatccgatatccaatacctatatgtgtctgtatatactgcatgccatctttatctggctgtaatttcttccgtaatgttgccataaacactctaagtgatgcaacatcattttccagtgaactgccccagatctgttgcgtaatataagtgtgagtcaatacttttccaacattatgagacagcaaacataataatttatattcgattggtgttaaatgcaattctttatcttttaaatatgtagatcctgctgtatagtcgatctttaactctccatttacaaagactgcttgttcttgttcctcgcctgactggatcaatgctaatcggcgctgtgtaaccctgatccttgcaagcagttcatcaactgaaaatggttttgtgatataatcatctgctcctgcatccagtgcttctattttatctacatcttcacttcttgcactgataacgataattggtacgttagaccatgttcttacttttttgatcacatccacaccttccatatcaggcaatccaagatctaataaaatgatctctggtttatgagaagatgcttctaaaatagctgaacttccattttctgctgtaatatatttataatcatgtgtttttaatgttgtcacgatcagattacggattggccggtcatcctccacgactaaaattaatgctttattcatttaatgtaacctcacttaatggcagtgtaaaagaaaaaatacaaccatgtggtatattgtcctccaacaccagtttcccgttatgcacctctatgatcgaacggcaaagtgccaaacctaaaccaagacttcgatggctgtctgcgatcgtatttttccctgtataaaacatttcaaatatatgcggcttcatttcatcacaaattccagggccgttatcttctacttgaatctttgcttttccattttcattcatggcacaaatgcggattgtagatcctttcggtgtatatttaattgcattatcgaccagattgatcaacacttgcaggatcagccgcacatccatatgtgcaagtatcaattcatcgcattctgtaacgatctgatactcttcatgtttcctgctgatatgccgtaatgattccgcgatcacctcatctaataattgatctgtaaatttcagttttaatcttccatcatttaatcttgtgatcgataataaattttcgacgatattgatcagccattctgaatcatcataaatatctgtataaatctgatgttttgttatatcatcaagacgttctccactatttaacagcatgtctgcattcccagaaatggaacaaagtggtgtccttagatcatgtgagatcgcacgaagcagatctgctcttaactgttcatttttggcaagaacggagattttttctttctccatgatattctttttattttccatggcaagtgcacattcattgatcacagaaagtaagatactatattcgaaggaatctaatgtatattcgtcaactggtattgcgatcacaccatacacattatcctcaatacaaatggcaaggtacagacactgtgcatctttaaaacgttcggtcgttgctccagcacgctgcttgttttcatacacccattttgcaatctcctgctccctgcttgtcaataaatcttctatctgttctttctttttattcgaaaatatatgtggtgctgacaattcatcgccttccacaacatatgctacaatactgcggtctaataatttgataagctgtgtacatgtaatacttaaaatatccgtatcgttttttgctttttgaagtaaccggtctgtgtcaaataaaatctgtgtacgaaatgcagattgtgctgaaagccttgcatgtgtttttaattttgctgcaagtgttccagtaatgacagaagatattaacatgatcacaaaagttaccggatatccaactgcatacgtctgaaatgacattcttggttccgtaaggaaaaagcagaacaaaaatacacttaagacagaacctccaatgctgtataaatatccatctgtaaggattgacgttaataaaacacccaaaatataaattgtaacgatgtttgtatctgtaaattgaagtttctggatgaatagaccgatcaacgtacaaactgcaaatataaataatgtcaataaactgtctttcatcgtaggctttcctacataaaccgctccatgcggttttcgataattatctaagttcatcgcatctggaataatgtggatatcaatatcaggaacagcctcgatcaacttctctgttaatgtctgtttgctgaaaaagtgatttctctttgcactgctttgtccgatcacgatttttgtgacatttgataaatgtgcatattccgcgatctgtaccggaacattttccccatgtgtcattacgatttccgcaccagattcctttgcaaattgtacatgagcttccagtcttcttttgtccgattctctttctctttttcctgtctgtacatacaatgccgtaaaacgtgcccgcatatctcttgccatttttgctgctgtacgtatgatcttttcattcgatggtgaagaagaaagacaaacaagaatgtgttcgttttctttgttcagctgtacaaattctcctgtgctcatcttggccccctttccttatcggatgcattatatcacgattgtcaataataatccataaacacatcaatcatcgtcatcatcttgctccctgtcaattactttccgattttctccaagaaaataattaacttttttcaaaaagaataacacaaatgcaaacatcagtattaccgccaatgctaaaatgaaatctgacataagctctcacctctttttcatgacatcagatacaaaaacactttttgatcgctttatattctcctaataccaataatgtaacatcttccttaaaacaggtatccgcagatatcgccatacttacttttccatcatcttttactgccataatgttaatatcatatttttttctaatatcaagttttcccactgtctttccgatccattccttcggaacctctacctcaaagatcgcatgtgaggcatcgacttccatataatcaagaatatgatcatcggtataacggatcgttgcccattttgccaccattttttctggatagactaccttatcggctccatttcgtaagaggaatttttcctgtacatctcgttcagctctggaaataaccattttgcctccaagttcttttaacagacaggtggtttccaacgaattttgaaaattcccaccgatcgtaacaaaacagatatcataatttgcaatccccagagattttaaaaattcctcattcgtactgtccccgatctgtgcattcgtaacatatggaagtgcatcattcactctttcctcatccagatcaactgccatgatctcatgtccaagctgacttgactgtatcgctatatgttttccaaaacgtccaagtccgatcaataaaatattcttcatcatcaattccctctttcttttatcccactatgatcttatcaagtggtagtcttgcttttcgtttatttttatctgaaaatactgcatagatcagcgtcaaaccgccaacacgtcccagatacatcagtatgatcaaaatgatctgtgacagaatatgaagttttggtgtgattcctaatgtcaaacctacggttccaactgcagacgctgcttcaaacagacagcttgaaagcggcagtccctcatacacactaatcgtcattccgcctgcaaaaaacaagataaaatacatcattgcgatcgttgttgcattttttatcacactagcatcgattcttcttccaaatgctgtcacatcatcacaactttgaaaggtcgccagtacatttaaaagtaacagagcaaatgttgttgttttcatacctcctgctgtagaacttggtgaacctccgatcaacatcaataaaatcatcattgcctttgatgctcctgtcagcatcgaaagatctgtcgtattaaatcctgcagttctcggtgtcacagcttgaaacaatgatgcaagcaaccggtgaatccctgatagatttccataatcctgaaagaaaaagaaaacagctggtaacaagatcagacataatgttgtagttagaataaccttactctgcatatggtaatgcttaaaatgaaatttatggagataaatgtcttcccatgtaaaaaatccaattccaccaatgatgatcagtaacatgatcacaatgttgatcactggatttaccgcatatgatgtcaatgatacaaatggatgccattttgttccaagaagatcaaatcctgcattacaaaaggctgatacagaatgaaagatcgacatccagattccccgtaatccaaaatcatgacagaaaacaggcatcatgaataacgcaccgatcaattcgatcaataaagttccttttaaaataaaactcatcaatcgaacgatccctcctacttttggtgcagagatcgcattttgcatcgtgcttcgctgcataatcgatatttttcttcctgataatataaatacggctgttgctgttgttataactcccagacctccgatctgtatcagaaacatgatcactgtctgtccaaaagcagaccagtaacttccagtatccacgactgcaagccctgtcacacatactgcagaagttgacgtaaataatgctttatgaaatggtgttatgattccctgaaccgatgaaattggcagcatcaggatcaatgctccaaaaaggatcactcctgcgaaccctaatatgatcacctgaaatgatgttaaatgtctttttttataaatcttccatggcatatatgatcttacctctttttcaaattattttatgactttttgatcttatcattattatatcttttatgataaaaagatagtgtaaggatatgttctcttgtattaagattgtataaagaaaaaaggagcataatatgatttcaagaaagaatcctgctttacaggattctccgcctgcggcgggtcgcttctgcctctgggatttcgtaaaaatatctgtaaaatataaaatccatgagaacacgattttttggtttgttgttctcatggattttattgtttcttattttttcaagtattcttcaatcatacattcatgcttcttttcttttttactataattaattcccacaagcaaaatattacctgcatatttttgaatagaatctggatattttttatccttaatctgttgcaatgcactaacagcactcttattccacttcaattccacaacaagtgccggataatcatttcgatattctgtttttggaataaacacaaaatctgcgaacccacgtcctgtaggaaattccctgaccggtttaaaataatactgcattgcactcaaataagctaatgccaatacactgctgagtgaattttcattgttatattgaattgctgaaacatattcctcatggatcttctcaatctgagctgcaactatttctccatccatatccaaagttgcatccagtaaatcctctgattcttgctgaaatttcagcatttcattccattcttttctttttgttgcacgaatcagttcttgtcttatctcttcattcggtacaaatgccatcctattaacacttgaatatgctaagtatcccatatgaatcaaatatgttaaaacgtcatctttatttacaatattctcaacgtcattttggaatgacccaacatctacttcaacagatgctcccgacaccatttcaataattgcggtcttcaatccatcaaaatccatattgatcaatggaacaatcgaatcataagaagctgttcctgaccaataactttggaagtttccatccgccatcaagtttacaactgcattgggattatagacatgatattttcctaactgatatccatcataccaacgcttgacttctgtaaaatccttcttatatgtctcacaaagtgcttttacttcatcttctgtaaaaccgatgtaagaagctaaacatcctgcattcaacatggaatattctcggaaattgttaagtgctgattgtgttttttctttcttgatcggcaagatgcctgtaagataagcaagttgaatatatttcgttggttctgttcccttaaacatacctcttaggaatcggatatactcatcctgcacctttttgttcgctgattcatctctgatcagcacatcccattcatcaatgataatgataaatttccgtcctgtcttatccttaaccagagaaagtgcatctggcaaagataccacttcttgacgtaaaatctctggataaacttcacgcaattcatccaacacaactcttgttatatatggcacaacattatccgcatcttcgcaatttatcaaaaaccattgtacatcaatatgaatcacgtcatatttattcaaatgtttcttaaaatcttctgattgtcctatctcaagatcagaaaacatcttttctgattctgctcccttactgtaatatgctgcaagcatattcgctgcatatgattttccaaaacgtcttgggcggctattacaaatatacgcatctgtagaatccagaacttcattcatacatacgatcaatcctgttttatctacataaattctggaattaagtgctgcttgaaatgcactattatctggattaacaaatctgcccatattttatacctctccaattccttttacctgtttttaatatttctctattttacacacgtgttcttttgttttcttatcataattaatacctactaacagcatattattctgatattcttccaaactctcaaaatatttcttctctttcatctgcttgatcgcactttccgcactcttatcccattttaattcaactaccaatgccggtttctctgcaaattgttttttcggaataaagaccaaatctgcaaatccttttccacctgccagttctctgtgaatggtataaaaattccttgctgcatataatgcgagtgaaatcgtataactcaatgcattttcatcattatactggatatgtgatgtctcaaaatgtgcctgttcaatggctttcgatacctgttcttctctgccttgccagattgcatttaatgtatctgcagaatcttttagtgcttttgaaacagatccccagtctgatactgaaactgtatttacatattctgcccgaatttcactatttggtatcttgactgtttttgttttatcatcatatgcaagatatccaagatggatcaataatgtcagtacatcatcttctgtacgaaacgttgccatatcattcgtaaaactttcggtattcaccgccacgctttctccagcgatcatacttaaaacatcatcttttagatgctcaaaattcatatcaatatacatctgtaatgcttcaaaagtctctgtctgattccagtaatttgatatctttcgaaatctcatactatttacaaccgatcttggactatacacagacagtactccgtcaaatgaatatccatcataccagttcttaacttcttccatatccattccgtattgttcacagagctttttgacttcttgttctgtaaacccgacataacatgctaaaggtcccggggcgatcatggaaaattcatcaaacatattcagtgccgaatgtgttccatatttcttaatcggtaaaattcctgtcatgtaagatagataaatacatgccttatcttttaataagtcccgtagaaaatctaaatatttttcctgtgcttctttatcttgtttatattccctaaaaatgcaatcccattcatcaatgatcacaacaaatgggtactgcatttgtgcataaatatcctgcatacactcaatcaaatctgtatcgtcaaaataatcaacttctggatattccattttcaaatctctgatcacaagcttcttcacacgatcgatcaattcttctacattatgacttcgacttagaaattcctgcatatttaagaatatggtattatattgattcagatatttttcaaaatctttatcttttgcaatttcaaactttccaaataattcttttgaattacaaccgcggctgtaataagctgtcagcatattcgcagccattgacttcccaaatcttcttggacggctgacacagacatagttttgtgctgtatctagtacggaattcgtatattttatcatccctgtcttatctacataaatttcagactgaatcattcttctgaacttttcattccctggatttagataatttcccatacgatcacctccttgaatcaattttctataatatgaaaaaacttcgtgctcttatctatattgattatgatagcacgaaattttagccgcctcaacttatattaattacatgaaatgaaaaaacacctgctcataacatacataaaatatacgttacgatcaagtgtcttttcatacagtgattatatatagaatttcttctatcctagttgtttactgcaacatgttttgcctgatctgaattgtaaacttcttcatcaaccagaccttcagttgctgctgtgataacggctgctgttgctgctcctgttacatttgtcattgttcttgccatgtcaacgatcgttgagattggtgcaaatacgacaactaattcgattggtaagccaagtgctgcaaatacagctgttgatgtgatcgtcgctgttcctggaaccccgactgttccaacagatactactaatgtgatcaggatcagaaatgcatactgtgcaattccgtaatgatatcctaacatatgaacactaaataccgctgttaatgctggccagattcctgcacatgctggcattccaacattggctccaagacctgccgtaaatgatgctacatctccatcaactccaagtgcttcttttaactgtcttaatgtaaccgggatcgtaccaacactgctttgtgtcgtaaatgctacatactgagctggtgcgattcctttaaagaatttaacaggacttaattttgctacaaatttaattaataatccttctactccaaatgcctgaactgcacataagatataagataatactaatgtacttaataatggcagcaattccgtgacactgcttcttccaacagctcttgccaagaaagataatactgcatatggtgtaaatccaatgatccagtcaattgcctgtccgatcacctgattccctgcatcaataaatgctttaaatggttttacggattcattttctttggaaattgcattgtaagataatgcaatgatgatcgcaaatacgacgatcggaatgatctgtccttcactccagtttgttgcgaagttgcttgggaataagtttacgatcgtatcaacaacagatggaacttcaactttctgatatccatcagctactttgtaagcaaatccatcaccaacttttaagatgactgctgcgatcactgtaatcgtacttgcgatcgctgtatttaagatcagataaaagattgactttccaccgattttctttaaatgaatggattcgcttagatttgtgatacttgcgatgatactaaataacagcattggtacaacaagtgctgtcaatacattggtatagatacgtccgaaaatctcaacatatgtaaaatgatttccaaatcccagaccaactgcgattccaaaaactgttcctaataatgttaaaagtccgaagtctacgcctttcttataatctaaataatagataaccgcaaacaaaacaattgtaactgctagtgcggcaaaatctgctgtgttaatgctcattttgttacacatcctctcttatagttttttctttttcatagttttccagtaggaattattcgtataatagcatttcctagtaatactgtcaagaatatttgatgcttctttttttatacaattctgatttgtaatggtgttgcatgtatgagtcagaaagaagataagaagaaatatttataagaaaaagggatgacactccgcatttttgaaagcgttttttacaaatcgctgatccgcgcctgttcctttgataacttcctcgctgcgagccaaaatgcccgcagctacggtcaaacaatcaaccacagggcgctgcgaatttgtaaaaaacgcattcaaaaagtgctcatgttgtcacccttttttcttataaatatttcttcttatcttctttctgactcatacaacggaacgctattcaaatctctacacagtgtgtatgttatacgatactggttaataatttttgtgtttattaacagaaggtaaaagagcttctacaacaccgatttatcgagatgtttgaaatttctcttatcttaatttctacgaaaccctaaattgcgagaattttcagctatcgattacctaaatatataaaccaatacagtaaaacatacgcaccaccttaaattttccaatcttgtgaattgtctactctatagacttcaggtatatgataaaaaataaataagcaaccgaacgcgatgcattggagttttgccatattttgaataaattcgcagcccaattggacgaatgtctgagcttcaaagactttggtcttagacaaaactccagagcgagttttcgtaggaaattgggcgaatcagcgatttgttcaaaatatgagcaaaattccaccgcatcgcgttcggttgcttatttattttttatcatatactcgaaatctacagttggccaacttacaaattaaaatttaagataattccaacttaccagtatataattgatagtaggttcctttattcttaataagatcttcatgatctccacgttcaatgatcttaccatgttcaagtacaatgatcgcatcactatttcggatcgtagatagtcgatgggcgattacaaatacagttctacctttcatcaggttatccattcctcgctgtacaatgctttctgttcttgtatcaatacttgatgttgcttcatctaagatcagtactggtgggttggctacggctgctctggcaatggatagtaactgtctctgtccttgagataatccttctccgtctccgctgatcacagtgtcgtaaccatctggaagcattttgatgaactggtctgcgtgtgctaatttggctgcttcgtagatctgttcgtcggttgcccctaaatttccgtaacggatattgtctttgatcgttcctgtaaacaggtgtgtatcctgtaatacaattcctaaggaacgtcttaagtcgtcttttttgatcttcttgatgttgattccgtcgtaacgaatcttaccatcctgaatgtcatagaagcggttgatcaggtttgtgatcgttgtttttccggctcctgtggatcctacaaatgctagcttctgtcctggttttgcgaacagactaatgtcatgaaggatggttttatcttcgttgtaaccaaacgttacatcttcaaatcttacatctccagttaattctgtatatgttacagacccatctgcagagtgtggatgtttccatgcccacattcctgttctttcttcacattcgataatgtttccattttcatctttcttcgcatttactaatcttacatatccctcatctgtctcaggttcttcatcgatcagggcaaagatcctttctgcacctgcaagtgccattacaatagagttaaactgctgtgcgacctgcataaatggctgtgtgaaactctttgtaaactgaaggtatgatgccatgacacctaatgtgatccctccaataccttcaatagctaacacaccacctaataccgctgttaatacaaattgaaggtttccgatattacctacaactggacccatgatatttgcatatttgttggcatttgcagcactttcaaacagagattcgtttaacttgtcaaattcttcttctgatttacgttcgtggttaaagactttgacaactctctgtccattcattctctcttcgataaatcctgtcacatcggctaatgatttttgctggcggataaagtattttccgctgtttccaccaatcgcttttgtcaccgtgatcatgattccgataacaacaactgcaagaatcgttaaaatcggacttaatactaacatagaaataaatgttacaatgatcgtgaaaaatgacatcaatgcctgaggaattgcctggctgatcatctgtcttaatgtgtccgtatcatttgtgtataaactcatgatcgaaccatttgtattctggtcgaaataacggatcggtaatgtctgcatatgttcaaacatatcgtctctgacacgttttaggactccttgtccgataaataccatcatccttgtataaataaatgttgcaatgacacctgctgcaaagatgcatccaaggacgatcattgcgtggtaaaaatttgtgaaatctggattgctctgtccaaccaaaggcaggatgaagtcatcgagcataaatttcaatgataaagatacagatacagaagctgctgcactgatgaaaatgcagacaaacacgagaataaactgtaatttataagtatctgttacatattttaaaagacgttttgctgtcttcgccgtatttttgttgatcgtcttttctggtcttttactcatcgtcttctccccctttcacctgtgattcatagacttctctgtaaatatcatttgtctttaataattcttcggatgttccaacacccatgatctttccatcatctaatacgatgatctggtctgcatcttcgatggaagatactctctgtgcgatgatgatctttgttgtattcggaatttcttcacggaatgccttacggatcaatgcatctgtctttgtatcaaccgcacttgtggaatcatctaagatcaagatctttggtttctttaataacgctcttgcgatacacaatctctgtttctgtccaccagaaacattgtttccaccctgtacgatctgtgtattgtatccagctggaaattcatttacaaacccgtctgcctgtgctaatttacacattctctgaacttcttcatcggatgcattttcatctccccaacggatattatcgtaaattgttcctgtaaataatacattcttctggagtaccatggatacctgatctcttaatgcttctaagttgtaatcacggacatcaatgccgccgactttgacacatccttctgtaacatcgtaaagtcttggaatcaactgtactaatgtagattttgcactacctgttccaccgatgattccgatcgtctgtccggatctgatatgaagatcaacatcttttaaggaaagatttccaccttctcctgcataactgaagtttacatgatcaaagatgatctctccgtcttttacttctgttactgcatctgctttatcctgcatttctggtacttcttctaaaacttctgtaatacggtctgtagatgcttctgcgatcatgatcattacgaatacgaaggttaccatcatcagagaaccaatgatctgtaatgcgtatacgatgatacttgttaattctccagttcccattgttccatggatgatccctgttccaccgatcgctacaagcagaagtataacaacatacattgtaaactgcataactggtgagttccatgcaacgatcttttctgcttttgtaaacagtgtatatacatacttggaaattccgtggaatttatcgatttcataatcttcacgtacaaatgcttttaccacacgggatgcgtttacattttcctgtacggaattatttaagatatcatattcatcaaatactttgataaagtgtggatgtgcttttttcgcaataaagatcaatgttcctcctagtaatggaatcacgatcaaaaatagtatcgctactttcacactgtactttaatgtcattacccatgataaaatgatcatgatcggtgctctggcaagtagtcggatactcatcatataggccatctggatatttgtaatatctgttgtcatacgtgtgacaagtcctgatgttgcaaagtggtcgatattcttaaatgagaactcctgcactttgtagaatatatcgtgtcttaagttctttgcatatccggcacctgcaacggctgccatatttccagctgaaatcccgaaaaacagggataacattgccataacaaccaggatcactcctcgctggataatataatgtaaatctccgcttgtcattccgatatcaatgatatttgccatctccatcggaatcaaaacttccatcagtacctcaagaattaccaggattggagcaagtatggattgttttttgtattctcggactgattttaatagggtcttattcatctttctttccttcctccttgtgtttttctataagattttgtaatacctgatataaaacatgtttgcatgttatgacatcttcctcaggaatgcctttttccattcttttttcactaagcttaatatcttccaagattgcctgtcttaatccttcggctttctctgttggtaccagccgcttctttctagcatctcctttgacactttctcttgtcagatatccattcttctccatcaactgtacatatcctgtcacagttgatttgcggatctgaaattcttcttcaatgtctttttgataaagatctttatgcattgtttctaataaaataaactttaaaatatgtttctgcatgatggtaagatcagccttgatcactttatcaattggctgattcctcttcatctcatgtgataacatatggatcagttttcccatgtgcatgttattgatcttatcatttatatcctgcattcactcatccctttcttttcaaaatggttagcttcctaactttttagtattatacagagaataaaaatgaatgtcaatcgttattttattatctctattatcgttaaccaaatctacttaccgtgttgacaattgtttttttccatgctaaagttcagattaataagatatttcgaatttaaataaaggaaggtatacattatatgaattcagaacaaaatttaacccgtgaagaagccatcacgatcttaaatacacctgatgaacaattaaatgaactgatcgaacgtgccggagcacttcgtaaaaaatataaagggaaccatgtaagcattcatcttttaacaaatgccagaagcggaaactgctcccagaactgtgcttattgcgcacaatcctgtcgttcccatgcagatattgaaaaatataaatgggtcgatgatgaaaaattatatggagataacacatttgtccatgatcataaactttcccgtcattgtatcggattaagcggtatgaaattcagcgatgctgagattgaagaacttgcttctaaaattcataagatgaaagaagagggtacacatttatgctgctctatcggatttttaacaaagaaacaggccttaatgttaaaagaagctggattagaccgtatcaaccataacttaaatacaagccgttccaattatccaaatatctgcacaacacatacatacgaacagcgtgtaaacaacattcatatgttacaggaccttggatttgaaatctgcagcggtggtatcattggtatgggcgagagtaaggaagatgttgttgatatgttattggatctgaaagaaatcaatccagaagcacttccgatcaacttcttaattccgatcaaaggaacacctctgcaggataaagatacttcaaatttgacaccagaatactgcctgaaagtattatgtctggcaagattactggttccaacatctgatatccgctgtgccgctggacgtgaaatttattttaaaggaagggaaaaggaattattgaccgttgtaaattctatctttgcttcaggatatctgactgcagatggacagggaattcaagatacgatcaagacgatcacggatgctggatttacatgcgaagtagaatctgattaaattgtgattgaatagcttaaattatttgaatattataaaaagagatcatgtgtctgcaacccacttgcgttcggactctcacgtagctgtactaagctcctgaatggtcattcgaccatccactcgctaagtgcagacgtgttcgtacggttgctgacacatgatctctttttataatattcaaataatttacgttattcaaaccaccacacagtgtgtatgttaaatggtaccgctttgtactatgcgttctttacataaacgctgttttctttcacaaatcccatcttttcaagatagcctttatgtcctaacaaacatcttcctctaatttatgaatgatctgctctgaatctaatggttttgtataataatatccttgtacaagatcaacaccccattgttttaacagatcgatctctttctgagtttccactccttctgctacaactttatgtccaagattctgcatgactgcaacaatatttttgtataatagtgcaacttggtcatcgtagcagattccatttaacaaagagcgatccagtttgatcgttgaaaatggtagttttagtactgtatttaaattcgcatatccagatccaaaatcatctaggcagatctgaattcctgactttttgaaatctgcgatcgtctgatataatgcttcgctatactctgtcgcaacagtttctgtgatctcaaattgaaaatacgaaaacggtatgtcaaactcttcgatcgtacggatcagttttttgctataccctgattttaataattctaatggagacaaattatactttatactttcaatcttttccatgatctgtggatgttcttttatgaacttgcagacctttcggaattgaagatacccaagctttgcgatctgtccatgtttctctgcaattccgataaaaacttctggtgagatcattccaagtgacggatgtctcaatcggcttaatgcttccattgtacgatatcttttttcttttagatcatacagtggctgataatatacttcaaaaagatcctcttcaattgctgtcgccatatattttttaacttcctgttcataaagaaatccttcttttgtatgttgatcattctgaatcagtatcgttctgtctgatttaggttttaactgtaccagatattccagataatcgatcaatacatcgatctctttgacttcttgaacgttgatgattccacatatcgcagtggaaaaagaaattcgttccccttttactttaaaaggtcgtttaaatagtttcatgatcgcatctttattcgtttcataatccatcaatgatgttgtgaacacaaaaaaacgattcccatgaatcctgaaaacatggtttgcttcattaatcttgtgaaggtattctgcgatctggatcagcaattcatctcctgttgtaactccatatagcttattaacttgttttagtttccacaaatcgatcataagcagatgaagttccttctttctcttgatctgctctggaaaccatcgcctgaaatagcctttagaatacaatccggtcaggctgtctatatataactgtggattataaagtgcccaaaataagatcgtaatccctaaggataacccaaatcctgtcattaatacagattgaaatttcatctgtatcgtaacacagaccaatgcaactccaaggaattccttgatcgcccgaagctcattcttctgatattcttcctgattgataaagcaatttataatgacagcagctatacagatcaatgtaaaaatatatgttaccaaatatgcttttccatgaacatactgcccctgttcattacaataaaaaaactgtttgtgtaaaacattggtcacgatagctacttccatacatagtattggtactgccataatctttatatttcttcttcttatatcttcatcacaatgtcttaatgcctgtgtataattatagaaaatatatacaacgatcatctgcaggatataaagcatcgtggaaaaaaagatcatccatgaattataagcaggattactttttaccaatagtatggagcttaacagatcaaatatgatatcaaatattcctgcaataattaaaaaccagaatgttcttccactgatattattcagttttttataacgctgaaaatgaatcaacagaaatattaaaaatacaagtcctgcgatcaaaaaatctatattataatctgtcatttatatttctcctctttttgttacaatacatatcctgatcggcctcatatttccaatcactgatcttcttctgttttccttctgtatcttttaagaaacttacccctcttgcaattgaaagataatatctgttatttctattatactttatgatctcttgatccatttgtttcaataattcatccatattctctattgaatcaaaaataagcacacaaaattcatccccgccgatcctgtaacattttccatatgttgcaaatacattttttatacatagcgccgcagaaatgatcagttcgtcccctgcattatgtccataaagatcgtttgtattttttaatccatctacatccataaagatcaatgcagcattatcgtaatcttgtgcgtgatcctcaatgtcttgaagctgttcctcgaatgcagtcctgttattaatacctgtcatacgatcttcttttagaagtctttcataaacttcaagctcagatcttgttttcgcctgttcaacaagatttacaaaaatactagttaataacaactgttcaaagatcaaaacacccacttcaaaaatggttccataaaaaggaatctcaagtttccagtacatgcataatgataatacccctgcaacggccatgatcccaaaggcattcataatgatcttaagttcgctatcttttgttcttcggtattcttctatcatcaaaacaacaatggttattactgcaatgaacaagagcacatgtgttacgaacagcatatggaccatatggattttcaaacatttgtttaaaattccctgaatcaacgcattcgcataaaataacaaattgatcacatctaagactttatatttttcaaacttcagtgtattttttacaaaatgaaccatcggtactgacatcagcataaatgcataaaaagaaatcattcctgtcagtgccggaaatgatgtatattcctgtgctaatgctgaatctgacaaaaaccagatcccacttagtgccagaaatgctgctatgtttaagaatctggtgctgtttaatttaaaatgcttcagataaattccagtgaccaacgctacaaaacttaagaaaaacatgatcgcgatcatcacgataccgactatttcctgttgaacatggaatcccataactacatctccacgtccaactaaaatatcatcaagctgataacttccgttacttccgttctgatatatgatcttgataacggttccctttttcccatgttctgggattctcgcatcgcagcttaatttagatttcatttgatcattgcgatgaaaattagaatcactgtatcgatagatcaactgatctccagcataaattctgacagaatattttgctgcctttgttgtcatcagatatcctttgtatttctgggcaatcgtatcattatatagtacaagttttccttgcggatctgcctttatcttctgatttagatctacttgcacttttttattatcttgtattcgataccacccaattgtctctgttaattttccttttgtattctttacctctttttttatgatccctatgcagagcaacgtcatgacaacgatcacacaacagagtaatattccttctgttaactgaattaatcttttctttttatccatatattttccttctctttttagatttccaatatactcattataaagaaaaaaatgatctctgacaatctatttagagattatcctgaggtcatttttatgatttcatttttttcagttatttttgttcttcagaaaaccgttttttggcttttacgacttcctctacatgttttgctacggttgtacaacatcctccaactgcacttgctccagatttcatataattgtatgcgtattgttcaaatgacaggactgactgtttgccaaaccagactttcttcactgcatcgtactcttccccgctgtttgggtaaactccgatcggaatatcacagttttctttgatcttatggatcaatcctgtgatatattctggttttgtacagttgacaccgatcatttttaaatggggatatccttttgcaaatgttgttgcacattctgcgatcggtattccttcgcagatgatattttcacttagacatgagaaactgatccagtaatcatatccatattcttcagcaatttctgcctcaactttagcttcttttagagatggtactgtttcaaataaaatgatatctgctcctgctttgaagtaatttttgtgaacctgtttgatcagttctggctgttccgctaagatcttagctgtccacaacttggaattcagagagactcccccctattttccagtggtgtggacatagagtcatcaatgaccatgatcttattttctttgatgatgttttcaatagaattcttcatcataaaacatctcctttttcttcgactgtttcataagatactttttctggatgttctcctctttttaatgctggaataaaacgatcccaaaaatcattatatagtcgcatgatctcttttcgtttgctgtaaataaagatcaatgtgacaatgacataaactgcacttaacaagtcggttgccgcccataaaagatcggccttgatattataaaataataagaaatattgtattatgcatttcttacgttaatatttgacaacattttatttttgtgctaaaatacgaacataattgaacatggatcgtgactattatatgaataggcgagactagaatttatgataaggttatttttatacccttattatattttctggtctcttttttattttggaggatacaagtatgaaagaaaaacactacataaagaaagtgctcaataataatgtagtattttcgaaaaacaaagatggaaaagatattattttaactggcttaggattaggctttcaaaagaaaaaaggagaatttgttgatgaaaataaaattgagcatatttttaaaattgaaagcgatgatatcaacacaaaattatccgcattattagaacagattcctattgattacttctatattgcagattgcatcaaaaaactagccgaagatgatcttaacaaagagttaagtgataatatctatgttacactttgtgatcatatttattatgccgttgagagatatcataagggcttgatcttccaaaaccagctggtctgggaaattaggcgtttttatcctgaagagtatcaggttgccaaaaaatcaattgctattgtcaatgatgctttaaatatttcactttctgaagatgaagcaagctttattgcgttacatatcattaatgctgagatcaacggaaaagaacttcaatctgttattgaaatgaccaaactaatcaaagatatttgtaacatcgttcaatatgaatttaacatagcatttgatgaggaatctttaacttatacccggtttattcttcatttaaaattcttttcacaacgattactgcttcatgaaaatgttatggaagaagctaattttctttatgaccaagtagagcaaaatatgtcagaagcttttttatgtgctaagaaaatctctacttatattaaaaaaagctatgaatacgaaatatcaaaaagtgaaattgtttatctgacaatccatattcaacgccttttaacacaagggcaaaaattataagtttcattatgtacctaagattgtgactacttcgagtaggcaagacttaagataaattttaaatcttaaggaggaaaagaaaatgactaacaaacaactcgcagaagaaattttgcaaaaagtaggaggtaagaaaaatattaattcttactctcactgctccacaaggcttcgctttgatcttaaagataaaaattctattgacaaagctgccttagaaagaaccgatggcatattacaggtaatggaagttgccgggcaaacacaggttgtaattggttcaaatgttcaatatgtatacgatgaacttgccacattactcccacaaggtaatacatcttctgaaaaatcagacggtaaaaaaaagggagtcttcggatctgctctagaactaatctcaagcttatttactccgctgattgatgtgttaatcggtgcaggtatactaaaggggcttttaagtatccttacagctaccaatttattaactgacgcaagtggtacctatcagattttaaatgcagccgctgacagtttgtattattttttaccaattgttattgcaatcacatgctctaagaaattaaaaacaaatatgtttgtttctgtaacaattgctggtgcgctattatacccaaatttaactgcattatatgatgcaggaactgcaattacttttttaggaattcccgttcatttgactgcatttaagagcagtgtatttccaattatttttgctattgtgttgctatcttttgtagagaaaggactaaaaaagattcttcctgattctattagaagccgaattgctccttttttctcattactgatcgtagttccagtaacaattgttatttttggacctttaggatctatgttaagtgatacaatcgctaacttttatatgagtctttacaaatttaatccaacaattgctggtggtttcattggtgcaatcgctcaggtattagtaatttttggtattcactggggactgttccctattatcttctccaatatcgagaaatttggatttgatacaattttagctgtttttggaccaagtatcatcgctcagtctggtgctgcatttggtgtatggttaaagacaaaagataaacgtttaaaacagattgcatcccctgcagctattatgggattctttggtatttcagaacctgcgatttatggaatcactttaaaatatcgtaaagcatttgcatgtgctgttatcggtggtggtatcggtggtgcgattgctgggtcttgcggtgctcgtgctatggctgtcgctgttgctgcagttccaaccttccctgcttactttggaacgggatttactggatttatcattgcttactttggagcattcttaatttcagctgtcttaacttattttgtaggatttaatgattccatgatccctgaatctgaacgttatgatgcaaaaggaactgttacacctgttgcatcttctattgaaaacaatggggctattgcaatgaaattctacagccctgctgatggaaacgttgtacctttaacagaagtatctgatcaggccttttcttcagaagctttaggaaaaggaattgctgtaaaaccaatcaatggaacaattgtttcaccgattgctggaaccgtttctgctgtatatccaacagctcatgcatatggaattaaaggaaataataacgaagaaatcctggttcacatcggaattgatactgtaaaattagaaggtaaatattttacaccaaatgtaaaaacaaatgatattgtaatgcctggagatcttctggcaacgattgaattagataagatcattgaagctggttatgatccaaccgttatggttattgatacagctgacagttccaaacgaaatgttacattattagcaaaaaatacggttcatgcaaaagacgatcttgtcctaattgaatctatataaggaagtgatatcatgttacaaacaacaacgatgcctttatcgaaaggctccctacattcatgtacttttaaaagaattcctgatgaaacacgttttcacgttgttgatcctaacgtgatccaaaaggtagaatcttctggaaaatatattcttacatataaagaacctgatacaacctatttgaatattcatgaattaagaaaagagatgggatctccaaaccttgatctgtgtactgaggaaatcgaagaaattccatatcttgtttcattatctgaccggaaaattccgattacttttttccgaattccaaataaggaaaaacaatctgccatcgtgtttattcatggtggcgggtatattgggggcagcactttggtcttacaaaatcaatgccgttttcttgctgagcagtctggtgcaactgtaatctccattgattatcgtctagcacctgaagctccattcccagctgcttttgatgattgtaaagatgtggtcaaatggttagtacatcatgctgatcactggaatattaatcctaataacctttctatcgctggtgaaagtgctggtggtgctctggctgtttcctgcggtttatctgaagttggaaaatacttaaaacttgtgattcctatttatggagctttggatgtatgttccgcttctgatcttgattattgggattatgatctatacgacgtgattcctgaacataaaaaatatgttatcactcgtttaaatcgttttcgaaatttaaatggtacattacaaaacttatatcttaatgatatttcagatgcaaaaaatcctatggcatctcctttgtatgccacagatttatcaaacctttctaatgtattaatgattgaagcagaatatgattattttcgattatctaatgatctgtttgccgaacatctatggaatgctgatattccttgtgaagttatccgctatcagggaatggatcacggattttatgacagacttggatattgtgaacagacaaaagactgtattcttgagattgcaaaacatataaaataatatattgataccaaacagaaatgaattcttggttcgtaagaattcatttctgtttttttgtctacattttccaatttatatgtgttacaattgattcttgtattctacatgaagaaaggaaaataaagatgaataataataaagaattcttggcaaccgaacccatcggaaagttactgctaagacttgcgatcccaactttggcagctcagatgatcaatatgctttacaatattattgaccgtatttatattggacatattcctggaagtggcgctttagctctgactggagttggagtttgtatgccgctgatcatgatcatttcggcatttgctgctcttgttggaaatggtggtgcacctcgtgcttcaattttgatgggtaagaaagatcttgattctgctgaaaatattcttggaaattgttttacgatgcagatcattatctctgtgatcttaactttggtcatgttttttggaaatcgtacatttttgatggcatttggtgctagtaaaaatacgatcgagtatgcggttagttatatgaatatttattctcttggtacaatctttgtgcaattaacactcggtatgaatacatttatcactgcgcagggatttgcaaaaactggtatgtattctgttttgatcggcgctgtgatcaatattattttagatccaatctttatttttggatgtcatatgggtgtgcgtggtgctgcacttgcaacaattatctcacaggcttgttcttgtatctgggtgttgagctttttgtttggaacaaaatctactcttcgtatcaagaaacaaaacctgacactgaaagctcctgtgatcctgccttgtctggctcttggactttctttgtttatcatgcaggcgagcgagagtatcatctctgtgtgctttaactcttctttgctgaaatacggtggggatgtggctgttggtgccatgacgatccttaccagcgtgatgcagtttgcgatgcttcctcttcagggacttggacagggtgcacagccgatcatgagttataattatggtgcaaaaaatacggatcgtgtaaagggtactttcttcctcttattaaaggcaagtttgacttactctatcatcttatggggactcgtcatgttattccctcaagtgtttgctggtatttttacttcaaatccagctcttgttatatttacaaagaaggctcttcgtgtttacatggcagttatgtttatgtttggaattcagatttcctgccagatggcatttaactctcttggaaaagcaatttcttctattgttgttgctgttatgagaaaatttgtacttttaattcctttgatctatatcatgcctcatatttttacaacagatcagaccatggctgtttatatggcggaacctgttgctgattttattgcagtaacatttacagcgatcttgttttctgtacaatttaagaaagctcttgctgcgatccgtttatcctaaaaaagaaaagtctggaaaattctaatacttttccagacttttctttttatcatagggtcatagacgaaagagtcttaatctctctttaatttcactgccacacctttttcaagactttcatggactgcttctgcgatcaattctgcctgtaatccatcgtttccatcagctataaatggaagatcattctgtaaacagtagatgaaatcgttaattggttcaattccaaatccacttggtcgtccgcagttatttaagatgaaataagagtttggtgtgcgtaatttgctattgttatagatttctactccacgattctgagagtcgatcctaaacattgcattttcgcacaggatctgtgttcttccatcattgttttttgcgaatccttttggtaagatccaagaattttctactgtccagtagcatccattttccattttcagtgttgcctgaatagagtcgtatgtatcaactcctcttgcttttaacactttctttgttcctactgcgtatacttcttctacttcacatcccatataccaacgaatctgatcataacaatgtgttcctaagaaatgtacagggcttgatttgtctgcccagttgaaccattctgttggaacatcaatgatatcatccatgcacatatatccacggattggtgctcctgattcttcgttctgaagttcatttcgtacattgatcgccgctggatcccatctcttatgatagtcgaccgctactcttacattgtatttttcagcttctgctaaaattttcttcgcatcttctgatgttgttgctaatggcttctccaccagaattggttttccatgacggatcgctgctaatgccgggtccatatggaaagcatctggtgttgcaatagatacagcatcaatttcttcgttgtctaacatttcatttacgtcattgtatgtttttacgttgtattgttctgcaatgcgatctgtgatctctttatttaagtcacatactgcaactaaatttgtgtttggattccatgtatatgcatttacatggttaattccatagattcctgctcctactactgcaacattcataactttcatttcaaatctcctttttaactacatgacactttaattttctagaaaattcctacaaaagaaagtaaaatggaaactgcgatgattccaattacgatctttccggttcctacttttttctttctgatcaaccagtagattaagaataaaacgatcagtgggaatacatttgggaaaatagaatctaacttatcctgtactacgactgtactgatctttaacacagtttttaatgttaccatggaagcggtcatagcacccatcataaacatggcaagtacgttagcacctgagataacatcctgcattaaaccagatcccatgatcgttttaatggattctcttccctttttatatgtcatatttgttgttaagatcaattcaccaatacaatatccaacaaacagtaataatacgactaatgccagtggatttcctgctgccgcaagtgttgctgccgcgatcttcatcaatgttccgatgattccccagtcaaaactatctcctaaagctgcgacaggtcccatcagtcctgtttttaaacctgtgatcgccatatctggcatcttagatggatctttcgctctctgctcttccatcgcaatggttgttccaaggatcagaccacctgctgttacattacagttatataataataagtgacgttttaaggcttctgataaatcttcttttttggtatataatttctttaaaatatgtgaaatacttccgcaaaatgcaattccctgcatattttcaaagttcagaggcatctcagcggacatgtaccaacggaacattgctttatttaagtctttttgtgttaagactttcttttcttcttgtgtattcatttcattactcatgttctcttacctcctctgcaatttcctgtctctggaatactgtgataaatgcaatacagattgcgatgattccagctgttaatgagtttactcctccaacggatactacgatataacctaagaatacgaaaggaatcagtttgttctttccaatcatattcatgatcagtgcgaatcctaaggctggtaaaactcctcctgctacttctaatccatgtgtcacaaatgttggaagtgccttcataatgttaattactacatcctgacctaccatgttaataataaacactggtaagaatagtagtggaattgctaataacgctggataaatcgttgcgcatctccagatagcatctgcatttccttcttctgcatatttatttgcttttgctacaaagtatgtgttgatcacttttcttaaattggttacgaatgatccgagtaatccaactggtactgctaatgcgatcgctgttgttgcattcattcctgatccgattgcgatcggaataacgcatgttgctgccagacactcgtctgttggaaggttcgctcctggtgcaaaaatacctgcaaataccagtgcgataccaccaccgataattaatccttgcattggctgtcccatcagtaaccctgctacaagtcctaccgttacagggcttgagataaacaggaatccgaaatatgataagatcattcctcggcaccaccaatacataattcccatgacaattgctatgattacagtattcatatatttttcctccttctgttacatcttacgttttactgcatcgaaacttattgctgatatttcaggcattggctggacagtgatctcaatacctttactatttaattcttccagcatatcaagttccttttgtgaaattgcaactcctgttgtgatcagttttcttccttcctcatttggtactgctccaacattgatcgcaggtaattcaactcctttctctactaatttcagacatgtctcaatatctttggaaatcaaaaataccgtatcgtctgtgttatctagcacctcttttgctttatcaatggttacaatatcaacatctgttccttttggaactgccatcttgtaaatgtcactcataaattcgtcatttccaagtacatcatctactaatacgattcgtcttactgggcaaacctttaaccatcttgccactacctgtccatggatcagtctgtaatctactctcactaatttaatttctgccataattcttacctccgctctttcattatttttgttggacatttgattccatcctgtgctgcttcgatacaactttctaccagttcatctaacatctgggtttcacgctctgtcacaaactgaatgatcattggaagattcactcctgttactgtttcaacgttttctttcctcaaagcaatttttgttgccaggttggaaggtgttcctccaaacagatctgccatgatcaagactccttcttcctgatctaattcgtctacgtattcttctaacatctgctcccctttttgaatatcatccccagggtttagggtccatgctctgcactgacttaatggtcctgcaaacatctctgctgctttgatcaattcaacacttgaattgccatgtgttgcaatgattaatccgatcatcatacctcctctcttggtcatccatatttctatttcgacacattttaatttttttgtttttcacatcttacacttttttataaagcaagatccgtgccaactttttatttttttgcaaaataaaaaagcccatatctattttttcgcataaatacgtgctttttttatcctaaaattttaattattttctgtcagataatagatcattaagatttcccgctcattcagcgacacattgtacttgttttctatgacactaaaactctcttttaagttttttatgaaactttcccgacacttcagatcatctgtcatatcttcttgtggcaaccttcctttttcaaggatcaatcgttctaccatgacacacatatgaatatacagcatctttttttgatcgattgaataggttgtatcttctaaaatctccagcttgctgactgtttcttcaacatcccccatgatcttatctggattcaggatcgtaagctgtccgatcagattctttattgtaaaactccttacgatattctcaataaatcgttgcgtcttgtccttgtcacaatatcgtcctactgtggaataaatgactttctctcctcgctcgtcaatcaattcatttaacataagtgttgtaacaccttggatcataagcttgcttgtcgttatgataaactgtatatcatatttacgaaagacatcgcatcggtttccctccgtacttaattctgcataagtcatctccacaacatcgatatcaatgccttccaggcatccttgcagcaacatcttcatcttatctgtcgttcctaaacctgtcgtacagcataaaagaattgcttttggtttttgtttgcttggaacaaatgatttctttgtaacatggtgctcgatgatcgtatccataatattttgaagatcttcatgttttaagatcaattctcctgcttctaatgccatttctgtcgtaatattattgacaatccccaaatctccttcgacatcatcttttatatcttctgaaatatcaagtaatgatcccatatcgacaaagatcaacaatcctttggaggtattcgtatttttgagataacgcttaatccgttttactacatctttctttggcgtatcatattccatatcaaaagcttcaaatatataggtttcaaataccttattgacagtacttgtaatactggatgcagtcgctggtccatgtgatacgatgatcgcatttgtataatccatctcatcccttgcaatactgtaaaaatataacatcgcaaacatccgcacaaaccatggatttgtctcataatctactgcctgatgaagcatctcatagaaaataagtcccatcttataataccggtacatcactctctgcaattgttttgccagatgttcgtattttctgtcatctgtatgcttactctgattattcagtacataaagcatctttacaaataccatttccatcacaccactgtatttaagaccgtaattatcttgaagatagatcaaaatatttctcactgcctgtgtatacaggttctgcacatatggatgaatttcctgatcgatcacgatatcttcgattcgattcacttcatcataaatgatctttcgaaacttaatagttgaaatgtctttctcaagatattctcgaataagatcattgatcactttctccgaaaaatccacatccgcctgctctgtcatagaaatcttccacacagcatcctgatctggcgacacttcgatcatttcattgacatatggaattgattctccatttccaagaagcaatgtatcggaagacaggtggcttaaattaagaggtatcacttcctgtcctttacttctttcattgtatgcctttgcacaggataatcgaatgatattttttaacgttccaatattgccttttccttggaatgtcagcaatcgattgatcacattactgctcacctgaaatgcagtattcatcgttttggattcctgatggatcaaaaacaagatcaattcatacttctcttccaaagttctttcctgaaaatctggcagcactacatctaccggaattcttcttagaaatgtatccagcatagtttctctgccttctgttgttgcaaagatcagtcgaacattcaattcacaattttgtccgctgtctcccattctggaaatgatccctttatccatatatcgaaataacttttcctgtccttctggcgataggcgatgaacttcatccaaaaacagataccctttgtctgcttcttcgatcaggccttttgtatccttattggcccctgtaaacgctccttttttgtatccaaataagacagacgataataattctttattattcgcataatctgcacagtttaatacaacaaaaggggcatcctctggaattgttccaatgaatttcgcatattggtagatgtactctgccaaaagactttttccaactccacttgatccaaacaataaaatcggcatacccttgtttggataacctgccgataacttgcacttctctactgcgtcttttaaactttgatctgctccaataaatgttgtaaatggatcctctggtaattgatcttctggttgtatgtaagaaaatataaccggccgtgtcttttctttctggacaattccttctcttacaagctcatttaaaattccactcgctgtgtttctctgaatatttaattgtactgcaatactctccgccgtttgatgattcttacattccttcaacaatttcagaatacgatccttattattttcttttgccatactttttcttatcctttcttatttcgtactccaagtctcgtcttctttgttgttcttaaatatatacaattcttattctcatcataccacacatgatcggcaatttgttaaaatatttgccacttgaatattattatgtcaaaaaaggaactgcatgatccatttgcagtttcttctattatcattctaccatttatagtgatgcagctgtccttccatctgaaatgccttaaatccctgatgtctcagcacttcataggcaacgatcgctacagagttagataaatttaatgaccggatatgtggcagcattgggattcttatagaagtctcttcataattcaataagatctcttctggaattccagcgctttcttttccaaacatgatatatacatcttcgtcatcttcatatgctggtgccgaatatacatgttttgcttttgttgttgccatgtaaatcttgggatcattgttcttctctagaaaatcctcaaaattgatatatgtacgtacatctaatttatcccaataatcaagaccggctctcttgatcatcttttcgtttaaacgaaatcctagtggttcgatcagatgcagaacagcaccgcatgccacgcaggttcttccgatatttccagtgtttgccggcatctccggctcatgtaatactatgtgaagcattattaactctccaatctcttaactttttatctattgcttctttggaagatgattgataaatcgttccagacgccctaaagcttcttttagttcttcaatggaatatgcataggaaactctgagatatccttctccacaggctccgaaggcagatccaggaacgattgctactttctcttcatttaacagttttgttgcaaattcttctgatgtcataccaaatttcttaatggatggaaagatgtaaaaggcaccttctggttcaaaacattcgattcccattcgttgaaactcatgtaccaaaaatcgtctgcgctgattgtatgcagtcctcatctcctcgacttcatcatcacaggaacgcatcgcttcgatcgctgcatactgactagtcgtcggtgctgccatgatacagaactgatgaaccttgaccatctgtttcatcatgtaccttggtgctgcaacataaccaagtctccatccagtcattgcaaatgccttggaaaatccattgatcacgatcgatctgtctttcatctctggcaaggatgcgatactgacgtgatctcttccataggtaagttctgaataaatctcatcagaaattacaacaatatcatgttcttttgcaaactctgcgatcggttctaactcttcttttgtcatgatcgcacccgttggattgtttggaaatgaaatgatcattgcttttgttttatctgtgacagcagcttctaactgctcttttttaagcttaaatttatcttcttccttaagacttacgatcacaggagttccacctgccataacaacacatgccacataagaaacgaaacatggctgtacaacgatgacttcatctcctggatcaaggatcgtacgcatcgcaatgtcgattccttcgcttccaccaacagtcactatgatctcatgatttggatcataaaccaactcgtattttctttctaaatattcactgatctcatatcgcagctcctttaaccctgcattcgatgtataaaaggttctgcctcgctccaatgagtaaattccttcttctctgactctccatggcgtatcgaaatctggttcccctacacctaaggaaatggcatcaggcatctcacttacaatgtcaaaaaacttgcggattccggatggttccagacttacaactctctttgataaaaaatctctcattatggagtcaccgcctgtctctcatccactttctttgcttcaagaacagttccatgatctttatatttcttcaatacaaaatgtgttactgtactaacaacagattccagtggtgctaatttggatgatgtgaacatagagatctctttcatcgtctttccttctaacataaccatgaaatcatatcccccagacatcagataaacggcttttacttctggaaaattataaatacgttctgcaatgcggtcgaatccctgacctctttgtggtgttacttttacctcgatcatcgctgtcagttgatccttgcttgtattgtcccagttgatcaaagtatgatacccacagatgatatgttctttttccatatccgcgatctcattggcgacttccgtctccgcgacatccagcatcaccgccagatcatggatcgctaaacgactgtttttctcgatcaattttaaaatcagttctcttaattctgtgttcatactgtttcctccatttttctctctaaaaattatctgcgattattttcagaatatattttatataactcgtcctgtctaggtgcctccagattcgctgcctttccctgacgatagattactttatctctggaatctgttgtatgaccaataatggttgctttgatgcctgcctgttccagttcattgactaatgttcttccatgatctgttgtgatcagcatagatccacttgagatcaactgatatggattcagatcatatcgttcacaaaattcgatcgtatgttgtcttaatggaatatcttcaatacaaacttccaccccgacaccagatgctttggaaatctcccataaagcaccataaactccgctttcggtgatatcatgcatacaagatgcatattttctggcgatcagaccttctggcacgacagagatatcatctagaaatgcctttgcatcatcaataaatgtatcagaaaaccattcttttaactcatcttctttttcatttgcgatgattcccgttccttccataccaagatattttgtgactacgatatcctgacctggtttcgccccgccagataagatcaattcatcttctttcacttttccaatccctgtcacagataatactggctgcgtaaccgctgccgtaatctctgtatggccgcctaataccatgatatttaatttctcacactctgcattgatctgctgcatcatcttcttgatctgtgcttccttgatcattggtggcagaagtgctgtcaccataagtccgatcgtctcagctcctgcggatgcaagatcgttggcagttacatgaactgccagacgtccgatctcttttaccgtgcctgtgatcggatctgttgatgtgacaaatacttctccttcctgaagtttcaatgccgcacaatcttccccgattccaggtcctactaaaacttcatctctccttgtatgcaattgctcaaacacaactttctgcaatgcagattctgataattttcctattttcatccttaatttcctgtgcttccctgagatttcacagcagatgatctcttcgctgttgtagacttctgtgctgccgttgtagatttctgtgctgctgttgtctcagacttctgtgctgttgtttcttttgaatcctttttcttattctttttatcgtcttttttatcttccgctttctttgttcctacacgataaaccgtcggtgttgacatatatgtggaagtattaaatacctttttagatacctgcttaccattgatcttcacgatcttccaaagtcttgcactgtatcctgtatgtccatagctttccagaactttctgtccttcggcaagcgtattatcgctaactgtactttcagaactttcttttacctgtgttgtctcagataagaattctaccgtacgttttggatcttttttctttccatagaccgtaaatgtgatcgttgaaccatttgcttttccttcaatatagatcggagtatcgaatgtattcttaaacttcatatccttatgcgttcctgcgatcgctgcatctgcagatcttggtacataatgtacggtcatggaatgtggaaaacgttctacgatctttaattctgcacggataactgcattatacaaagtagtagatacctggcagattccaccaccatatgtctgaaccgtctgtccgttttcataggaacctgcgagtgcatatccattttcttttgtaaatggtgatacggttttatatacagataatgtctctcctggataaaccatgcttccgttgatcttacttgcaccattagcaacatttactttacgaccatatggagacccaccgtattcggttgtataagttccaagtacatctttgatctctgccatatcttttgatgtatattttgcttttttctttacaacatccagttcaaattgatgttttccagcttcaactgcttttttgaaattcgcaaatgtttcattcatatttaatgtataacctgtcttttctttgatcacgacaaatttgccagccttacgtttcacacttgcatttcttggttctgaaacaatcttctttgttgctttttttacattcttctcaaacttcgctttatcatatttgcgataaaccggaagtttatgtttcttctcttttacatcggaatactttgtaaaaatacttccacttctcccaagtgcataagcttcttccactgtcttgtctgcctcagcgaatgctccaagatcttcgatcttggcacttgatctttcatcgtctacataaagtgtgatcttttcctgatgaatctccttcatatgagattcaatcgcatcttttgcttctgatcttgtcattccaccgatagaaattccctcacatgaaaccccttttatgatctttccatcttttactgcactgctcaccttatggtttaggtaaaaagttccacctgctgccaaaataacgatcactgcgaccgcaatgataatttttttcttcatcgtctcttccttcttcctctccaaattcattcttacatcatcaaatatcctgctaccattgttccaaccatcacaatgatcagaagaatcgcaataacggatacaaaaaatcttttctttttcatttcttcatcactccataatttaatataatatgatcaatcttctttgatgcttctctctgtgtcatctgatcaatatctaagcactcccctatcgcatgatatttcatcagattctctagatacttcttttgttttggtgtagccggacgttctttctttaccttgaattgaagctgctgtggctgaaagatttcctcttctgttggaaattctttcttcatctgctcaaacacaacagctgttgccaatgcatcatcgtaagcacggtgtgctgcctgattcacataatgataatgagcacagagtgtctccagcttcttattttcaagtccagttaataacttccttgctacttttaacgtgtcaactcctgttttctcaaacggatacttaaatgaagctgctgccatcttcataaacttatagtcaaacatgacgttatgtccaagaaccggaagatccccgctaaattccaaaaattcctcaacaccttctttcagtggaattcccttccttaacatatccctgctgattcctgttaaattgatgataaaatcactgacttcgatctctggatgaatgatacagttatactttccactgatcttcccatctctgatcttaacagctccaatttcaataatctgatctgaatctggggataaccccgttgtctccagatcaaatgcaacataatctttcatctgtcgttacctctgagaatttatacttatttgtgcaagcacaaacgcaatttatacttattgacacttacatcatattatacacaaatcaactttttgcctcaaccctgttttctactatatttttatgcttttttatgttacgattaacctagatataattagaaaacaaaggaggacggcaagatgataaagctgatcgtttctgatcttgacggaacactgcttaacagcaaacaacaaatcagtgatcgtacactccgtgcgatcaaacaaattcaaagaaagggactccgtcttttgatcaatacggaacagaattattttgatgccaaaaaactcctcgatgcatacgatatttcttgtgatatcgcatgttttggcggttcctgcatctttgatacttctgggcaccagctgcatgcttcttatattccaaccaaacgtatccctgagatgctgcggatctttggttcctgtcgtactttttatgaaatccacagtacccatggattatgtgtcttaggttccaaggaaggatatgcaaattatctgtcttctgaagttgttcccgctttgagagcagaatttccaagtcaaacactagaccaagagtcttatatctgtgaacgacttgaaaatgctcatttttatgataatggacaacttcttctttctgagaatccacagatcattaaaatcacgacgcagtccttagaccagcaaaaacttgaacagcttacaaacagccttcatacacaggtcccacactttgcagtatcccatcaaagttcatatcgtctcgatatcacagctgtaaatgcattaaaaggtgcggccgttcatttttatactgaaaaatatcagatttcactgaaagataccatggtgatcggtgacagcgaaaatgattattctatgcttggacttccttatatcgaaagcattgccatgggaaatgcagatgatatcattcaggagatttgtctccatcacacaacagataacgatcacgacggcgttgcgatcgtgttggaacagattctttccagacaatgatcattgaaatatatttttaagcaatttggaatgttttatctattccaattgtgatactataaagattagaagaaattacacccaatacaggaggctatcacatgattaaattaatttcatccgatatggatggtactcttcttgacagctatcgtcagattaccccgatcaatgtcgaagcgatcaaaagagctcaggaaaatggtatcaattttattatcaacacaggacgtgaatatccaaatgcacgcggtcttgtggaagcagccggattaaaatgcgacttaatctgcagtaatggagcttgtgcttttgataaagatggaaatcttttattcgaacatattcttgacaaagaaactgtccgcaccatttttgatgcatttaataaatatggaatggaacctgcattgtttacaacagaaggacgtatttctcttcttccattagaagaacgtgaaatatatacaagagatgtattcattcctgctattcaggtcaatcacccagatatgaaatatactttagatgattaccgcgaattagtcgatgatgttatctttgttgatggtcaggaagcattactagacagtgaccaccgtatcctaaagatcacatcaaattctccagatcatgaatccctaaagaaactacgtgtagaacttgaaaagattccgggacttgctgttgtatctacggttccaacggatattgagattacttctatcaatgctcagaaaggaagctctttactagattatgcaaaaaaagatggattaaaaccagaagagatcatcgcgatcggtgacagtgaaaatgattattctatgttatctatccctggtattcattccgttgctatggagaatgcttgtgatatgatccgcaatatctgtgtttaccagacacgtgcgaatactcgtgatggaattgcttatattattaattgtatacttgcagatcgagagaatttcaagttgtgatttgtaagtagtgttggtcatgtatgagtatttattataatttcccgtctactgcaacataacctgaaaaccaataacgtccaacatacatccaccagcttgaattttcttaattttatgattgaaagtcttcaggtatttagagaaaaaatgaaagatagcatgtgagcaacgatcgaattccataggagttttgatagaatcgcaggagatccagcggataagcgttctgtcaaaactccgtcaatggaattcgtgttgctcacatgctatctttcattttttctctaaatactcgatgaccttcaactcatataaataaaataacctattttcgttttaatctcaccacagtctctacatgtgagctatgactaaattggtcgacggcgcagactttttcgacttcgtagccttgttctgataatacttttaaatctctggctagtgttgctggatcacagcttacatatacgattcgtttgggtgccattttcaccattgtttctaacagtttactatcgcatccctttcttggtgggtcaacgacgatcgtgtctgcatagactccatttttctcgtattctcttggaagtacttcttctgcttttcctacgaagaattctgcattatcaaagccattcatcttagcatttaatcttgcatcgtctatggcttctttaacgatttctactccataaactttctttgctttctgagccaggaataaggaaatagttccgattccgcaatagagatcccatacggtttcttcgccttttaaatctgcatattccattgctttttcgtataatacttttgtttgtgttggattgacctggaagaaagatagtggtccaatctggtattttacattgccaatataatcataaatgtatggtttaccatatacttcttcaatcttgcttcctaagatcctgtttgtcttttctttgttgatattgacgcagatacttgtcattccttcgatttctgttaaggaatctacgagcatttctaagtttctcagattctttttacttccattcacaacaagacagaccatgacctcacctgttttgaatccgactcttgttacaatgtgacggaccaatcctttatggatcttttcgtcataggctgtaatattatttttcttcatatagtccaaaacttttaataaaatctgttcgttcactggatgctggatcatacagtgtgtgcaatcaataatatgatgcgttcttcctgcataaaatcctgtgataagatttccttctttgtcatatccgactggaaactgggctttgtttcgatagtaaaatggttcttccatcccaaggatcggctccattttttcttcgatattttctaagcctccaattctttctaaacagtttttcactttattaaatttatattctaactgcttttcataagctaaatgctgtaatgtacatcctccgcactgtctggccttggaacagcgtggattaactctgtctttggatgcttccaagacttcttctactcttgcgaagccataatttttctttgttttgatgatctttgcacgaactttgtctccgatgactgcatcttttaaaaaaagggcataaccatctatatggccgatgccctctccttcgttcccaatgtcatcgatatagagttctacgatctgattttttttaaattccatacgcacctctgtatctttttcttggttaaactgttgtattgatcctattttattataattcttttagatagaggtcttacggattcttgtatctaataaacgctggaatcctgaccattcctgatcttctttttgtttctccatgatctctgcaaatgtttccatcttcgcgtctaaattatctgcctgacttagtgcaattgcttctaataatgcaggtttctttggagaaccaaattctaattctccgtgatgtgctaacatacagtgttttacttcatttgcaagttttggtgggaaacctggaatctcatggatcaggcggtctaatttgatcgctcccatcacaatgtgtccaactaactgaccttcatctgtatagtcattctctggaaagcttgataattcttcgactttccccatatcatgccataatgcacacattacgatcaagtctctgtttaactgtggatacagatttgcatagctttcacaaattttcgctacagataaactgtgctctaaaagccctccgatatacccatggtgtacgctttttgctgcggaatgtactttaaattctcttgcaaaatttttatcctctataaagatcttctctgctaactgttttaaatactggttctttgtcttgctgatcattgcaagaagctctttgaacatcccatcaatatccttcttggtacttggcatataatctgccatgtcaaactcaccttcctgagctttacggatctgttggatgtttaactggttagaaccctggtaacttgttacctgtcctctgactaaaatgtagtccatcgcctcgaaatgtccgatcgcattggtaagttcccatacctttccgtcgatcattcctgttttatcttgtagtgtcagggaataatatgattttccaaatttggatgttcccggtgattttgtcttacataaataaatctcggaaacctgatctccttcgtgcaaatcactaatatatctcattgctttgtgcctttctaaattcgttcttcgccagccaactctcctggcgatttttaaatcctctattttttacctatgttattatgccacagtttagttgtaaaatctagtgaaatttacttattatgaacgtcatgatttcaaaaggcacaaaactgtttatgaatttacatttttcgcattcaaatatgcctgcttatagaaaaattcctgtgaatttagtggtgtatcctgatttttaggaattttataatttccattgtgatcttcttctcttgcttttacattatcacttaacattgtaataaacatctcgatcagctgcattttaatatctgtattgtagatcggtacggctacctcgactcttcttaatgtatttcttgtcataaaatctgctgacgctatataaactttttctctgcccttcgttccaaaaatatagattcttgaatgttctaagtatcttcccacaatacttcttacttgaatattatctgtttcaccctttactcccggaatcaggcaacagattcctcgaatgaccatgtcaatcttcacacctgctttggatgctttgatcaatttctccatgatctttttgtctgttaaagaattcatttttaatccaatataagctggttctccagcttttgcatgttcaatttcccgatcgatcatatggagcactttattctgtagacagtgtggagctactagcagatgatccgtttcttccacagtctctcccatagataatgcctgaaaaacttccgcagcttccaacgcaatatctacatttgctgtcattaaagaaagatctgtataaagtctgcttgtcttttcattgtagtttcctgttccgatctgtgtgatataagatacttttccttttttctttcttgtgatcagacataatttagagtgtactttataaccatctaatccatagatcacgcggcatcctgcatcttctaactgtctggaccattcaatattattttcctcatcaaatctagcctttaattctacaaggatcgtgacatcttttccattttctgctgcctcgatcaaagatgcaatgatcttactctgctttgcgacacgatataatgtcattttgattgaaacaacatctttatcttctgccgcttcctgaagcatttttagaaatggccgcatactttcatatggataagagagtaacttatcttctttttcaatctgatccataattggcatttcttcgttaaactgtggtgatctttgaggaactcttttctcaaaaaacaagtctgtctctcttcttaaaatatcctgaatcttaaatacaaaagacagatctaacggtgtctgtgtatagaatacatattttctttcaagttccagatattcacataaaagatcaatgatctctccatccatctctcttgataattccattcggactggtgctaatttttttcttttcttgatcagttctaccatgaaatcacgataatcaagatcttcatcatacatagaatctgcatcaatatctgcatttcttgtaattcggatcaatgtttttgctttgacatggtatcctttgaagatccttggcacatagtgaagaatcatttcttctgataacatataagcatcttttccagaaatattgatcaatctgtcaaacgtttcatttccacatgggataattcctaatttttcttttccatttttagtttctaacacagcaactgcgtagatttctttattctttaaaaaaggaaatggctgtctcttccctatgatcgtaggagagatcaatggcgcgatttctgcttgaaaataagctcttaaatattcgctttcttttttagatattttttgaaaatttaccagatggatgttgtgttctttcagagaatccatcatctcctcatatacgctgtcttttcttctatttaatttctgtacctgtggaatgatcgcatcaatctgttcctgtggtgtcatctttgtcttattttctttcatgttcttatcaagtaacatctgatcgatcaaagatccaactcttaccataaagaattcatctaagttgctctggtaaatggatgcaaatgtcaatcgttcacatagtggtacttctctattctcagcctcttctaatacgcgttcgttaaacttaagccaggacagttcccggttcataaaaatcttctgctgtgttttcatcttttcctccaaatctctatacgatgtaatttctattgtactggtcaaatgtaaaatcatactgctttttatgttaagttatcgtaaattaacgtctggaattgccattttccctatgtttacagtccaaacaatctgtgttaaactctttagtgagttgcaataatttaatgtaaatgaggaatttttcatgaatcagaaagtattacaaacacttgaatttgataagattataaatattttaacaggatacgcaacaaccgaactaggtaagttgatgtgtgccaatttaaaaccaatgactgaagaagctgatatcttaaacgctcaggatcagacacaggatgcattgacacgtatctataaacgtggaaatgtgtctttttttggagtaagtgatctttccccttctcttgcccgtttgaagatgagaggtacacttggaactggggaacttcttgatatcgctcgtgttctggaatctgtaaagaatgccgtttcttacggagtccgcatggaagacgatcttgaagcagattctctcgacgagctttttgaaagccttgttcctttagatgatcttctgcacgagatccgccgctgtattatttctgaagaagagatcagtgatgatgcctcttctactttaaaacatatccgtcgtgcaatgaaacagacaaaccagaagattcatacacagttaactacgctggtaagctctgcatccaatcaggataaattacaggatgcgatcgttacaatgcgaaatgggcgttactgcataccagtcaagcaagagtacagaagttcattccaaggtatgatccatgatcagtctgcttctggaaatacgctgtttattgaaccaatgtctgttgtaacattaaataatgaattaaaagaattggaaggaaaagaacagtctgagattgagcatattctttctatattaagtgaacaggcttcttatggtgttgatgatcttgcatacaaccagaagacccttgtattattagacttcatttttgcaaaggcaaaatatgcgaaggatattgatgcatccaaacctattttccgtgaagatggaattatcaatatcaaacagggatgtcatcctttactagaccgcaaaaaagtcgttccgatcaacgtatctctcggcaaagatttctccatgctgatcgtgaccggaccaaatacaggcggtaaaactgtatctttaaaaaccgttggattattatctctgatggggcaggcaggccttcatattcctgcattccaaggatcttctcttggaatttttcgtgaaatttttgcagatatcggagatgagcagagtattgagcaaaacttaagtaccttctcttctcatatgacaaatattgtatcgatcgttcagcaagctcatcgagattctttagtattactcgatgaattatgtggtggtactgatccaatcgaaggtgccgcacttgcgatctctattttaagtgatctgcacggacgtggaattaaaacaatggcgacaacccattacagtgaacttaaaatgttcgcactttccaccgatgatatcgaaaatgcttcctgcgaatttgatgtagaaacgctttctccaacataccgtctgatgatcggtattcctggaaaaagtaatgcgtttgcaatttcccgcaaattaggattggatgaacatatcattgaaggtgctgcagatcagattgatgaatctgtcaaagattttgaaacgatcttagctgaccttgaaaagagtaaacagacgattgaaaaagaacaggaagagatccttgaataccgtaaggaaatcgaaactctccgtaagagtttaaaatctcgtcaggataatataaaagaaaaacgtgataagatgcttcgcgacgcccgtgaagaggctcacaatatcatctctgaggcgaaagagatcgcagattctacgatccgtgaatataacaaattaaagaaacaaaacaagaatccagatgcaaataagaagatggaacatatgcgaagtgatcttcgcggccgcatgacaaaattagaaggtcaaatggcttacaaatccaagaaaaagaacaagaaacgtcacgaggcgaatgatttccatgttggtgatgaagtttatgtaacaagtctttcccttgccggaactgtttccacgctcccaaatgccaaaggtgatctgtatgttcagatgggtatgatgcgttctcttgttaacatcaaagaccttgaaatcacaaaaacagccaaagatgtaaaacgtgaaaatcaaagaaatgaaagtcgtaaccgaggacgtactgcgatcaacaaatccgcttccatccgacctgagatcaatgttatgggtatgacggttgatgaagcgatcgcacagcttgataagtacatcgatgatgcgtgcctggccaacttagcacagatcactgttgtccatggaaaaggaactggtgctttacgtaaagggcttcataattactttaaacagttgaagaaacaaaaacgtatctccggttaccgtgatggtgaatatggtgaaggagatcttggtgtaactgttgttatactgtaaaaaagatataaagaaggagattttatgacttattacgatatcttatttagcttttttatatatgggtttcttggttggtgttctgaagtcgcttttgcagcttttaaacaacattcctttgtaaaccgtggatttctaaatggtccgatctgtccgatttatggaattggagtgacggttgtcgttgcttctcttcagccttacgtcggaaacttgatcttgctttatattacctccaccattctcgttacttttcttgaatggctaacgggttttcttcttgaaaagatgtttcatcacagatggtgggattattctgaaatgccattgaatatcggcggctatgtatgtcctttattttctgcgatctggggcgtcgcttgtgtattgatcgtgaaacttatctatccttttacggataaactagtttcttttttcccgatatggcttggaaaatttttgcttgttttattaagcattgctcttatagttgatatttgcatcacagttcagggtattttaaaattcaacaaacgtcttgcccttatggaggatattgcaaaagaactgcgtaatatttctgatcagatcggtgaaaatatctacgatagtatgatggatggtctggaggctcaagaccgattaaaagctcgtgcagatgttattcgagagaaagttgatgaagccagacaggaaaatgcagatgaactcaaagctcgtatggattctttaaaacagcgagctgaggaacttcgtagcaaatacgaaaagatggcaaaacttcctacatttacatcacgccgtattttacgtgcattccctaagatgatgcctcgtgaacatataagagaatttggacagttacgacgcatcctgaagaaaaaaagagatgaattgaaaaagtcatgataaatttttaactgtaaaaatgtcaggtacatctaagtttctcgaaaacttagatgtacctgacatttttttctttttattttctatccaattaacacagtttttccacttcctgacgttacgaaagaaactaattcgtgaatgtattaagaatataatcaacgtccgtcgtcttctttaattcttccagaatttcttcttctgtcactgcttctgtaatctgtccaagaatctctaaatgttcatctccaactccagcaattccaatgacaagctgtgctgttccgccattaaattcgactccgtctggatactgcatcacaataattccgcttctttttacgtctctttttgcatcttctgttccgtgtggaattgcaagtcctaatcccatgtatacagatgcttcttcatttcttcggatcattgctggaatataatcatcatctacatatccaagatctcttaaaagttcccctgctgccacgatcgcttcttccatgcttaccgttggaagtcccagtttaattccttcccttaccaaaatcataccttctttcgctggtacttctggtgttgtttctacaactggtgttactgtttcttcctctttattttttttcttattcttgaaaaagaatcccataattgtctcccttctaaatccaatttttattccattatttttttctatctctattatagcaatgaaatttttttacgtctatttttagtagtgctaattttttcagtaaattttgtgtcattattttgttttcttccgccacgcccttttattaatttctattgtttccttttatagatcattctttaacatataaaaatccttcatacgtattttgtgaattctcatcttctggaataatttctaatgttatcctcttgtaactatctccttcttttcttcgataggtgatcgttacaaatttctttttatttgcaaattgctttttcagatattcaatctttgtcttcttaagatatttcaccaaatcatctgaatgaataagccgtatatcttcaaaattgtgaaaccactctgacagagctcctatggaatcttgcttctttttattcttggtttcttcccaatttaaaatcttataacggtctttttccagattgatttggagaatctgtgtatacaatctgtaaagagctacataggcggctggctgtccctgacggtctactccatttttcttgtaatacatcgctttttcttcatacatacgaatatcagcaacatctgatatctctttcatggaatcccattggcattcactgcttgaaacatatccataggaaatcgaaagctccttgatccggttacatctccagtgcttgatatctccatcaaattgccgtctgatccattcaaactgttctcttttcacaaatagaattgctgcaaattcatctccacccattctataaacttttccatatctatcaaacctggtcttcatgcaagatgctgctacacagatcaattcatctcccgctgcatgtccttgtctgtcattgatgatctttagtccattcacatccatggaaacataaataaattgagaatccatgcgtatctctgaaatgtcttcgtcatatgcttttcgattaagacatcctgtcatcttatcggtattcgatatttctgaaatagaagaaagcatcacagattgttccttattcttttttttaactttcgacaaccttagtaccataaatagaataccgactgctgcaatactcaaatatacaaccatgatcaatattgcgatcaaattactcttgttgtctaccgcaatccaatatgtaataccaacgatatatttctgtgttttctttaagatataataattcttttttccatcgacacgaatgattcccgatgcaatcttctccttcgcaatcttctttctctgcttgcgaagccccatatcatctaacttcactcctatctttgaaacatctgtagccccatagattcttccagtttctttatccgctacatataaagcaattcctttatatactggaatatctgctacaacagtcctcacttcactttgtttgtttttctctacgatttcaattgtctgatctaacaacactttggatgttttatatacattctgactatttactagataaagaattcctgcttccaaaaatactgctgtcacgatcgtacctatcagcagaaagaaaatcttcaacgtcttatgttttatttttttctttttgttatacatgcatttccccttattttacattattatttagaccaagacactctatcattctccccttgatattcgaatactccatcattcttttcttctaatgctttgatcatatgatatgtatattcattatatggggttggaatccccaattctttccccattctcatcatcgcaccagagaacatatcaatctctgtgtggcaaccagaatcaatatcctgtaatgtcgagtatcttgcagatgctttgaccgcactcccccgtccagactttgcattgatcgtgcttaagtcgattcctttcgctttagcaactgcttcaacctctgctcttaatccttctcggatcgctgccatatgttcactatcttcatagcatccaactccaactcccaagattgcctgtggcagattattgcagacatttaatttgaatttgccccagatttctgcttgaatatcatctgtgataatccagtgaatacctgtattttcaaaaatatcattgactgcttttactcgttcactttcgtatggttgttgtagttctccaaaataaatccctactgttgtttctggatcaaaatgatatccattttctttcttctgtgatgctactttaataaaggagtataaaatatgtgatttatcaattttctccgctatgatctcttcactgtcaactccgttcatcagactcatgaccgttgtattttctcctactattgtctgaatatcctgtaatgcccctctcaaacttccgtattttaaagatacgatcagaagatctacattgtgtgcttcttctggagtccacacttgcggtgtgtattttgttccgttgatcattaatccttggtttttgaggcgttcatttctctcaccatctgctacaactcccagtgtaatatttttattatttgacagtccccagataacgtaagaacctacggcacctgctccaagaactgctacttttttgatgttcattgttttttggttcctcctgatcgtcgttttttgattgttattcttattttaacatttttggagtgtcttttgggtatattcttgttttatttatatttatttattataataaacataaataaatataaataaacatatattcatataataaacataaataaacacaaataaatatggaggtgaatagaaaatggaaaatccttttactttaacatttggtcaaaaacctacggaattcatttcgcgcactaaccaaattggaaagatcattcatacatttgatatggaaaatccttcaaataaagtttatatggttgctggtgtcagggggtctggaaagacggtttctcttgctgaaattgctgatcattattcttcaaatgatcaatggattgttttaagattgagtgctgatacagatttgatcgctggtgcagtttccgaacttacccgcgtttcacaatttcatgatctggatcttggattaaatctaaatctcggaattgctgagttgtcggtaaacaaaacaaatgattctttggaaaaagaagctatgcttcgtaatattcttgagaagttaaaaaataaaggaaagaaagttctttttatcattgatgagattataaataattcttatgtcaaagtatttgctagtaattttcagatttatattacacagaattaccctgtgtatcttgtaatggctggtttgtttgataatatcagcaatcttcaaaacgagaagagtctgacatttttatatcgtgctccaaaaatttttctggaaccacttagcattcctgcaattactacaagttatcgttctgtatttgacatttctccaagtgaggctgttgagatggcgaaacttacaaaagggtatccttttgcttttcagattcttggttatttgaagtgggagacaaatgatgatcttgaaaaactgcttcctaagtttgacgaggaattgatcatttatgcttatgagaagatatggagtgaactttctgaacttgaccggaagattgtttatgtaatttctacgggagtttataaaactggagaaattcgtgagaaattatcgatatctccacagttattgaatacctatcgaaagcgattgatggaacgtggtgttgtgaatggttctgttcgtggagaactgactttagcgctgcctcgatttgaggaatatattgagatgtattgtgaagttgaaatttgaaatcaaaaaacacccgctaagttatctttgaaataatataacttagtgagtgtttctatatataatcttttaagcaatctgtgcgatctctgtctcatttgctaccacattctgatcacctacaaatgtaatactctttgcttctccctgatcaagcacaactaacattgtaatatcgtcacaattttcttcttttaatttttctctatcaaacgtcatgatcaattgtcctgctttgactttgtcgccttttttaacttttgagctacaaattcctgtcagatttacggtattaagtccgcagtgaatcattacctgtaatccattatccatcacaattccaattgcatgctctgatccttcaaatacaacttcaactgtaccatcgcaaggagaataaattttatcatcatttggtttgatcgcaattccgtctcccatcattttctgggaaaatacgtcatcgtttaccttatcaatacttacaagttctcctgttaaaaatgcttttaagtttttatttttcttgaaaaaaaa

SEQ ID NO: 766 - DNA, 678 bp, Unknown
  gut microbiota DNA sequence
tgacggtacctgactaagaagccccggctaactacgtgccagcagccgcggtaatacgtagggggcaagcgttatccggaattactgggtgtaaagggtgcgtaggtggtatggcaagtcagaagtgaaaacccagggcttaactctgggactgcttttgaaactgtcagactggagtgcaggagaggtaagcggaattcctagtgtagcggtgaaatgcgtagatattaggaggaacatcagtggcgaaggcggcttactggactgaaactgacactgaggcacgaaagcgtggggagcaaacaggattagataccctggtagtccacgccgtaaacgatgaatactaggtgtcggggccgtagaggcttcggtgccgcagccaacgcagtaagtattccacctggggagtacgttcgcaagaatgaaactcaaaggaattgacggggacccgcacaagcggtggagcatgtggtttaattcgaagcaacgcgaagaaccttacctggtcttgacatccttctgaccggtccttaaccggacttttccttcgggacaggagtgacaggtggtgcatggttgtcgtcagctcgtgtcgtgagatgttgggttaagtcccgcaacgagcgcaacccctatctttagtagccagcatataaggtgggcactctagagaga

SEQ ID NO: 767 - DNA, 741 bp, Unknown
  gut microbiota DNA sequence
atcaataagatggatgtgtcggctacctggatgaacaggattatgattaatgaggttaagatgaatgcttcgacagatcaggttgccagacttcaggcgaaatccagttaagcttccagtgatgaaaatacgaacggataaaaagggagaaccattgaggttctccctttaaaaggtttattttatgcgattttccgatagaattattctccgaagtatctcttaagaagacctgcgaatgcttttccgtgtcttgcttcgtctcttgccatttcatgaactgtatcatggatagcgtcaaggttagcagcttttgcacgtttggcaaggtctgttttaccagctgtagcaccgttctcggcttctacacgcatctgaaggtttttctttgtgctgtctgttacaacttcacctaataattcagcgaatttagcagcatgttctgcttcttcataagctgctttttcatagtataaaccgatttccggatatccttctctgtgagcaactcttgccattgcaagatacataccaacttcagagcattcaccctggaagtttgctcttaaatcagccatgatgtcttcgctggatccctgagcaacacctacaacgtgttcagcagcccatgacatttcgccatcctgctttacgaatttatcagccggtgccttacatacaggacaggcttccggagctttctcaccttcataaacataaccacatacactacatacccat

SEQ ID NO: 768 - DNA, 6347 bp, Unknown
  gut microbiota DNA sequence
aatcatctagcaccatatctttccttgtaaatgtcagttcaatatatgctatagtataatcagtattatttttataagaaaaagtcagcttgcgttcatcatcaatgattctacttttcacactccaatcaatatctgacattttgatttctggcggattattgtcgtctctatttttactactattgctgctgcatccggtaaaacaacataaaatgagcactaatcctaacaatattttcttcttcatattcatttctccttcttttgtttggttacaattgtacacttctgaataaaaagaaatccccaccataatggtgaggatgtaataaatccgttattcaattccttttgataatttcgtcaacctttgattttccagtatttcatcgatatcgcccagatcatattttctgtagttcactgctacgatgatgcatgcatcccgcttgtcttttgcatataatggtttcatcgtacgcttttccatattcagtatcttttctgcaatgtaagatttgcatcacaacgaggacagaattcatcgccctcatctgctgctcaaatcagtctcttctccaaacaataatgataaattccatcctccgaaacatctccacagatttcatctgccactgctttcagatcatcggatgcatttgccattgcaattccattgccaactgcttttaacatctcgatatcgttattgccatccccaaatgccatagcctgagatttatctatgccataatgttttaacattttctcaatccctgctccttttcctgcattgaccggtatgatgtcaactgctcgatcccaccatgccgtaatctcagctccctggacaccttttaagatctcttgatactcttctactcttgcacccatcaacacttgataaactttttctttttttatatcttcgaaatcttctgctacatcaacttcggcattcccaaatgcatagtaatcgatcaagtcctgatcttttccatttgcagccatacggtctttcgttgctaatgcaactggctttcccattttgtctgcatttttaatgatcctttcaatatcttttaatggaatacaattgctatagagtgttccactgtgatcatagcaataagacccattgtatgtaagaaatgcatcaaactcaactccttcaaaatgtgggacaagcatcggtcctcttcctgttgccaaacaaagtttgactcctttttcctgtagtcgctttaatgcttctaatgttttttctgaaatcgtatcttgatccatagcgatcaatgtaccatcaatgtcaaaaaatatgattttaatatctttcatgtctttcttttccttctatattatgatgagagtttacgctaaataacgaaatgcctgtatgatataagacaaaatcttgatcataccctgctttttgctatccatcgtgcgttctgctacatccttgtcattttgataacttccatcttgattcactttcaaagatccgctttttaatctgctaaaatcttcttccagctgttttgtgatctcttttccttgtacaacaagcatcgtttctgtgtctacataggtacttctgcaatcaaagttgtaagaaccaaccactgctatatcatcatcaatgatcagagattttccgtgtgtggaatgtctgcccatatattcatacagtgacactcctgtacctaaaatctttgatcggttcttttgataatctgctgatgcacaaatattatctcctgatgcgattgaattcaagatcattgttgtgttcggaacctgttgtttcacctgtgcgatcccttcgtacatttctttggaaaacactgcatatggtgtatgaatgataactttgctttttgcctgtaacatcaactgcttcagcgtttcaaatacaactggttcttttccataaattgttgtcggattggttaccagtgttgttttcttcgttggaactgtaatcttttgataatcataatctggaactctcactttctctgcatggaacaaaaggcgcttgacttccttctcttttttattctttgagcatgtactaaattttgttttgcagacttctaagttccagactttttgaaaatatcttctgatctgtccgaccgcaccttgatcttttgatccttgattgacgatcagaatctccctgtctatacctttgctttttcctttgtgtgttccaaggaaataatcaaacatatttctgccacccattaagaggtacttatgatctaccacaatatatttgtcatgcagacatccattgatcgtccatggtttcaaaagatttggcgtgttataaaaacgaatttcaacatttggctcacttccaactgctgcaaaaatatcctttcctgtcatatggatcgttccataaagcccatcaaccagaatctttatcttgacgcctcgtctagatgctttgagtaattctgaaaaaatatcatcactgctgcttccttcacggatatcaaaggttgatagaatgatctctttctttgcttttcgtatcatatccaaccgcagatcaagtgcttcctgattatcactgacgatctttgctcggtctgatccattttcgtttgatgttgaataaaacgtttccgtatgaatctttgacttatttgttttgcttaccgattgcatatgtacaaatggtacaagcattccaatgatcacatacaaaataaacaaaatcagaacgattcctgctatttttaattttttcattgttctaaaatccttattttaatttagataaataattttaccgtctttattttaacatctttaataatgattttaaactattgatttcataatcgggttttggttgtggatcttctgtcagatcttgtgctctgtgaaaccagattgtcttgatccctgcattgatcccgccttgaatatcagaactcaagctgtctccaatgatcgctgtattctccttcttaaaatctggaatcttagaaaaacatttctcaaaatattcaatgcttggtttgttatatccaatttcttcggaaataaaaacaccttgcagatacttctcaattcctgaactttttaatcttcctctttgtacagacaatgttccattcgttacaagatagatacgaaatctctttgataattcctgtaaaacttcttcggctccttcgataaaatagtgtccctgtcctaaatagtcctgataatgttttgccacttcctgtggtgatgcttttatatcaaattcttgaaataaaagcttaaatctgcgcatttttacttcttctcttgtcattttcccttgttccaacaatttccattgagcaagattaatcttatgatagcaatcacgcatctcattcgtcacagaaattcctacatcacctaatgcccttgtaattgcattggcttctgctttatcaaaatccagtaatgtattgtctaaatcaaataataatgtatcgatcataaatcaatctcccttttaatatatagtgatattataacatgatgtaagtatcaaaagtataaattatgtttgttcttgcacatatatccaaaaagagattcatcgtaattgatgaatctcttttcgttagaatgaattgttatagattatatgaataatgatcgacttatttgtctttcaatactgcctgagctgctgctaatcttgcaattggtacacggaatggtgagcaggatacatagtctaatccggctctgtagcagaattctacagatgatggatctccaccatgttctccacagattcctaagtggatatctggacgagttgcttttcctttcttagctgccatctcgatcagctgtccaacacctttctggtctaatttagcaaatggatcagattcgtaaatcttgttctcatagtaagactctaagaacttacctgcatcatcacgagagaatccaaatgtcatctgtgttaagtcatttgttccgaaagagaagaattctgcttcttcggcaatctcgtctgccaataatgctgcacgaggaatctcaatcattgtaccaactttgtacttaatgtcagattcatagtaagcttttactttctcagctgtctgtacaacaacttctttaacatatgctaactctttcttctctcctactaatggaatcatgatctcaggaacgatatcatatcctttttcctgttttacttcgatcgctgcttccataacggctcttgtctgcatcttggcaatctctggataagtaactgccagacggcatccacgatgtcccatcatagggttaaattcatgaagagctgcacgtctcatattgatctcttctactgtaactcccatatctttggcaagagctgtaatctcttccattgtatttggaaggaactcatgaagaggtggatctaagaaacggattgtgaccggtcttccttccataacctcatataaatctttaaagtctttcttctgataaggaattaactgatttaatgcgatttctcttgcttcttttgttgtagagaggatcatacgacgaatctttggaattctctctgcatcaaagaacatatgctctgtacggcaaagtccaataccttgtgctccgaatttcactgcattcaatgcatcggcaggtgtatctgcatttgttcttacctgtaatgtacggatttcatcggcccatgtcatgatacgatcgaaattaccactgatacttgcaggtactgtacggatctcacccagataaatcttacctgtggatccatctaaggaaatataatctccttcctgtactgtctttccacctaatgtgaaagatttgccatcttcagcaaacttgatatctccgcatcctgctacacacgctgttcccataccacgtgctacaacggctgcgtgagatgtcataccaccacgagctgttaagataccttctgctgcatgcattccttcgatatcttctggtgatgtttctaaacgaactaagataactttcagtcctgcttcatgatgcagtttcgccatctcagcatcaaaatatactttaccagcagcagctcctggagatgctggaagtgcttctccgattggaagagcggctttcaatgctgcctggtcaaagtttggatgcagtaactgatctaatgctttcgcatcgattcttgaaactgcttcttcttttgtgatttttccttcatctactaattcacaggcgatacggagtgcagctggggctgttctcttaccatttcttgtctgtaagaagtacagttttccttcctgaattgtaaattccatatcctgcatatcacgataatgttcttccagtgtatgagcaatgtccataaactgtttataacaatctggtaagtcttctgccagtttagtaattggctgtggtgtacgaacaccagctactacgtcttcaccctgtgcattgatcaggtattctccgtagatctgtttctcacctgtagatgggtttcttgtaaatgccacacctgttcctgatgtatctcccatgttaccaaataccattgtctgaacgttaacagctgttccccagtctcctgggatgtcgttcattcgacgataatagatagcacgtgggttgtcccaagagcggaataccgctttgattgcttcaaataactggtcctttggatcctgagggaattcttcattcaaagctttgcgatagatacctttgtatctcttgatcacttctttcagatcatcggcatctaagtctgtatcaaacttcacacctttctctgctttgatgtcatctaagacatcttcgaatttcgctttatccacttcttttacaacgtctgagaacatctggataaaacgacgataagaatcatatgcaaaacgaggattgcctgtcttcttcgcaaatccttcgacagcttcatcattcaatcctaagttaaggatcgtatccatcatacccggcatggatactcttgctcctgatcttactgatactaatagaggatcttcaaggtctccgaacttctttccctgaatctcttccaagtctttcattgcttcaattacctgtgatgctacttcatcactgatctttccaccgcagtcataatagtttgtgcacgcttctgttgtaactgtgaatccctgaggaattggtaaattaagtcctgtcatctctgctaagtttgcaccttttcctccaagaaggttacgcatttcggcatttccttcactaaatttgtagacccattttgttgccatgtcaatacctcctaaaattaattatgtcacattcatatgtcattgaacttattg

SEQ ID NO: 769 - DNA, 466 bp, Unknown
  gut microbiota DNA sequence
aggatcaccatctgttgtttacaatgaggacagatcagaggatcatagccaaaagaagaaaggatcgcagtacgccaccggttaaaacaacggaaagtatgccgtttttctttcgaaatagcgagatggagttttttatcaatggaacgatgtctggcataaaggccgccataacggatcatcttgaaatgtttttcagggatgtgccggataaggcgtttgataaaatccatgacaggaatggtttcttgaacgtattgatcatcttcgtgacgattgtaatggaaagagacaagatcaccggtataagaatcgatcctggaagtggcaatgacagggcgaccaagataccggccaatatatttggtaacaatcttagggtcacaacggttgggcttggcataaacatagaagccgtgttcatgttccagataacaacgggcagaaacttttttaaaagaaggac

SEQ ID NO: 770 - DNA, 502 bp, Unknown
  gut microbiota DNA sequence
aaaaagaagaataagcaaaagataaactggatcagacttgcggaaaagaatcggatacctacggattgtagctatagtaatccccgtattagatatgatgggatcaactggtggattacagtaggcattgaatacgaagactctgttaccgttccctccaatgatgggatagggatcgatctagggatcaaagatttagcgatatgttctgatggcaataaatataagaacatcaataaaacgaaaaaagttaagaaactagagaaacaaaaacgcagattacagcgtagcatctctcgttcatacgagaacaataaacaaggaaaggaatactgtaaaacgaagaatgtgatcaaaaaggaaaaacttttattaatattaaatcatagactaaccgatatccgtcatgatcatttacatcatataacatcggagatcgtaaaacgagaaccaagttttatctgtatcgaagatctaaatgtaaagggaatgatgaaaaaca

SEQ ID NO: 771 - DNA, 152 bp, Unknown
  gut microbiota DNA sequence
tttttataaagacagattgttacgatttggatttgaattagttgaatatattgcaagtctatatgattgtgatattgaaatcatcgatcatactgaaaagacagagcaacaagaacttgttgaagatttagttcagataataactgtattta

SEQ ID NO: 772 - DNA, 848 bp, Unknown
  gut microbiota DNA sequence
aacaagtaatcatcatcagcattagcataatattccatgataacttctttaggtgttccaaactgctttactaattcttcgtagcttaaatctggaaataagtctaagtgttcatttatttgaacttttaaacgattcaaaaaagttcgttctgagttcccgtaaacagggaataatgtacgacattgtcgaatgtatttacgtgttatagtcataataggttcctcactttttgatatactgttctaaactctaggccccaaaacggattgaatagcatctataaatctaagcaaaatctaagcagagtaccacgtcctgacggacacattaacgtttcccctgattccgaatatactgttttattgtgtgcagactgttttcactaacagatgaaataaaataactatccgaccaaaaataaggtttccagtaatatttttttaaaatggtttcgccatacaactttcgtgcttttcgtgctgtttgtgtttttaaaacatttgcaagttccgccggtgaagttgttgtatcagcttccatcaggatatggacatgatccgattcgccattgatctctaggatgtgaaaccctctttgatctgctacatagtggatacgttcataaacaacatcttttactttgcctgttaagactggatgtctgtattttgtaacaaacacgatatggtattgcaataaaaagcaactatgccggtttatataataatctgtattatctttctttcgcatgatgtatctcctttacagctaaacatatgtttggtataattatactataaaagtacgatattttcaacatatcagaaaggagacaaccatatggc

SEQ ID NO: 773 - DNA, 521 bp, Unknown
  gut microbiota DNA sequence
gatcaccgcaagaaaaaaggagagtaaaacaatgacagacagcaattttacgatcggatttatcggtttaggattgatcggtggatccattgcgaagggaataagaagagtttttccaaactatacactcattggaatggatgaaaacccggatacgatcaaaagtgcattggaggatggaatcattgattcaattgctacagactgcaaaacagattttgcggaatgcaactatgtatttttgtgtgcaccggttcaatataatgtaatgtatctaaaagatctgaaaggatcgattaatgaaaattgtattttaacagatgtaggaagtgtaaaggaagagattcacttaaagattgaagaattaggaatggaagaatactttatcggaggacatccgatggtaggatcagagaaggcaggtttttctttcagttctgacagattagttgagaatgcttactattttatcacgccaacgaagaaagtcagcgaacaaagagtgaaagattttacaaact

SEQ ID NO: 774 - DNA, 173 bp, Unknown
  gut microbiota DNA sequence
ggcaaacgtgccaataaagcaagaaaacttgtaaaagaactgatagatgatggtggtgaagaagatgataaaaacaattcgagtcatgctgatcccaaataataaacagaatacaaaactttttcgatatgccaatactgccagattcgcttataactgggcgttaggaagag

SEQ ID NO: 775 - DNA, 63226 bp, Unknown
  gut microbiota DNA sequence
gcgctgcacttcattctgtccctgatttaccacatcatcataacttccagaatatggaactacggtatctatttttagaatatcgctatcattctcactctgcagcatttttgcaattctttccgtgtttccatttgaccatgaataatatataatcagtaatttcttcatctttttacctcctgtttcgattagtatactacttgaagttaactccaagtcaagagcttttgattttttcttcataaacgctggtatgacgcagactgtggaagacccaagactcgctactggcggttggttagaccttaccagacaggcattccacctgctagactactcgcccttatctgggcgcacaattccgatttgtatttctgtttgttttaaaaatgggcaactccaattggaattgcccactcattacactaattatgcgattttttcttgcttccgttgatatgataatatcaccaaaaggtgggtattgcacattgtacttttatatcatattctataataaaagtacccaccagaggaggtttatatgaatatagataatgttatgaatttcttttataagaaaatctcaattagagtaaaatatgctgtggataaaagtggacttagacaagaagatatacatagcaatcaaaaacttattagtaaaataataaataataaaagagatagacataaccgatttctaatcattgattccgtatttgaatgtgacataataaatgatgaaactggcgaaagaaaacctggcggattactgggtatcaaggaattaggatttaaggatgaaaaaagaggtattatggggaactgacgaagaaataaataattatatgttcgacctatttgagcatcttattttagaagttttttctgaccaaaacgagtataatttagatattgagaaatatctttgtgattacattccttatgccaagaatagtacctactgggaagtaattgttaaaggtatatacccagctatgttttatggtgtgtcagaagacaaaattctctgcgatttatttcctgctcgtgaagaagcaattcgacttatatataaccgatgctctgcatcatttaaagattatttcttctcttttattgaagataaaaaatcatttcgcggaattgataagatatttaaaacatcatttattgacgaaaaattcgttccactaattcgcgacaatccacctaattcaacatccttaggcttacgaatacagcaacttattcttgaagacttatcacatacagcgtctttgatagtaggtgaaacaataaacaatatagaatataaaaaagctttaatacatgcttcttcggaatatatattagctttagaagaaattcacgaaacattcatacaaaaaaaggaaatggaacttattaatttcagatccatttcattttttcctgttacaatgtttttcttagttaccacagacaaatccgttctcttataccagaacaatgtgactaggtcttttttctggttcttcaaaattcaatgttttatcatcaatatatgacttagtcgctgcatacaaagttgttcttccgctcacgatattattaacaaatgtttttatacattttctctcatcatccgataatactggaacaaaaacattttttgcatcttcctcacatacctctgcaagaccatctgagccccgtgaaaatgctctcatctgaacagcccatccctcgctattcaaatatgtaagaacatctgctaaatacttttcttttcctttcttcattcttgctctaaaacagccattagttataacaacattcttatctttttctgaaatgtaacaccattttacagcacttccccatattgaaccaaaataaatatctccctcttcagcaaaatgtcttgctcgactaggcaactcccagccacgcaattcctttgaataaaattctccatgtccaatatcttgaatttctgtgtaattgtaaatatttgatgaaacaagttttatcttcttaccatccgaagaagttttctctggtataaaatcaactaaatcaccaagtttgttatacatattttttttaatgttttctcgtagaacagtaaatttcttgcaataacgtttcggatctaatgtaaaatatttgtctgaatatacattatttatattagtaacccatgcaccgtccttaccttttacctctcgtcctatttttaaccaagggaacgtatctgaagcttgacttaatatgattctctctaaagcagctgtaaaatcgctatcaatttgtggttcattgttttcatcaataattaagcatccatcttccttcgctctaacataaatcggcgcagccttcttatttcctgcttcccatccgactttttcaatcatttcaacagcaaatgaatattcatcctcaaattttttaactggttttgtcctcttctccaaaaatacaatgctagcactaacatccgctccgcttgatttaaaggtaaaacgcggaagggatactattgctgcaacacgcgcattagagagtatccattgacgaactatcgcaaatttatctgacctattacccaaatatccattaggaagaataattgctattctccccctctttttacactcttttatacatgcttcaacaaaaagaatccctgtctcttgcttgtccattaatttttctgacttgacatagtaatctccttctcttgtccattcatatgcaagttgataattcttaagtacagcacttctcttttctacaattttggaaccgaacggaggattgcaaactactacattatacttttctttgtattcatccacattttttaatgaatcatcctttttaatatttgtctttccatcaccattaagtaccatatttaatacagccacttgaactgcatttgtagaattatctacaccccaaatacaatccgcaaatcctggattatattttcgacctattctaaaagctgccactaaaaaatctgcactaccacaagctgggtctgctatatgctctccaaactgaggattaataacatccataataaaatctgttactgtagttggtgtaaaatactgtgccaagtcccacttatacattgatttggcaaatttcatataaaaattctgcacaacatctctttttgagtgaattattttaatcggagctaatatcttcattacttcgagcaatgtgtctccattcatttcaacttcatccgaaatagggttcggcaaatgtgtttcataaaatgatattgcccttgataacaaatcgccatactgctcaattgcgacttcaggagatgttccaattgcactatagtcctgaattcctaccggctcatcaccacgtgtttcatatgcatgttcatcaaatatttttgtaagcagcaatttaagaataatcccatatctactttccggcgaaaaagatgcttgatgtaatatatcttcaatacgtgaaaatacatccaacaatgaatccgcttccattaacttattaaatgtgagtttttttgctgcaatcttacatccatatttcggcaaaaatgataaaggaccctctttaatttccctaattccatcatttaacgtattccaaaatactctatgttcaatattgtcccaatataaacctattgcatttatatccttggcaaaatcaagcattggtttcacttgtgtcattttcacataatcttttgctgcattgtctcttttcacctcacacaagagaattacttctttcattatctcatctgggtcaaaattattatattgagacttcggcttctttaatattgcaaaatcacttctaaaactatttcgtcctccatttccaaacttttttacaattggctcaatataaaaattttcttttggataacctaagttaattagatacttaattgcttcaactctaaaaaactcttctttgggtgtcaagccgtcttttgacttttttttaacttttaactgtcctcttactggacagataatatgcaaattatccatatttactccttctatacaataaggaggatagaaacttccttccatcctccttgtactgttttcatttattatctgagcatgttctctttttaatataatttcgcacctgccggaatatggttatcaaccataagaagatgaagttcttcatcctctgaatccttaagattatttactgctgaaagtaacataccacaagattcaattcccatcattgctctaggtggtaggtttgtaattgcaatcaatgtttttccaactaattcttctggttcataatatgcatgaataccagaaaggattgttctatctacacctgtaccatcatcaagagtaaattgtaaaagctttttgctctttggtactgctacacattccttaaccttaactgccctaaaatctgattttgagaatgtatcaaaatcaactgattcctcaaataatggctcaatctttacatttgagaaatcaatcttctcttcaacggtcgcaatctggtcgcaattttctgctgtactactcttggatgccctattttccttcttgtcggagtcgagtgacttcattgtcgggaataataatacgtctctgattgctgtagaatttgttaataacattaccattctgtcgataccgaatccgataccacctgtaggtggcataccgatctctaatgcatttaagaagtcttcatctgttgtgttggcttcttcgtcaccctgtgcaagaagttcttcctgtgctttgaaacgttctctctgatcgatcggatcatttaactcagagtatgcatttgccatctcccatccattcataaagaactcaaaacgttctacataatctggatcttctggttttctctttgttaatggagagatttctactgggtgatccataacgaatgttggctggatcagtttgtcttctacgaattcttcgaagaataagtttaagatatctccacgtttgtggcgttcttcgtattctacatggtgttcttcagcagctgctcttgcttcttctaaagtcttgatctctttaaagtctactccagagtatttcttaactgcatctaccattgtgattctctcaaaaggttttccaagatcgatctcgaaatctttatactgaatctttgttccaccgcatacttcttctgcaagataacgatataagttctctgtcagatccatcattccgtgatagtctgtgtatgcctgatataattccattaatgtaaactctgggttatgacgtgtgtcaacaccttcgttacggaatacacgtccgatctcgtaaactttctcaagtccaccaacgatcagtctctttaagtataactctagggaaatacgtaattttacatcttcacttaatgcattgtagtgtgtttcaaatggtcttgctgatgctccacctgcattggatactaacatcggagtttctacttccatgaatccctgtccatctagataagaacggatcttactgatgattttagaacgtttgatgaatacttctttggattcttcattcatgatcaggtcaacatatctctgacgatatcttgtatctgtatctgttaatccgtggaatttctctggaagtggttttaaactcttagataataaaatcacttcttctgcatggatagatttctctcctgtctttgtagcaaagactttacctttgatacctacgatatctccgatatccatcttcttgaaatcctgataagattctacaccgatctcatctcttgctacatatgcctgaattccaccctgaaggtcctgtacgttacagaaagatgctttacccatcacacgtttgaacattaaacgtcctgcaactgctacttcttttccttctaattcttcaaaattatctttgatttcttttgaatgatgtgttacatcatatttcatgatctcgaacggattcttcccagctgcctgtaagtcagccagtttctgtcttcttactttgatcagttcgtttgtatctttattctgctgtgccacttttcttacttcctcttactttctctgtacatcaatgactctgaagtcgtttacctgattgattccttctacggatacgacatctccgatcttctttccaagtaaagctctaccgatcggtgcttcattggaaatcttgttctgaaggatatctgcttctgtagaacctacgatatggtatgttacttcttttccaagagtgatgtcttctaataatacgtgacatccaaggctgatgacacctttttcaaacttctcatcgataacaacggcgttctttaagatcttttcgatctcttcgatacgtgcttccatatcacgctgttcatctttggctgcatcatattccgcgttctctgataagtcaccctgttctcttgcttctttgatcttctgtgcgatctctttacgtcttacgacttttaattcttgtaattcatcttctaatgcttttaaaccgtctggggttaatatattcttctttgcctctgccataacactattcctttcgttctaaatgttaactgattaattatatcttacctaagtttcttttgtcaattcctaatccctgccattcgtggctttgagataattttgcagtaattcttctaagtcttcgtatgtctctgtatgatttaccttctcgcgaagttttgctgcccctggaaaaccgaatgtataccatgcgacatgtttccgcatctcacggactccgatgtattctcctttaaaatcgatcatcatctgtccatgtctcaacatcatggcgacaacttcttctaaggatggtcttggcatttcttctcctgtctcaaagaaatgtaagatctctttgaagatccatggattccctttggctcttcttccgatcataaatccgtcacaacctgtctcttcctgcattcgtagtacatcttttgcacatgtgatatcaccatttccaattaccggaatatcaacagcttcttttaccttgcgaatgatcgaccagtctgctgttcctgaatagtactgttctcttgttcttccatgaactgcgatcgctgctgctccattctcctgtgcaacctgtgccatctctggtgcattgatcaattcatcgttaaatccctttcggatcttaactgtaactgggatatccacagcatctacaactgctttgatcactttccctgctaattccggattcttcatcaacgcggatccatcaccgttattcacgatctttggaaccggacatcccatgttgatatcgatcatctgaaaccgcccatcattgactttcgctgccatctgacccatgatctctggatcggatccaaaaatctggatcgctactggaatttccttcggatccgttgccatcaatggctcagatttacggttcccatagtataaccctttggcacttaccatctcagtgcacatcattccagcaccctgttctttacataacaaacgatatggtagatctgtaactcctgccatcggtgcaagtgctaacgggtgttcaattgtaatatctccaataaccagaggttttaatttattgcttctcataaatgatctgtaatcccttcaatgttaatgttggatcgtaatagtcgatctcatcaaccgtctgtgcgatcatatttccaaggcctccggttgcgataactttcatgttatcaaagcctgtctcttctttcatcttctgtaccatatattttgtctcaccaacaactccatagtacaaacctgcctgcatactgtcaatcgtgctgtttgcaagaatcgtctttggttttaagatttcaatctctggcagacgtgctgcatctctatatagtacatttgctgaagtgcgaattcccggtgcgatcacacctgctaagaatacgccattctctgtgacaatatcgtatgttgttgcagttccatagtcaatgacgagtgctggtccgccatatatttcatatcctgcaaccagatccacgatcctgtctgctccaacttctcttggattaaatcttccaagattgatccctgtcttgatcccaggtcctacaatgatcggttttacatcaaaatatttgatcaaaccactactcagtgaatgcatgatatttggcacaacggatcctatgatcgctgccttcacttcaccttcatccaatcctttttcctttaataggcttgaaatcagaattccaaattcatcggatgttcttggtaactttgttgtaattcgaaatacctctataatctcttttcttttgaatacgccgatcgttatattggtattcccaacatcgagtgctaataacataatttatacctcatcttctcccaaaaggaatattttataatatagttccaaggactcccagaaatcctgtttttcctgtcttagtttcttgatcatcagttcacttccgatctcatcgtaaaagaaatcattatcttccacatgagtaacaaaatttaatttgccttcttcatcgaactctaatgtcaagactccgccgacttctgctgtaaatagtacacatgcaatctgcagttcctgtttgatctgttctggtaatccagaaaaatcagggtttaagtaatatttcttctcatatgcattggaaccgcataatgtaactttatcctgatacatgtttttgtatttctccttgtttcttgtatatattctcggaatctcttatacgtatcccaagatacctcttactgatacctctccggatgaaacttctgatacctttccatcttcatcctctaccagtaattctccacgatgattgatgcctcttgataagaatatctcttctttggaacctctgacaaccttgatcttctggtctatatgtaccagaagtttattgtattcatcttgcaacatgctaagatcttctgtcttcaaaaacatatcgtaatatttctcaaaacattctaacactttcgctgccaatggagctctcttgatctttcttcctccctcgatctggagtgaagttgctttatcacttaaatcttctggaaaatgatcgatatttacattgataccaagtcccactacaatgtaattgatttcatccatctgaaggctcatctctgttaggattccacagatcttctttccattcacaatgatatcgtttggccatttgatctttgcccgaattcctgttgtctcacagattgcttcatttaccgctaatgcagtaactaacgtaagcatagaagaattctgagcttcgatctgaggttttagaagaaagctcatcgcgatccctgctccagcttctgccaaccagcttcgtcctcttcttccttttcccatcgtctgttcttctgtgatcgcaacggttccgtgaccggcacctgcctctgccagacggcggatctcaagatttgtagaatccattgtctcataacaatgaagatcttttccaagccatttggtatgaaggcaggatgctacttcttcttttgtcaaaagatctggttccatcataagtttatagcctttatttgtcacagaatcaatctcgtaaccttctgctcttaatgctttgatatgcttccagacagcagtccttgaaactcccaaccgctcacaaagctgctgtcctgatatataatcatctgcattctttaattccttgagaatcttacttttcattgaatatcctatctcctaatattctcctaaagtcgctaccataacagctttgatcgtgtgcatacgattttctgcttcatcaaaaatcacatctgcataatgttcaaaaacatcttctgtgatctcatgtcctttaactgctggcaggcaatgcataacaactgtagtatcttttcctgtcatctctaacatttctttatttacctgatatggtcttaataaagcaattctttctgctgccttgtcttcttcacccatagatgcccatacgtctgtgtaaatgcagtctgcaccttccacagcttctttcacatcttctgtaaaacggatcttagctccagattctttcgcatactcttcgcactgttttaccagttcttcatttggccataaactctttggtgctaagcatgtgaaattcaatcccatcttactgcatccgatcattaaagagttgctcatgttatttcttccgtctccagcgaatacgaagtttaatcctttgatctctccaaactgttctcttaatgttaagaagtccgctaagatctgtgttggatggtaatcatctgttaaaccattccatactggaactccactgtattttgctaatttctctacgttctcatgtaagaatccacgaaattcaatcccgtcaaacattcttccaagaactcttgctgtatcttctacagattctttgtgtcctaactgaatatcatcttttcctagatattctgggtgtgcaccctcatcaacacatccgatcgtaaatgaacatcttgttcttgtacttggtttttcaaataaaagagcgatatttttcccttttagactgtttcctgtgatcccttttttcttatctgcttttaatttcgctgctaaatctaaaaaataaccaatttcttctggtgtaaagtcttttaatgttaagaaacttcttccctttaagcttgtctttgcgtccatcttttgttcctccattttgttgtatcttggatgtctctgccctttgatccctggcagacatcatatagttgttattatataggaatgcatctttgaaaacaacccgaaacccttatatttcaaggatttccttgcattttttcgcaaccatttcacctaatttcctatgactttctcttgtcaggtggcaggcatcgatttcggaagcttttgcatattttgctgcatccagaaattcaatattatgaaactttgcccagtcttcataaatcggtgccaatctcttggaataactgatccctctttcaaatcccatctcttctccacttggaatctctgtcagatcatccccaagatgcggtggtgccattaaaaggatctttgcggatcgtccatcttgtctcttctgtggagtgatcgatttgatcatcttgatcagacggtcgatcccttttccgatatctgttggtgttgcctgaaaacggatcttaaggtcattcgttccaagcattaacactaccagatcgatcggtccgtggctgtgtaaacatggatctaaatatgttgcaccatttcttcctggtcttaactcatcttcaaaacttgttgttctgccgtttaatccttccggaatcacgatcgcagaatctttcagttccttttgcaaaatggttgtccatcgttcttcatattcataacggaatccattttccggattatagccataagtattagaatctccataacaaacgattgtcttcatcttttatctcccatcaatatcaaacatggtaaaagccggaacacctcttcagtgctccggcataccgccaagggttgtcatattttcataaacattttctgatcttactgttcttttacagtgtcttgtacctgctcttcgatcagatctgcaatattcttctcatcgtctttggcaacttctgtaattgattttacaagacctgccatcccctgaatctcagatgggataatgatctttgtagcttttccgtcagctgctttagcaaatgcttctaagctctttaactggatgactgcattgtcagctttggctgccttgattgattcaataccctgtgcattcgctttctggatcgcacggatcgcttctgcctgaccttctgcttcacgaatcgttgcttctttcttcgcttccgcacgaaggattgctgcttccttatctccctctgcctgaaggaccatagattctttctgtccttctgcacgtaagatcgcggacttcttctcaccttctgcgatcagaatcgcttctcttcgttcacgttctgctttcatctgtttctccatggcatcctgaatggctgctggtggaatgatgttcttaagttccacacggtttactttgattccccatggatctgtcgcaacgtcaagtgttgctctcatctgtgtattgatcgtctctctggaagttaatgtctcatctaattccagatcaccgatgacatttcgaagtgttgtagctgtcagattctcgattgccatgatcgggttctctacaccgtaactatataattttggatcagtaatctgaaaatatacaactgtatcgatctgcatcgtaacgttatcttttgtgataactggctgtggtgggaaatccacaacctgctcttttaagttgacttttcttgcaacacgatcaataaatgggactttgacatgaagtcctacagaccatgttccctgataagcacccagtcgttctacaacataagcatgtgcctgcggcacgatacgcactgtggatgaaatgatcatcgcaagcaatgcgataacaataataaataaaataatcgacataatcatcttatacctctctttctacgatcagtttcacgcctcggatttcttttacgatcacttcgctgccttctggaatgatctctccagcctcaaagcttctcgcagtccaatcctggccatttaactgaaccaaccctttgctttccatgttattgatcgtttctttgacaagtgctgtctgtccgatcaatgcatcggtattcgttttttgcaccttgctgtttaaatatcgtttggcaactggtcttgtcagtgcaaacaacagacatgttaccacgataaatatcaacatctgtacccaaaatggaacaccaaatagtgctacgatcgctgcaacaacggctccacctgcaaaccagatacttgtaagtccaagtgtcatgatctcaacaagtaaaaataccgcggatgcgatcagccaataaactgcatacatttaatccaccccctgtctctggcgtcttgcctcataaactaaaaggcctgatgccatggctgcatttaatgattctaccttaccacacattggaatcttgatcttcttttgtactttgtctgtcaacttatctgtcagaccatttccctcattgccaatgaaaaatgcggttcctttttgataatcttccttcgtatagtctgttccattgagatgtgctgcatacgtgatgatattcttttgtttcatcgtttctgcaacttctaaaagatcatcgacatagacaaatggcacacgaaatattgatcccatcgtggagcgcgtaacctttggattataaatatctactgtatcatgactcatgataacaccattgatccctgcaccctctcctgttcgaaggatcgtcccgagattccccggatcctgaagattctcaagcaccagaaataatggtttttcctgttctagaagatcttctaaagaatatttcatcatcttcaccagtgcaagaactccctgtggtgtcatcgtatcggaaatctctttcataacttgaggtgataccaattccacatccatatgttcaaaaatcactctatgttcgttataaaaatcttcagatgcatagactttatataaatattcttctgggatctctgtaaacatacgaattccctctacaagaaataattcttgttttcttctttctcttgcactcttctttaatttgatgatctgtttgatctgcttattctgagtggttgtgatcatattcttatccacctccgatctattattttcttaatttgaccagatcttctttcttaccgatcagcacaagattttcctcatctttgatcggtttcgttggatctggagccccgtcaacaccaccttctccttcgatcgcgatgacgttaacgttatattttccacggaaattaatgtctactaatgatttgttgatccattcttttcttgctggtactttaacgatacttgtgtctgcagaaagatcaaacagatctgtcatacttcctccaagcagattgtttgcgatccttgctcccatctcttcttctggataaacaatctcatcgactccaacacgttttaatatctctccttttaaagttccgtctgccttcgcaagaacatatggcacaccgatctctttgacgatcatcaatgccataacactggaatctaaatgctctgccgttgcgatcacaactgcatccattccttccaatccgatgttgttcatcatttctttatcagatatatccacacagactgcacaagttactttatctgcgatatctcttacaagatcctcatctttatcaactgccagtacttctgctccacctttagcaagtgaccttgcgatgctgcttccaaactttccgagtcctaaaactgcaactgacttcttcattcttctccgttacctccgttgcgatatcatgttataatgtgaatctatttcacttataagatcagatcctgttccggatacatgaccatctttttcttattcttctgtgaaaaaccgatcgccatagaaatcggtccgacacgccctaagtacatggtaatgatgataatcactttccctgcgattgtcaaattcggtgtcaatcctttggttaaaccaactgtcgcgagtgctgatacacattcatagcatgaatccataaaagtcccgtgatcaaataccaacaacaataacacagatgtcatcagcacgatcaggttgatcacaatgatcgcaagtgccttcgacaacagattctgtggaactcttcgtttaaataacgtaattgattcttcttgttttgccacagagagcacacaaaatacaagaattgtgaatgtcactgtcttgacaccgcctgcagtaccagttggtgatcctccgatgatcatcaaaaacatagaaaccagcgaagatgcatccgtcaatgcggcctgtgctaccgtctcaaaccctgcggtacgtgtcgtcacagactgaaacagtgatgcctgtatcttctgtggcaatgacagactctccatagttgctggattatgatattcaaacagaaagatcaatattgtaccaaacaagatcaaaaatgacgtaatggataacacgatcttggtctgaaatctccattgttgtatcatcctttttacaggaactttatcttttacgatctttttgaatccctgccaaagatctttccatacaacaaatccaagacctcccaggatgatcagccccattgtcgtaaaattcataactggattcgttacatagcttcgcagactgtcgtctcttacaatatccattcctgcattacaaaatgccgagattgaattaaagattgctgcccatactccatatccaatgccaaattccggcacatactgagtcgcataaagaactgctccaattccttctatgatccctgtcccgatcagaatcttcttaactaatggaactaaacctgtcattgtattaagacccatagactcctggatcaacattctatttccaagagtgatcctctttcgaagcataaaaaacattccggttgtgattgtaatgacaccaagtcctccaatctgtacaagcaatatgatcactgcctgcccaaatatactccaatgtgtcattgttgtctcaacgatcaaacctgtcacacacacagatgttgttgctgtaaataatgcatcaatataaggcgttgcctgcccgctttgtgttgcgatcggcagtgcaagcagtatcgatcctgcaaatattgtaattaaaaatccaagcaatatgacctgtaccggtcgtaactctttcataaaataatgctcctatatagagaaatagaggaatcctagataaacaggattcctctaagatcatgttttatttattttcctaataaatgtgcgatctgaagctgatattcatcgatatcttttgtcattgcgagtccttcgtcaatgtccatatccatgaatcttccgttctggtatccaacaacacggtttgtctttcctgcacataataagtcaactgcgtaagcacccatcatagaagcgtatacacggtcttttgctgttgggcttccaccacgctgcatatgtccaaggatcgtagcacgtgtttcaatacctgttgcagattcgattctcttcgccatactgtaagaatgtccaacaccttcggcattgattaccatatgatgtgtcttaccttttgctctgttacgaagtaaatgttcgatgatctgctgttctaccttaggaaggtttccatcaaagctttctgggatcaggatatcttctgctcctgttgccataccacaccataatgcgatatatccagctccacgtcccataacctctacgatactacatctttcatgagatgttgatgtatcacggatcttgtcgatcgcttccatcgctgtgttaacagctgtatcgaatccgatcgtatattctgtacatgcgatatctaagtcgatcgttcctggaacagcgatcgtgttgattccaagcgctgctaacttcttagctccctggaaagaaccgtctccaccaataactaccaatccgtcgattccatgtgctttacagatctcagcaccacgtttctgaccttcttctgtcttaaattcttcacatctggctgtgaaaaggattgtacctccacggaagatcgtatcggctgtttctgttggtgttaaatcgatgatgtcttcgtttaacagtccattgtaacctttacggattcccttaacttttaatcctctttctttaccaattctggctacggcacgcactgctgcgttcatagcaggtgcatctccaccacttgttaaaactccaattgttttaatgtttggttttcccatttgcaatatcctccaattattaatccatacaattcttaacttggcttttattctaatccatttaaagaaatttttcaatagtctttgttatattcctaacgatctaacccgaatattttcttttccatatcgtttttcgagatcaaataataaattctcgtcaccagaaaccatataatctctccctagacggttcacagcacgttctgttttgcaatagatcaccactggatttttaccgggataggaagttaaaataccttttaatgcatcctcttctttaaaaaatgcttctttatccgcaaattgtacccataattcctgtctgctatcctcaaaactgatgatctgattacatatgactttgctttcttcttcagaaatctgtgttgttcctttgataaatactttggcatcttctcttaaaagagactgatatgtcgcatactgtcttggaaatacgacaacttccacggttcctcttaagtcttccagtgtgataaatgccatattctgattcttcttcgtaagtttcacactcatctcactgatcaaaccgccaatgatacagctttcccgatcgtgaatctttgtctttcctgtttcttcatcgatcacaaaatcagaagtatgtgctgttacacttcgttcaaggcgttctatatcatcctctaaaggatgtccactgacgtagatcccaagcacttccttttccatggcaagtttctgctctttctcatattccccaacatctggataggaaatctgaaaagactgctggtcttcttctccaagaagatccatcagactcatctgtcctgcgatctcatttttccgttctttctggatactatcgatcacactggcgtagacgatcatctgctgctttcttgttacatgaaaacaatctaaagctcccgatttgatcagattttctacagttcgtttattgatctctttgcttgataatcgttccacgagatctttaaaatctctgtatggtccatttaaatttcgttctcttatgatcgcttcaatgactggccgtcccagactcttgatcgcagtcagtccatagcggatatttccatggtctacagagaacgcaccctctccatagttaatatctggtggcaaaatcttaattcctaatttcttgcaggcataactgtattctgaaatcttgtttgtatttccaagaacagaggttaacaaggctgccataaattctactggataatggcatcttaaataggctgtacgataggcaactactgcatatgctgccgcatgagatttgttaaatgcatattttgcaaagtctaacatctcatcccagatctggttcgctgtcttttcatcaataccgttattgatacatcctggaattccttcttcttcatttccataaacgaaattctgtcgttctttgatcatgacatcgccttttttcttggacatcgcacgacgtacaaggtcacttcgtccaagtgtatatccggctagtttcataacgatctgcataacctgttcctgataaacgatacatccataggttggctccagaatctcttccatctgttcacattcataatgtatactttcctgatgattctttccctcaatgtatcgtggaataaagtccattggtcccggtcgatacaaagaaattccagcaatgatatcttccatattctgtggttttagttctttcataaatgacttcattcctgaactttccaactgaaacacaccttctgtatgaccatttccgatcatctcataaacttctttgtctgtcggatcaattttcgtgatatcaaaatccggcacttttcttcgcaccattttctctgcatcctgaatgactgttaatgtacgaagtcccaaaaagtccatcttcaacagaccaagttcttcaatcgttgtcatcgtaaactgagtaacagctgcgttatctgcacctgttgctaatggcacatattcatcaatcgctgtcttaccgatcacgactccagctgcatgcatggaagcatgtcttggaagtccttctagtctcttcgacatatcgatcagataatgtgtttcttcgtcctgctcataagcatttctcaagtccttgctgatctttaatgctttatcgatcgtaatatttaattcatttggaaccatctttgatattccatctacttttgcatatggaatatccaaaactcttccgacatcacggatcacggctcttgcagccatagttccaaaagtgatgatctgtactacttgatctttcccgtattttcttacaacataatcaatgacttcctgtcttctctcataacagaaatccacgtcgatatcgggcatggatacacgttctggatttaagaaacgttcaaacagcagttgataccggatcggatcgatatctgtgatctccaaacagtaagaaacgatacttccggctgcggaaccacgaccaggtcccactgcgatcccatgttcttttgcataatgaatgaaatcccatacgatcagaaaataatcaacatatcccatattttcaatagttttcaattcataatccagccgctctcttaattcttttgtaatattcggataacgacgttttaagccttcttcgcataaatggttcagatacgtaactgcagtgtatccttctggcacatcgtattctggcactttctgttctccaaatacgatttcaacattacaacgtttggcaatcttgcctgtattctcgatcgcttctcttgcatatggaaacaatctctgcatttcttccggagattttaaataatactgacctccttcataacgcatacggtcttcatcctgtactttcttccccgtctggatacaaagcaggatatcatgtgcctcggcatcttctttaaatgtataatgaatatcatttgtagcaaccagatcaattcctgtctcttttgacatcttaagcagtgccgtgtttacttttgtctgatctggaattccgtgatcttgcaattccaggaagaaattgtcttttccaaaaagatcctgtaatctcaatgccgtattctttgctttttcgtagttattttcacggatataagttgcaacttccccagcaagacatgcacttaatgcgatcagaccttccttgtattcttccagaacttcataatctactcgtggcttgtaataaaatccttcagtaaaccccctggaaacgatcttcatcaagttatggtaacccgtgtcattttgggcaagaagtaccaggtgatagtattttttatctccctgactggcttctttatcgaatctcgaaccagttgttacataaatctcgcatccaatgatcggtttaatcccttctgctttcgctgccctgtaaaaatcgatcactccgtacatcgctccatgatcggtgatcgcaatgctgtccatgccaagctcttttgcctgatgaactagctccttgatcttactggaaccatccagcagactgtattctgtatggacatgtaaatgtgtaaaactcatgaaccctcttttctaatatgttttttgtattttctggctatcattttatcatacaacttcattttatgctataatctgtagataacagcataaattttttaaaccgttatcatcaatcacacctatgctgaaatctaacagtgaaagaaacgaggttttctatggagaatataacaattcaagacattttagaagcaacagacggaacacttttatgtggtgatccttccatgaagattgaccacttaagtacgaattctatggagattggtcctaacactttatttgtaccgatcatcggagaacgtgttgatgcccatatttttattcctaatgcattaaaagaaggcggtgcctgcttaacacaagaacatacagaagcttcaggaaatgctccatacatcaaagttcctgatactttgacagccatgcagcagattgctgcctattacagaaataaaatgtctcttccgatcatcggcgttactggaagtgttggtaaaacaacaacccgcgagatgatcgcacatgttttaaagggcaaatacaaagtatttgaaacgattggcaatcaaaacagtcaggttggtgttccattaacattagatcatctgacatccgaagatgagatcggtgttcttgagatgggaatgagtgaaaagggacagatcacaactcttggtaatatcatccatccaaacgttggtgttgtcacaaatgttggtgtttcacacattgagatgatgggttcccgagacaatatctgtatcgaaaaattagatatccagaatggtctgcctgaagatggtgtcctattcttaaatggagataatgatatgatccgtaaacatatcgattatgtcaaaaaaccatatgaattttacggtttcgcagatgattgtacttaccgtgcagaaaaaatccgtgaaaaaggtggacagactttatttgaattccactatggtgatatgaaagaacctatcactttaaatgtacttggaaagcataatgtatccaatgcattagccgccattgcgatcggactccgctatgatgttccaatgagtgcaatcaaggcacagttatccacattttctggtcagcgacagaatattatccacgttaacgactatattctgatcgatgatgcgtataatgcaagccccgattccatgaaagcaagtttaagtattttatctgaatttaagacacgtggaagaaagatcgctgtcttatctgacatgttagaacttggaccagattcaccggaataccacaaagaagtgggacattttatcgctacaacaaaagtgacagatctctttatcactggtgaactttccagacattatattgaggaagcatggaaggaaaatccttctcttcatacccgtgcattttcttctaacggagaactgatcgctttccttgaaacttacttaaagaagaacgatgtcgtactgatcaaaggctctaacggtatgaatcttaaggaagtaagcaaagccttaatggcttgattgtatcaaaaatagaacattatttcctcttgacattctttttttacaggactattatgaatgcaacgaaatacagaatgcaatgagcaggacacattgatatttgaattctttttcagagagttgccggttgctgtgaggcaataaagaacttatgtccatatcccctgcgagcagtcaactgaacatgatgattcattagtaagtgcgaccggaatccttccgttatcaaggagcacattaaatgatgtgactaagggattacgatttgagtaataaaaagaagtggtaccgcggagaatattcgtcttctgaaatgctgagcaggcatttcaggagattttttttactcatttttattgtatcctgtgttttgaatacattttattttatgatagagtttattttaagaggagtgattaagaatgaatagcttaacaatcgtagcaatcgcaatcgtcgtattagttgctggttatgccctttacggacgctggttagctaagacatggggaatcgatcctaaagcgaaaaccccagcttacacacacgaagatggtgaagattacatcccgacaccaaaagccgttgtattttcccatcaattttcatccatcgcaggtgcaggtcctgttaccggaccgatcatcgccgcaatgtttggatggctgccagttcttctctggctgttgatcggtggtatcttcttcggagccgttcaggattttacagctctttacgcttctgtaaagaacgaaggaaaatccatgggtgtcctgatcgagaaatacattggtaaaacaggaagaaaattatttcttctgttctcctggttatttactttacttgtaatcgcagctttcacagatatggttgccggaacctttaacggatttacagtaactggtgctaaaagttcaccaaacgctgccgctgcttctatctctatgttatttatcttaggagctgttgttttcggattattcacaaaatatgtaaaaccaaaccagaaagtagaatttgttgcaggacttgtattactgatcgttatgttagccgttggtattgccttcccattatattttacaaaaaatacttggatcgcagtcgttatggtttacttattccttgcatctgttatgccaatgtggctaatgatgcagcctcgtgactatttaagtaccttcttattagtcggaatgatcatcggtgctgttcttggtgtatttgttgcccatccagcaatgaacttaccagcattcagcggatttaatgttggtggaaaaagcttattccctacattatttatcacgatcgcctgtggtgctgtttcaggattccacagtttggtatcttccggaacatcatctaaaacagtcagcaatgaaaaagacatgctttgtgttggatatggatctatgatggtagaatctttattaggtgttatcgccttagttgttgtcggtgcagcagctgtcggtggtaaaatgcctgaaggaacaccattccagatcttctcaggaaatgtagctggattcttaacactacttggaatccctaaacatgtagctacttgctttatgacaatgtgtgtttctgcacttgcattaacatcccttgactctgtagcaagaatcggacgtatgtcattccaggaattattcatgggagaagctgctgatggctctgatcttacaggggtaagaaaattatttacaaacaaatatttctcaactgttatcacattattcttcggattcttattatgcttaggtggatacaacaacatctggccattattcggagcagcaaaccagttattagcatctttggtattgatcgcattatctgtcttcttattaacaacaggaagaaaaggatggatgttatacgcacctatgtgcatcatgttagttgtaacatttacagcccttgtacaggccgtgatcggaatctttacaaagatctttgtaacaggtggattcgtatttatgatcgatggattacagttgatcgtcgctttacttctgatggcacttggacttatggttgcagtttcctgctttaagaaactgttccagaaaagccatgaaggagcagataatagatctacacatgcaactgtgtaaattttaattgtatgacggaaatgtattaagtattcataaaaatataaagaaagatagaggtacgaaaaacgaatttcattaacggattttttgcaaaacgctgatccgccaacactcctgcacaactcactacgttcaaacagtgcccgtgctggctgcgattttgcaaaaaatcctatgaaattctatcatttcgtacctctatctttctttatatttttatgaatacctgaagacattctcgtataaaattaagaatttccaaacagaaaggtgtgtatgttgaacattattggttttcgatttttgtagtggcagacagatatttattataaataccaataacgtaaaacatacagaccaccttaagttttccaatcttgtaattgtccacactttagacttcaggtatatgataaaaaataaataagcaaccgaaaacgcagcattggaattttgccatattttgaacaaattcgcagcccaattggacgagtgtctgagcttcaaagacttttgtctaaaacaaaacttcagagcgagttctcgtaggaaattgggcggataagcgatttgttcaaaatgtgagcaaaattccaccgctgcgttttcggttgcttatttattttttatcatatactcgaaatctacagttggccaacttacaaattaaaacttctctatgtacccctgcacaaggataaacaaaacgatcaatggtaatatataagtaatgtaaatacgtggccattttgggaatttgattccttttccttcgttggcttctttcataaagttgtcccatccccatccgtattttgtaacgcagaataacagatagatcagagatcctattggaaggatattgttgcttacgatgaagtcctctaaatcctgaatcgttgttcctgctcctagtggctgaataaaactccatacgttaaatcctaaagcacatggcaaggataacacaataatgagtactgcattaaatacgattgctttcttaaggctccatccccataggtcttgtgcaaatgacaagatgttctgaaatactgcaatgatcgttgatagtgccgcaaagctcataaataagaagaacatcgctccccagatcctgcttcctggcatttcgttaaatacatttggcagtgtgataaatactaagtttggtccgcttcctggatttactccgaatgcaaaacatgctggaaagatcaccagtcctgccattaatgctactaacgtatcaagaattgccacactgattgcttctcctgtcagtcttcggctcttgtcaatgtaacttccaaagattgcgatcgcccctattccaagacttagtgtaaagaatgcctgtcccattgctgcggatacgaccgtcatcacaccttgtttcttcactgctgcaaaatctgggatcagataaaattttaatcctgcagaggctccatctaaagttacactccttgcgatcaataccagaattacgataaacaaacatgacatcataactgttgtgatcttctctactccattttgaagaccaagagaacatactaaaaatcccaatgcaataactactaacatccagaagatctgtgcctttggatctgacagcattgttccaaaagtattttctacctgtgctggatttttcccaacaaagtctccttttaacatcttaaagaaatagctgatcatccatcctgctactgtcgtgtaaaacatcatcaatagataatttccagccataccaacataactgtaccaatgccattttgttcctttcggttctaacacctgaaaggatcttgcaatactcttctgactggctcttccgactgcatattccataacaaggatcggcagccctagaatgatcaggaagaacagatagatcaatacaaatgcagctccaccgtattgtcctgtgataaatggaaatctccacacatttcccaagccgatcgcacaaccagccgagatcaaaagaaatccaattctagatgaaaatttttctctattttccaaattactttcctcttttctatatattttgactcacaaaaacttattgtaccatagcttagcaatattagaaacccaaaaaacaatttcacaaaagacttcctattaaatttggttttattacacaaaacgctgaatcttcgaatttttcttgacttggattgtatattgtatttataatgtacccaatttaagaaaatgaagattaatacttacaattacacgaaaggaaccaagaatatatatgataaaaaatatcatgggtgctgccgtcgctgttgctctcgcagttggtatcggtacaaccggagtaatatcaaacacaacttataaaaagccaacacagatcatagcagctgccaaaacaacaactttaactgattatcattccaatacagaattcacaaaatcctctgatgtgaagaagatcatttccacttatggtttaaaagattctgataagacaaacaagatcgtatacattccagtcaataattattctgtgaacgatgcagatggtcagaataatgaagtttccgttgatacaagactttcaagctattctgtaaaaaaagaaggatacaaagatcaggtttcttatgtaagatcaatcactgctgatacttctttaactcagtcgatcaaagaatctgtagcaacaacttatgatttctcaaatattgcatctgtatctggaaaaaatacggcattagaatcatgtttaacatctgcatatggtttttctgtttcaagcagatcaaatattaatgaaacttttaaactttcctcaaaaaacggtactgatttaaatatctatgttttgaatcgtacttatgactatcagctttgggaaactgatctgtctcatgatatttcttctgacagctatcttggtaatggaaccataaaacgtccagttggtctcatcattactgttagcaaaaattcataaaatgagttaatacttagtcccatttcagattgcatttacagcgttttttttgtataattattctatgatattagtgcgtgcagatacccatttgtatctgcatttccttatatctttcattttatatttatatggacttaaggaggatttatttatggtaacatggaacaatcttgatactttaacatcttatgctaaactcaaagatcttaaagatcatgtagacatcaaagaagctatggcaggtgaaaacggtgcgaaacgtgtcgctgaatattctgcacctatggcttctggtttaagctttaactacgctgcaaaacaggtagatgatgaagttcttgatgtattagctgaattagctgatgaacatcagttagttgacaaattcgaagaattatacaacggagcgatcatcaacacaggagaacagagacttgttcttcatcatttagcccgcagacagcttggaaaagacgttatcgttgatggtgtcaacaaacgtgatttctacgttgaacagcagaaaaaagcagctgactttgcaaacaaagtacatgctggtgagatcacaaatgaagctggtgaaacattcactacagttgttcagatcggtatcggtggtagtgatctaggacctcgtgctttatatatcgctcttgaaaactgggctaagacaaacggatgcgctaaaatggaagcaaaattcatcagtaacgtagaccctgatgatgcagctgctgttttaaattctatcgatgtttcccgttctttatttatcgttgtatctaaatctggaacaacattagagacattaacaaatgaagctttcgttaaagatgctttagtaaaagctggattaaatccttctaaacatatgttaactgcaacaagtgagacttctcctttagctaagagtgatgattatcttgctgcattcttcatggatgactttatcggtggacgttattcttctgtatcttctgtaggtggagtgatcctttcacttgcatttggaccagacgtctttgcaagaatccttgatggtatggctgaagaagacaagcttgctactaacaaagacatcaaagcaaaccctgacttattagatgccctgatcggtgtttatgaaagaaatgtacagggatatcctgaaacagctgttttaccatattctcaggcattaagccgtttcccagcacatttacagcagtgtgacatggaatctaatggtaaatctgtaaaccgttttggtgaacctgtagattatgtaacaggacctatcatctttggagaacctggtacaaatggacagcattctttctatcagttattacatcagggaactgacatcgttcctttacagttcgttggattcaaagacagccagcttgctacagatgttgtgatcgaaggaagcacaagccagaagaagttatgtgctaacgttgcagctcagatcgttgctttcgcatgtggtaaagatgatgaaaacaacaacaagaaattcgaaggtggacgtccatcaagtatcatcatcggagatcagttaacacctgaatcacttggatccctgttagctcatttcgagaacaagatcatgttccagggattcatctggaatgtaaacagctttgaccaggaaggtgttcagcttggtaaagtacttgcaaaacgtgtacttgcacatgaaactgaaggagcactgaaagcttatagtgatttatttgagatttagtttcctggatcagtagatactatttactgtatcgacacttgtaagctaaaatagaatattaaaaaccacagtatgcatttttcattgatttttgcattactgtggtttttttatgttataatgagaccgtatagaatatatatgaagaaaggggaatataaattgaaaaaacaaatttttaggaatctatgcagatttttggtatttattttaatgtttagctgtttttttgtctttggtaagaaggtttctgccaatgaaaatcaaaatgctgcaccaattattacttattatagattaaatggtaatgatataaccatacaatggaaggcacctgatggagtttcttattctaaagtagatatttattcagcgacttccccaaacggttcttatcgctatgaaaataccgtatctggcaattcctatacaaacacctatgttgcaaaaggtgttccttattattacaaattagaagcttcttatgaagataatgagggatataaaactgtaaccacttatgcaggcaaatgtattattaatccattgccagctccttcttctttggaagccagcactggaaattcacatagtattactgttaaatggaaagcatctgatgattgtgatggttatcaaatttatcgaagtgtttctcctgatagaaattatgagttagtccaaactgtatctaatgaaagtagaagttcttggtggtacgatgatgatgacgaatctttccaaacatatacgcaaaaaaatcttgaactagggaaaatatattattacaagatccgtccatacactacatatattgatgaaacattttatggggatttttctaattatatttcttgtcaggttacgatcaatggtacaaaagtaaaaaatgcttcttccaagaaaaaaaagatcaatacgatcacatgggcaaaaaatgatgaggctgatgggtatatcgtatattattccaaaaaggaagatggaaattacacaaaattaaagactttcacaagtcgaaacaacttatcttatactcatacgaaattaacaaacggtactgcttattactacaaaattcaggcatataagaactttaatggcggtaaactgtatggtccaatgacaccttatctaaaatactgtgattactattcttatacagacgaatcttatgaaagtcgctgccgccgtgcttttgggaagtcttattatgctgactataagagtgctaagcaggcaaagaaacatatgaaaacgatcacagtaaaagtatgggataaaaaaggtaagaaaaaatatacaagaaaattccgtatcactgtaaacaaagggcttgcaccttctatcaaagaaatgtttaaggaaatctacaagagcaaagaacgtttccctatccatgagatcgggtgctacagctggcgtggtaagaattccagttctgaacattgtgagggattagcttttgatattaactccaatgaaaactatatgattcagggtaaaaaggtattggctggttctttctggaaacctaagaagaatcgttattcaattcctttgaactgtaaattggttaaaatcctcgagaaatatggttttcatcgtggattgtggggatcccgcagagattatatgcatttttcttattttggtggttaatacaaatcaaacaaaggatcaggcatttgcctgatcctttgttatgtaagccgaaaaccggacttgaaccggcgaccccttcattacgagtgaagtgctctaccaactgagctatttcggcatatatgaaagcacagatatgtgtatctatgctccttttgtaagataatattcaatcttgctgattgcttcttcttcatcgacaccgtcagctacgactgttaaatcctctaaacgatctaagtctaatccaagactcatcattcccatcatactctttacattgacttgcttattccctgtctcgaataaaatcttgctctcaaactggctcgccatctgtacaagaaaagctattggtctgtcttcttctcttaaggctacttccactttgacgttctttgaaatcattcctgtcctcccaatcttatctcttccgcaattcggccgatcttctttaaccggtggttcacaccagacttgcctactggcggttctagcatatctccaagttctttcagtgtagcttccgggtgttccagacgtaatcttgcaatatcctgcaacccttgatctaaaaaacggaggcctttgtgcttatcaatatattcaatgtcttccacctgcttgactgcggctgaaaccgtcttattaatattcgctgtctcgcaattgacacgacggtttactttattacgcatatctttcaggattcttacattctccagctccatcaatgcgacgtgtgcttccataatattcaacacatctacaatctttgatccttctttcatgtataccacgtagtactttttacgcaagacaattttagcatctaaatcaaaaaaattcaagacctcttttaattgttctgctgtctgtacattagtagatacaacttcaaaatgataattcttctctggatcactcatggaaccagctgcctgaaaagcccctcgaatatatgcccgcttacaacatgtgttctgtaaaacaagtccaaattctttggaatctaaaagtttcactgctttcaatattaaaacacaatccttatgcttgtcaacacttatcgtataatttcgacttctttttaaaaattcgtttcgtccaacatcaatcttcgcatgaatatcaaacacatctttgataagtgtataaaaacgtttcgcggcagataccgtctccgtctggatctgaatctcataatgttctggctccagactgatattccctccaaaacgtaagaatcctgcgatctccgcaatcttacagtgtctggcaccggtttcatttcttgataattcctctttaatattacttgaaaatgacattgcctacctcataatatctctatgctctactttgacagaatatggcagttgttttaatctctctgccaatttattggtgatcgtaacagatcgatgctttcctccagtacatccgattccgatcacaagattatacttgccttctttaatataatttgggatcaagaatctcatcatatcatctaacttatcaagaaattccacagattcttcatgcttcatcacaaaatcctgaattggtttgtcatttccagttaatggtcgcagattcagatcatagtatggatttggaagaaatctgacatcaaataccagatctacatccgcaggaatcccatgtttaaatccaaaagaaacaactgcaatctggaatcgttccccttcttctccgtctacaaaaatacgatcgatctcttcttttaactcccttgtcagaagctggctagtatcgatcacatacgttgcctgatcttgcagaaatttcatgatctcccgctcttttgcaattccatcctcaactcttccatctcttgacagaggatgatttcttcttgtctctttatagcgttttaataaaatacgattacttgcattcagatagagaatctcatacttgatccccgctgcctcgatttcttttaatttgtgtgctaactcgccaattcctcttccattacggatatcaatcccaagagcaacattttcaatcttggcagtttcatctaacaacatgtctgcaaatttatcaagtaaagccactggaagattatcaacacaaaaatatccagcatcttctaatgtctttaatgcactgctttttcctgctcctgacattcctgttacaattacaaatctcatctgtactgctcctttttagaaccttccaacacgtttgacttctggctccatcgtaactccaaactgttcttttactttatctttcacgtcactgatcaactgcataacatcggatgctgtagcatttccacggttgatcacaaaaccactgtgtttttcagatacctgtgcatctcccacctgatatccctttaatcctgcatcctgaatcaattttccggcaaaatatccttctggacgtttaaatgtacttccggcacttggatattctaatggctgttttgtttttctcgccaatgcgtactcatccattttggctttgatttcttctttatttcctttcttaagtgcgatcacaccttctaagacaacgtattcattctttaaaacgttacttgtacggtaaccaagctctaattcttctgctttcagagttttgatctctccttcttttgtaagaactgtcacttcttttagtacctgcaccatctcaccaccgtatgcaccagcattcataacgacagctccgccaaatgttccaggaattccacctgcaaactcaaatccagttaattcttcattgagtgctgctctggatgtagaacttaataaagttcctgctttgacgataagttcattaccacggacttcgattccactgtagtttttgtaaatctgaagaacaattccgtccattccatcatctgcgaccaaaagattactcccatttcctaaaacaaataatggaattccctcttcttttgcaaaacgactgaccgctttgatctcttccatattctctggtgccacaaaaatatcagcgggtcccccaatacggaatgttgtatgatttttcatcggttcctgtcttaaaatatatttttctggtatgatctgttttaactgatcaatctttgtatccataatttctccattcttaatattaatgtaagatggaatcctgtatatcacaggattccaaatctcttcatcttatgaaagcatcagactagctgcaccataaattccagcatcatttccaagagtcgcaagtacaaatcctgtctcctgtgcttttccaaatgtatacttcttaaaatgtgcattgaccgcatctaaaaggatctgtccggctcttgatacgcctccgccgataacaaacacttctgggtcaaccatcaatgcgatattccctgctgcaagtgctaatttctgtccaagatcatctacccgttctttggcaaatgtatctccttctttagcagcatcaaaaatgtcttttgcagttacttcatcaaggtctcttagtgtagtcgcttctttataatcctttaatgctttctttgtctcatatacaattcccgttgcagatgcataaagttccagacatcctgtctttccacaattacatacacgatcatcaaaaggatccacagtcatatgaccgatctctccaccatatccacggcttccatcaatgatctttccatcaacgatgataccacctccgactcctgttccaagagtgatcatcaccgcgctgttataatctgctgctgctcccatccagatctctcctaaggctgctgcattggcatcatttgttgcctttaccttacaccctgtaagctttgacaattctcctgccacatccacgcttccccatccaaggttcacacattcattaacttttgaaaactcaagaacagctcctggaactccaactccgagtccgatcacatcttccttatcaaaaccatttgctttgctgtgatcattcactgcctgtgcaatatctggcaggatgttctttccattctcctcagttcttgtcttaatctcccatttctcttttaatgttccatcttctccaaacagacccatttttactgttgttccaccaatatcaattccatataaatatttcatatcatttaatcctccatctgacctgtaacacgtttataaagttcttcggctgcattatatcccatcttcttctgtctatgattgatcgctgctgcttctacgatgatcgccaagttacgccctggacgaattggcagtgtatgtgctgcaactttattgccaagatattctacgtatttctcttctaatcctaagcggtcataatccgcatctttgttccagtcttccaactgaatgaccagattgatctcctgctccatcttaacgctttcaacaccatacagattcttaacgtcaataataccgattcctcgcagttcgataaagaaccttgtaacttccggagatgttccgatcaatgacttcttgctgaccctcttgatctctacaacgtcatcagataccagacggtgtcctcttcggatcaactctaaagctgcttcactcttaccgattccactctctcctgtgatcaggattccttcaccaaatacatcgaccaaaactccatggatcgtgatgcttggagccaatacagttcccagccatcggatcacttctgccataaattcagatgtcgtatcctgagatatcaaaaccggtaccccatactctttcgcaacttttatcatcatctcacttggatgcagattcctgcaaaatacgataactggaattcccgctccgataaatctcttataaatatttttcgcattttcaacatctttttctacctcttcaataaaaaggtgttctgcttttccgatgatctgaactcgattctgtgcaaaattttcaaaaaaacctgccaactgtaatgctggacggttgatctctgcctgttcaatgtaaacttcttttgaattgatctctggtgttacttcttttaaatttaattccttgaccatatcatatactgatactctatgctctttatccataatctttctctctttctgcacccttgattgtctgtctctttctctattttaacatatttccttactgcttggaatcgtgaaaaaacccataaatagactctgcagtactttgattcatgccgggaacatttaaaagttccgtaactgttgctgtcttgatctgtccaagatctttaaaatacttcattaattcttttcgtctctttggtccaacacctttgatgtcatcaagaacagaatgtacttgcccttttgcacgcaatgatctgtgatattcgatcgcaaaacgatgggcttcatcctgtatccttgtcacaagtaaaaatgcttcgctgtttggcgcaaatatgatttcctcgttgttataatacaagcctctcgttctatgatcatcatctttgaccattccacatactggaatatcaagtcccaaatgatccagcacacgaagtgcaacattgacctgtccttttcctccatccatcatcagaatatccggaaattttgtaaaactgccaagtgtagtgtcttttccttgttctttcagttcttctagctctttctttccatgaagaaatcttctggtcaaaacttcttccatactggcatagtcatccggaccttcaatggttcttaaacgaaacttacgataatctcttcttcttgcttttcctctttcaaatacgaccatggatgctacggtctgaaatccactgatattagaaatatcaaatgcctccattcgattcaagccttccatcccgagcaattcttcaatctcatgaactgccccgatcgtccttctttcttcccgtttgatcttttcacgatccattcttaatacattctgggcattttcctttgccatctctaccatcttgtgtttttgcccacgcactggtatcttaaaatgtacttttgctcctcgtttctttgacaaccattcttcaatgatctccttttctgaaatatcctgttccagaaagatttcccctggaagataaggtgtccccgcataaaactgtttgacaaaagctcctaaaacttcttccttggaactttcctcatctgcttccatatgaaaatgttctcttccaagaagctttccttggcggataaagaaaatagatacaacaacatccttatcatcctgtgccattgcaataatgtcacggtcctcaaacgcatacgtattgatcttctgacggtccatgatccgctcaatactcttgagcaaatctctgtattccattgcctgttcaaattccaattcatccgatgctttttgcattttctcctgaagcatttttgcaacctgtttataatttccatttagaaacttgattgtttcttcgatctgttttgcatattcttccttggatatatatccttggcatggtgcatcacactgcttgatctgatagtacaaacaaggcctgtccttccctgtatcttttggaagtcttcggttacaggtacggatcttaaagatcttgcgaagcagctcgatcgtatcatttactgctcctgcactcgtataaggtccgaaatactttcctccatctgctttcatcttccttgccagcatgatccttggaaattcttcattgaccgttactttaatgtaaggatagcctttgtcatctttcagttttgtattatattttggatgatgctctttgatcagattgttctcaagcactaaagcttccagttctgaatccgtgatgatatattcaaaataagcaacattctttaccatatgctgaatcttcacagacagattccggctgtcttgaaaatactgacgcacacgattacataacttgatcgcttttccaacgtaaatgatctcatctttgctattatgcatcaaataaactccaggctttgccggaagcttctttaattcctgctgaatgtcaaacatgaacttccctccatctttattctgtatattttatggatgcaaaatacacttatctttaatcatagcataaatttataggcaaaaaaagtatcgatttgaagtgtaagcttgcatgtatgttttactgtattggtatttataataaacactgtctgtcactacaaaaattaaaaaacgataacactcaacatacacacccacttaagttttccaatcttgtaattgtccacactttagacttctggtatatgataaaaaataaataagcaaccgaaaacgcagcattggaattttgccatattttgaacaaattcgcagcccaattggacgagtgtctgagcttcaaagatttttgtcttagacaaaactccagagcgagttttcgtaggaaattgggcgaatcagcgatttgttcaaaatgtgagcaaaattccaccgctgcgttttcggttgcttatttattttttatcatatactgaaagactacagttggccaacttacaaattaaaattcacacaacactatttcttttcgtctcaatgtttcctgcacatcgatgactctctgattcttacttcccttccaatgaagttttccatcaaattcttcctgtacaaaaggtccatctacgatcacatcgcaatatttcacaacatccagtgtcttgatctcatcccagcagaatcctgtatacagccagattgtcttatttggaaatgtttctttgatctcttttgccagaactgcaacttctacatggtttgctgggtgaagaggatctcctccgctgaatgtgacacctgagatatagtctggtttgatcgcttcaaataattcttcttttgctgcatcatcaaatggaattcccccttcgatatcccatgtgactggattgtggcagcctttgcatttgtgggtgcatcctgcaacccataggacggctcgcagaccgtccccatttagcatatcatctttcgtaatattatggtaacgcattttacatggatttcctttccgcaatttctgccattttggcatcgttaagtcttgtatctcctttaactctggaataagagagatatccgttcatacgatcgatctttgtgagatttttacttccgcataccggacacacatccatctctaattcttcgtgtccacagtcatcacagtatgctaaagacaggttaactccttcatagaatcctttatccatcgctcttcttactaatgttttcactgcttctttgttatagttgatcggatattttacatactggatctttccaccattgcataattcccagaaacgtccttcaagatcttgtttctcgatcggtgtgatgtcttctgtgacatggcagtggaaggaattgctcacgtattctctgtcagatacattttcaataacaccgtatttcttacggaactgttttacctgaaggccgcataagttttctgctggtgttccatagatcgcatatagatttccgtcttccttcttaaattcttctacttgttcattaatatagcgcaatgtttctaatgcaaactcgccatcttctgctaaagacttatggttgtataactgctgtaattcattcaacgctgtgattccaaaggaagctgttgcactctttaagattggtttgatcttatcatgaattcccagatgtccacctaagaatcccccttcacaatatgccaacggattcgtagaggctttcatttctcctaaatattcataagtcctgatatgtaattcacggatcaggttcagataataatctaatacttcatggaaatctttaccttcctgttttgattttgcatagatcattggcaaatgaaggctgactgcgccgatgttaaatcttccgacaaaaatcggctcatctttttcatctgccggcttcataccgccttctttataccatggagataagaaagcacggcatcccatcggactgatgatctttccgtatttcttgtacatgcttgcgatatatccctctcctgttaaagataaccagtctggatacatggtctgtctggaacagcggattcctgcttcaaatacatcttccagctcacatcccggtccatgaagattcttgtcatataagaatacaagttttgggaataacacaggcttcttgtgtccttcttttccctgtcctcttcttctaacgtctaacatggagatcgttgccatcttggcaaatcttccagttcctgttcctgctgtcattgtgataaatggataatctccgcggcttgatgatacactgttaaatttgtactctaatccctggaatccttgttcaaattcacgtttgacatctttcaacgcttcttcttctgcgcgttctctggataaccctagtccttcgtatcgttcgattcctgcttcataggatttctcggcatatggttctaagatcagttcaatattcggtaccgtaaatccaccatactgctggcttgcggcacttaatacgatatctccgatcacatcaaaggcaacatctaatgtctttggttcgttgtaccagagatttcccatctcaaatccgccttttaacacttcctgtacattaaacagacagcagttcatcgtatcacggcgggcagacatatcgtgaatataaatatatccgtcacggcatgcctgtatttcttccgttgtcatgaaaaatttctgatagagttctttgtttaattcattaaagatcagacttcgtttggtagaaactagtgcactgtctgtgttgctgttttccttatcaccaatgtacatgatagactggctcttcttgtatacttcgtctaacatctgtacaaaatcctgcttatagttacggtaatctctgtagctctttgctaccagtggatttgtctgttctaatgcaccttcgaccacattatgcatatctgagatcgtaacttccttcttgcgcatctgctccactttttccgtgacaaagttgcagataaaatcaagttcttcctctgtaaatgttaccagtgcacgatatgctgatttattcactgccactacgactttttgtacattaaattcttcttttgttccgtcttttttaattaccttgatcataattctcccttctctatcagattctctcatctttcactcgttatattgtatactagatgtagtattttatttttcttttacacactagatagtgtagcttttcaagtttaacaccgctatctggtaaagtcaatgttaactttttatctctttccctttatctgtaaatccttccaagagtaagattcttactatcctttatttccagtttttttgacagatattctccgaatgagatcgacaatttgtcttcttttttaaaaatatcagaaagattgcgatctgtttttaatacataaacagacttcgcgatctgaggttcatttattaattcttttatgatcttttcatctttttttccatttgcaaaaagcacgacttttagatgtccaaaatttaactgctgacttttatattgtttccatttcttatttgcatcttttaaggacgttgccaaaaatgtcaccgaccttgatggtatttttgttccagaatcactctgtaccttgtcgaaatccgcatacgaataacgaaccaatactttcttttcattgagccgttcaaatcccatcgccaacacaaacctatgatcttccacatcttgttgtttgctgcatccttgtatgcaaaatgcaattagcagcaccaaaagataccctctatattttttcatctttctgttcctttctccacatcagaaataaaataagtggaaaaaacaatccgatcaccagatttccatagataaaaacaaaaaaataccgtctgatccatgttgcaaatgttgtcatgatccatggacttatgacgtaaattccaccatatgacaaactcaatcccacgatccttccttttgaaaatgcatgtttgatactttcatttccataaaataagtaaccgctgaatacacaaaagacacctacgatccaaaatgcgatcaaaaaaagatccagtcttgccatgatccctcctggcattgccactccctgtgccatagacatcacaggttctggatcgaccatcgtaagcttctttccaagggaacctacagtacttgcaaacaccccaagaaaaagtatcatcaaacctgcaaatgatcgcatcctgatcggtccatctctcatatctccacggtaaaaccatacgaactcgatcggatgcatcagagcaaatacgaaaatgcttccattgatcatctcattgccacgccaactcctgaccgccaactcatcccatgaaagatttgccatactcaagatcagtacgaagatcagcggtagtaatacaaaccaaaaaattccttccattactctgcctctttttgttaaacctccctgatttatcagataagccagaagaagcaatggaaatccaataaaaaatgttgatttgtctggaagaagatatttttttgtaagagacaaaatacataaataaaaaaaagctccattcagcagaaatcttacataataaatgatggctgcaaaacgatatctttttagtacattttcaatagaaacccctcttgctgcatgatctacgatccacaaataaattcctgccatcacacttgccatgaccaccacaacaattcctgaatgatatgatttttgtagtgcgatctgtggaagaaacattgcagctgccgaaaatatttcaaggatcatgatccgattcccctgtcttgccgtgatcatctgcgaattatttttcatcctcgtcctccttctgccttaccctcgccccttcttttgtgaattctggacggtatttcatccgctttagtggataacgaaccataaaatcctgaaatgctgtagataatcttcctctttcttcaaccattggatgtgcatatggaattccataattctccagatagaataaatgaataaatattgccagaaatcctaaaaagaatccatacaatccccaaaaggcacacagaatgatcagaaaaaacttcatcagacgaaacgcactggtgaataactcattcggaatcgaaaatgtagcaatcgcagtcaatgccaccacgatcactacgatcgtactaacaagatgtgcatcaactgctgcctgtccaacgatcagaccgccaacaacacccatcgttcctccgagctgtcccggaagtctgattcctgcttctcttaataactcaaacgataattccatcagcagtacctccacgatcaccggaaatggaactccttctctcgccgagatcaacgccagcaaaaaaggcgttggcaacacctccggatgaaatcctgcaattgccacataaaatccaggaagccctatggaaatgatcgctgccacataccgtaagattcttacgaatgtcgtaatttcccaacgattataataatcatcacttgcctgaaagaacacattgaatgttacgggcaacaataaaaccattggcgaattatcaagaacaactgcaatccggccctccatgatactactcgcaaccttatccggccgctgcgtcagctgatataacggaaatggagttttactgtctttttccagatattgctgtaacattccattatcaaaaattccatcgacacaaatcttatccatctgtttctgaattttatttaaaatgtccttctgtaccagatcctcaatatacatcaatgcataatccgttttacttctcgttccaatctgcttctggatcacttttaacctcgtatcccgtatccttctacggatcaatgccgtattcatcctcagactctccgtaaaactatccttgggaccaacgatcgccacttcctgatccgcattctgtacccctcttgtcgggaatgatttgctggaaaataagatagcccttgcttctccatccagaaataaaaccgtatttccagataaaaccgctgtcatagcatcttccattgtatcgatccatttccaatctgcggattcgatcacatattggctgattgctgttctttcctgcggaaaagaatcctgaagcaacggtctgatgacggattcctgaagcatttctgtatttactaagccgtccatgtatacaatatatatgctgatttcgtggtcgattccgattttgaattgtttttgtaccaggtcattgcagtcttgcatgactttggttgtgtattttatgttttgttggatgtgtggggagatggtgccttttaggttgtgagttcttgtgtggaagtggtccatggggttttttcctcttttcttttttggatagtatgtgggattttggcaggttatatacttacgatattggtttgcaatattttatatggaataaaatgtaaaaaatagttattgtaaatatatggtttttctggtaatataagaaacataagtcgatttataaaaacatagtacatttcaacaaaaaatcaaacaagcaattcttaaaattcaaacactgtaactacagtcatgtataatattgcagttctacaattaagaatttcagttcagaattgaagaatttatgcacacaggaggataacctatggcagaaaagctaaagaataaagttaccgatgaagaactaaaaattagagcaaccagtgatgaaaaaataaccgtaaaactaacaaataactatgccttccagaaaatattcaaaaatgccaaaatcgtaaaaggattcttaatggcattactaaatctgaaagaatatgaaatcaagaaaatcgaaatcacagatccatttacacttggagaaaataacgaagaaaaagaggggattcttgatatcaaactagttttaaaccaaaacagaaaaatcaatattgaaatgcaaaatacatatcaggatgattggacagaacgaagccttttctacaattgccgaatgtttaccgatggttttcaaaaaggtcatctctacggagaactcccaccttgtatccatgtaggtatcttaaatttcaaccagatgataagcccaaattattaccataaattctgtctcatggatgagaaaacgaaggagatatatagtagaaaatttcaatttcatatgttagaattaaagaaattaaagtatgcaaaagagaaacaacaaagaaagccattatatcaatgggcaaaactgatagctgcacaaacatgggaagaactagagcaggaatcaaaaggtaataaatacatggaaagggcgctggaagagatgataaaaatcagtcaggatgaaatagaaagatacctatatctacgagaagaaatggcagaaagcgatagagtcagtcagatacaaagtgcaaaaaggattggacataaggaaggaaaaaaagagggagaaatactaaaattaatcacacaggtacaaaagaaaatagcaaggggagattctctagaaaagatagctgatgatttaatcgaagacgaaaccgtaattaagcccatttatcaattagtacaaggaaatccgaataaaacagaagatgacatttatcagatgttgaatttactttaaagcctacagagcattatggaaaaaattataaatctccgttcataaatacaaaaattaatagccaataacgtataacatacacaccgtggtggtttgaatagccgtccgtgtatatgagaaaaacaaaataataatataaaggatccagaaccattgaaattttgccgttattttgacaggttcgcagcaagcttggtgtgctgcctgagcgaagcgagacaaggaaagcttgcggataagcgacctgtcaaaatgacgtgcataaatttcctggtctggatcctttattattttgtttttctcatatacactccccacgactaccatttcaaactacaaattacaatttacatcttccaattagccgcctccacctgcaattccaccatatgtcgataaatcccatcacaagctttcaattcatccggcgttccgttttcagcaacaaccccgtctttcaacacaacaatcttatcagcgccatccacagttctcattcgatgtgcaataattaatacagtcttatccttgattaattttgataatgcttcctgtatcaatgattcattatctacatccaaagatgccgtcgcttcgtccatcaggatgattggtgcatcttttaagaatgctcgtgctatcgagattctctggcgttctccgccggatagttctgagccgttttctccgatcatggtatcccatttctgtggcattttctcgataaagtcttcacagtttgctaattttgctgctgccataacttcttcgtctgttgcatcttttcttccgattcggatgttttccataatcgtgttgttaaatagtgttacatcctgaaatacaatggaatatagtgataataatatttctggatcgatcttagagatatccatgcctccgatcgtgatcgttcctttgttgatatcccagaatcttgcagctaatcttgatacggttgtttttccacttccggatggtccgatcagtgcggttacttcgccttgttttgcggtgaagcttacgtcttttaagatctgttcatttccatcgtaagaaaatcctacgtgatcaaagttgatgtcatatccctgattgcttagtgttttatttccatcctgttcttcgtggcttaagatttcatccattcgtttgcactgtgtgtctgtggaaatgatcgcggataaattctctaatgctacctggaatggatcgtacattcttgatacgaccagcagatacatgaagaatgttaatgcatcgatttctccttttgcaaataagattcctccgactaaggttgtcgttccgattcctacttttaagatcagctgtgacaggcatacgaacattgcgttgatcgcttcggatactacggcgtgtttttcaacagcctgaatctttttgtttaagccttccatataggtatttgttgcgttgtatgattttaaatctctaacggtttccagcccttcctgaattccatcctggcattccagtttgtatttcattgcattttcatttaatcggtgtgaaattggtcttgcaccgaatacaacaaaaaatgcaactggtaatacccatacagctgccaatgtcatttttacattgaaaaagaataaacagatcgttacgatcgttgtggaacacatggaaccgaataactgtgggaaaaagtgagaacttgctgtttccagccatgcacagtctcccatgatcgtacttgtaaggtctgcaaggtcctttttaccgaaaaatgataatggaatctttcttaatttctctgccagtgtacgtcttctgactccactttccacataagttgcgaggaatgttgcgttgtactggaagtatgttgtaataataatcaacaatattgaaataaccattcctccgatatacattggcaattttgaacttggaattccaccatttaaaatatcagatgctagcagatatagaagtccgactggaaccataaatgctaagtttgcaattgttacgatgatgaccgctttaatcatatcattgacaccctgttcagaaagggcatatttatgttttaatctttctctcataattataatacaccccctactttccagttcactgatttgttatattcttcccacatatgggcgtaaatgccgtgactctttaataattcgccgtggcttccttcttctgcgatcgctccgtctttcaaaacatagatacggtctgcatttgtaacggttgataatcggtgggcgatcatgatgacggtcttgtcttttgataagttttcaaacgctttctgtactttctgttcgttatctggatctgcaaatgcagttgcttcatcaaggatcagaactggagcatttttaagaaatgctctggcaattgaaagtctctgtgcttcaccaccggatacatgaattcctttggctccgatcattgtatggacgccgtctttaaatttgtcgatgatatccatacactgcgcatcttttaatgcctgcataacttcctcgtcggttgcatctggttttccaagtctgacattttcaaggatggacatctttaataatttgctgtcctgaaatacataagaaatctgattcataagttcactgcttgtaatatctctcacatcaacgccgccgatctttacgcttccttctttggcatcccagaatcttgcgatcatggatgctaaggttgttttaccgccgccagaaggtccaacaaatgcgacatgttctcccgctttgatctcaatggaaatatgatcgactgcatttttctttgccccttcgtatgcaaatgttacatcccgaagagatacggaactgtcttttggaatctgtccgttggttgtctcttttaatgactgtctgttcatcacatcacccatacgttttaatccatcaacgacctgcatctgggcttcgcctgcgtatgcaagtttcattaatgttgttgttaaaattggtgtgatgatgatatagaataataagtttaacccaaatgctgctgtgatctcatgtccgccaaatacataggctgcaatgatgataaatacaaaaatggaattgaccgctgttgtaaatccaaccattggttttctcatttttttcgtaaatcccagtgtccatttttcatattcatcaattgcttctttgaatctcttaaatgaaaataccgtctgtccaaatgttttgacaacgggaactccacgaatatattcaaccgcttctgctgacatgacttccaaggaattctgatactgtttcatactttctgccagatcttttccactcatggaactcatgaatacgaatccaatcgctgccggaatcagacacatgattcctaacctccagtcaaagactgccattaagatgataagtccgatcggtgttgccttggaaactgctttatctggaagggtatgtgccagatatgtttctgttgctgcactggaatctgtgacgatctttcgaatcttaccagttccttcgctttcaatatatcctaatggtaatgtcatgatgtggttcatcattgctgttctcatctgtgcctgtacatggaatgctgcgatatgagagcacatgagacccgccatatagatgatcattccaagaatcgcaaatcctaccgcacgccatccataagtgctgattcctgctgcctttgagaaatcaaatctgactcttaacacttcctgcatcactttccaaatataataaaatggaactaacgcaacaaatgcactgatcgctgcaagaatggttgagagaatgcttaaatatttgtaactgcctgcgaaatggtataactgctttgtcaggctttcttctttttctttcttttcttccattatattcacctccgtaaattatttattgtcggacaattccatctgtctgctgtccttatttaaattgtgcttgcgcttatattcaagcggtgcagccccgtaataattcttaaatgcttttgcaaatcttgattgtgtcgcaaatcctactgcatcactgatctctgatattttcattgaatttttcagaatcaattctgctgcctttttcattcggatctcattcaataattcgctgtatcctcttccatatactccctggaaataattcttaagacttgtctcactgattccaaaatgtttcgcaagtgtcgctgcagaatatcgtttgcttaaatcttctgtcagaatatccatggtctttctcgcaatctgaatctgtgaacctgagtagtacaccctgtttgtctccactgcatcccttttgctgcaaagaacctgaagccaccggctgacatccaccgcaagaagattcatatctgcatctgcttcaatgtcatcttgaatcactctcactgcctgttcaattcttgcatctgcttttgaaataaatggtgtctctcttcccagaaaccgttcttttaattcaacgctcattttggtattcctgccatttaatgacagttctttgtcaagttctggacatggatacaagatcaactccattccatgatactgtgctcttggatagtaaaattcatccgcttctcttgaagcagtcccatagtcgattgaatattccccggtatccacataagtaccgccaccatttttcaaaagaacctcacacttgccaaggaaactgaaattcactgtcatgaccgcttccccttcgtaggcctgaatctggacttctgggattcttcttgatctgatatcaatatacaaaagctccagatatgagctgatccgataacagacgatctttcctttctctcctgaaaaatctgatggcaggattacttctcgtttctcattcatgaaaaactccttctctcttcctttcttttataatttacggttatatgttagtatacactaacttttgattcaagaacaaaacagcaaaatagctccttttagcatctggtttgttcttgattttgtctttttggtaaaaagaatcctgttttatggaatctcctgcaaacaaaaaaaggaaaggatcatcacaaaacatgataatcctttcaaatttgtttaaaatttcaaattctaaatctcattattttctaataatatcagttgcactaaagactttatcacctttgcctgctttcacacccttagcttctaacagctcggatactgtacaaacttcatatcctttcttcttaaggatcggtaatactttctctactgctgcaacggttggcttatgaatatcatgcattaacacgatatctccgtcttttgcatgttttaagattgttttaacagtcgcatccgtgttctttgtcttccagtctaaggtatcaacactccaaaggatcagtggtgtatcaattccttttttaacattctcattgatcgctccatatggaggtcttacgctgactggtttacttccacatgccttgtagattgcattcgctgtcttgtcttcctgttctcttacctgtgcagcacttaactttggaaggtatgtatgattccatgtgtggcttgatacttcattacctgactctaagactttcttgactgtctctggataataatttgcattctgtcctaacatgaaaaatgttgctcttgcatcgttcttctctaatgctgctaatactctttctgtatttccttttaatggaccatcatcaaatgtaaatgcgatcagtttctttgtcttatcgatctttcttggaacgtagagtgatttcttcaattctttgtctgttcctttaccgagcagatcatcatttgcctttaccatgtattctcccatggatttgttcactgatgcataacttgttcttccaaatcttgtcgttacaaaaaatattcctgctgcaatcaccaggataatgatcaatagtgctgcaactcttcctttgttgatgcgtcttctttttcttcgtcttgccattgtacccttcttctttccttatgattttaataattgaaatgtgtctacatccacaagtccaaggtctgtcagtcttaatgatggaatcactggaagtgccataaatgataatgtgataaatggatcaatatctctggatattcctagtttccatgctttttgtaacagctcatcgatacctttctggatgtctttcgccggtttctggcttaaaagccccgcaaccgtcagcggtaaagtacctaaaactttgccttcagataccagtgcgtatcctccctgaatctcctctatcgtctgtacagctttgatgatatcttcgtcattatctcctgccgcaatgatgttatgtgaatcatgtgctacagatgttgcgatcgcaccgttggttatcccatatcccttgatcggtgccgcagctgcattgcctgttccgcggtgacgttcaaatacacatagtttagaatattcactatctggagtaaataacccatcctttgatggaacctcttcctgtaaaaacttcgtgacgatctgccctgggatcattccgatcacagggatctttccttctgcttttacctgaatcttatctttggagatattctttaatacaacggtatgaagcatggattcattcactggttttgcttcttttgtaaagaattctgtgttcacaattcttccttgtttgtatacagaatgtacttcgacactctccaaagaatcaaggatcacgatgtccgcatcttttccctcttctaatactccgatatcatttaaaccatatgtctttgcagcattatatgttgccatctttaccgctgatattggattcattccaagctggatactcttctttatattgtaactaatatgtccttcattttcaatagtatcaagatgtttatcatcggtacagaacataaaatgtgcaataaattctggttctttgacaagtcccggaactatattgtctacattccttgctgcacttccttcacgaactaagattttcatgcctgcaagacatttttctttggcttcttcaaaagatgtacattcatgatctgtcataactcctgcttccacatatgcctttaagtcttctccgctaagtcccggtgcatgtccgtcaatgaccattcctttacacagctctaatttcttcatgatctgctcttctttgcttagaaccgctggataacacatcacttctccaagtcctaagacaagcggatgttccttccactgcttcatatcttccgccgtaaaatctgccccatttgtctcaaatggtgtcgctggaatggatgaaggcatcatgacatagattccaagtggggcatcgcctgctgcatccagaatgtattccatcgcttcatttcctttgacattgacaagttcatggggatctgcgataaccgtcgttgtaccatgcggcataactgctttggaaaattccattggtgtcgccatactagattcaatatgtacatgtgcatcaatgaatccaggtgtgatatattttcctgtacaatctattacattctcccctgaaaaatgaccaattcctgcgatttttccatctttcactgcaatatctgcctgaaggatctgttcatttttcacatcaacgacatttccatttttaaagatcacatcatacatcattcttcctccttaaattttacgattcctacataatatttcttatctgtatcaaatagcatattccagtcgatttcttcgcactctccacaattcgaccagatcaatttctcttcttcctcatcaaatcctgtgatcgtcacccagtgccagttatcttctcttaattcatgcgccggatgtcttaagatcagaaatgcaactggatggtcttcctttaatgctggcaagataaaatccaatgcctgttctctactttggggtaaaaatagctgttctgaacttaatgtgattccatgatcttttgcatatcttttgaaatctttcgcaaatctcccaatcagtggatatcccataaatccaggtttcatatagcgatacatcgtctgcatcaaatttaaatattgttcatagtctgctgctttctgactatcttttatcggatataaatctttaaaatcttcccgactgagtgcataaatagctgcaatattgctgcctgtcacacttccacatcctgccaggcgctgaaaatctcctggaaaccattcctgatcgccgccatatcctatggttttaccgtcctttatgatctgtggacagtgaagttctttcctcatagtctgtccttcctgttatactcttaaattcattgaattcttttatttctttatgttaagattgttatcattagcagatatgatcatttacaatttacagaaaggatgagaacatctatgaaaaatatcctgatatccttatgtcttgcactatttatcatcagtgcatccgtaacgataacattaaacttccgacctttatattatcatgatatttcctctttgcaaatagaagaaacttccggtttttccaaaaaagtgattcgtgaaaattatgatgctttgattgattataatcagttcttttattctggcaaattaaaactgaccttacctatgtcaagagagggcaagattcattttgaagaagtaaaacgaatctttgttggtatcgaatatctttgcgtgatcacactgatcttatcttgtttcctcataaagagaaaaataaggtcacgaaatattgattttttaagatcagcttctattataactgttttattacccgtaattgttggtattttatgtgcgttcaactgggatgccgcttttactttgtttcatgagatcatgtttcgaaatgattattggatttttgatgaagctactgaccctgtgatcatgatccttccagatgcatttttctttcactgcgccgttatgatcatcttactgatcttaattggcagcttactttgtatgggatttcgttctttttttcgacacaggtttatgctataatggatagatattaattatttgtttcgaatgttacatttttattaagctaggagtttagcaatgagactttcaaaaataaaaacaaaggaaatccgatatgtagtctggaaataccgattaaaacgatttcttccacatatcttaacactttgccttgctgttattgttgctggcggagcttttagtgcttattcggtatatcataaaaagcatcaaaagcaactggcaaaacaatctgaggtccagcgtgaaaaagatgttaacactgctcgtaaaaaggcacaaaaagaaaaaacaacactgaaaccttggtatacttaccacagcattgcccatgcaatgggcgggcttgatggcaaagattatttgaattccatcgatggcttttaccctgcttatcagaagggttatcgtgtctttgaaatggacatccttcttactaaggacaacgttgcgattggtaagcaccaatggggtcggaaactttctgatccaaccagtaaaaaaggcgacccagtcagttaccgtaaattcaaaaatactaagatctatgggaaatatacaccaacttctttccttgatgtattgaatctcatggaaaaatatcctgatttctatctgatgacagactcaaaaagcacagagcctgcagatgcaaaaaaggaatttaatgttcttgtacagacagctaaaaaagtcggtaaagaagacctcttagaccgtgtgatcgttcaggtctacaatcagagaatgtactgggctgtaaaaagcgtgcatccattcaagcattttgtatacaccacttacaaacagcccgatgcagcattttataaagtcgtaaagttctgtaaacaaaatggtattgaagcgatcacttctcctaagaatgatatcaatgattatcgtatggaactgcttgcaaaacaaggaatttattcatatacacattccgtgaataatgcttattttgcgaaagagtttatgaaacttggggtttatggagtatattctgattttcttagcccagcacaggtgaataatagttatattagggcgaattgtccgaagtttgcttcacggtatgtgaagacgatattgccagggattaatcagtaaatcctgtaggtagtgttggtcctgtatgagtcagaaagaagataagaagaactatttctgactcatacaacaaaacactattcaaatcactacacagtgtgtatgttatatgatattggttaataatttttgtatttatcaactacttcgtagatctgaccttgaattaatttctatgaattatcaatcacatactcatcaaataatggtaatgtaaagtatacatatcctctcatttcacctgacaagattcccttttttatcaaacgttttcgatatggattaaattcattcgtctccattcctaaacgttcccggatatctttgatcttcccaccatcaacctctgcaattcctcttgctactatcctatctttctgtgataattctgaccagatcttatcataaacaaattcactcaaatactgttcatattcatcaatgactgcttcgtaatcaccctcatgattccatgttaaatatccaagaacctgaaatgcaaatggataaccttttgtaagttctgccatcttcgcagcatgttctgattcaattttaaaaattgttttatatttattcatgattgcccgattatttaacggttttaattgtatctttggtgctctatataagaatgtaagattcttttcattctgtaactcatcgatgttctcatataaacccgttgctaataaaaatactggtagatcctgccttacaaaaatctgaaaagatccagcaaaaacctgcataaattcattattcgtaacttcatcaattgtgatcaagagcctcttcccattctttttcatcttttccagaattactatgatcgctgtctcttcatctgtaattggtgacattccttcaattgctactccaaaaccgaaaaatgacagatcaattttggaagatttaatgattccagcacataccttgttgctatttaactttgataaaagtcctttcaataaatctgttgctggattcaattctattacgatccattgatcattttctctcaatttctgtgaaatctcagtcatcattacagtctttcctgacccacgcactcctgtaataataaacatctgctgattaatctgttctgctgtaaatgtatcaatgatctctttcgtctgtactggacgttccactggttctaacggactttttccaaatgtaagtgtaaaaggattttgcatttcttatcacctcttatctcttttactgttctttactgtttttatactattttactgttctttactgtttgtgtcaacatcccaaatcttgcagcattatgatcaaaatttaagcctcatctgattccacttcactcctccatgctcagactcagatactccctcattctcaaatccaaatttcgcataataatgcaccaaatgatccttacaagtaagcactaatccttttctttcctgctttcttgcatcttcgatcgcacatttgatcaactctcctgcatacccatgttttctgtatgcaggtatcgtattcaccccaaagatcatctgccacgctccactttcattgtgcaactgagcttttgcatacatttcatctgtcagatcttcttcatccgttacaaatccatctacaaacgcaattaatttatctccatcaaacatcagccagaaatgatcagcatagtattttaatcgttctgctaattcttctcttgttgctgcttctgctggtggaaagcattctgcctctacagatgttactgcttctagatctttgattgttgcggttcttatattcatattttccccttttttgttccttgtagtttattatatgatgtaagtgtcaaaagtataaaaatctatctaccactacataaaaaataaataaacgatcggaagagcaaaattctctagctgctcttccgatcgtttatttattttttatcatatactcaaaatctacagttggccaactacaaaaattaaaatttaatattcttccttaatattacggatcactgtcatttcctgatttgtaatatgtttcttcatgatcttgcgtgcttcttctttcttacctgctctgatcgcattcacaagctctttatgctcattcaacaatacaatatggtaatctgtatcctttacatattccagacgataacggtagaactgttctcttaagtttccaatgatctgaatcagtcgtggattccctgttgcatcgaagatgatgtcatggaattccatatcgctgtctgcgatggctgcattatctccagattcgattgctgattcgaattctactaatgcctgatctaacttctcctgtccttcttcatccatacgttccgctgcaagttctgctgctaattcttctaaggaacaacgtacttctaagacatctcttaaatctttttctgtgatccttgcaacttctgctccctttcttgggatcatgactacaagtccttccagttccagtttacggattgcttctcggacaggtgttctgctgactcctaatcgattcgcaagtgcgatctccatcagacgttctcctggtgcaaattctcctgtgatgatcgcctgtcttaatgtattaaataccacatctctcaatggcagatattcattcatgtttacctttaatttatcgctcatagtttcttctcctcctactttctccaatgtatcttccatactgctttcttatttgtgaaaatacattattgtatcggtcttactacgtatgcctgtttgatgtcctcaatacttcgtaatgattccattgcatcgtccgctgttttcttatcctcaaaaatcgcgaagatcgttggtccacttccactcattaaagctccctttgctccctgatccatcagatgtttcttaactttctctatgatcggatattccttgattgtgactgtctccagtacattctccagacgatcacagattcctgtaagatctttctctttcagacactccagcattccatcgatatccggatgcttcgaaagtgctggaagatcaaggttcttatatacaaatgctgttgatacgctgatccctggttttgcgatcagaatatagcaatctggcatcgcatcaacccttgaaagtttctctccgattccttctgatagtgctgtaccaccccagatacagtatggaacatctgctccaagcgttactcctatctcacataattcatcaatcgataatcctagatcaaacagctgattcattccttttaatgctgctgcgcaattagaacttccgccagccatacctgctgctaccggaatccgtttgctgagattgatctcaactccatctttaatatgatacttatcctttatgagttttacagccttataaacgagattacgttcatcggttggcagaaacgaaagattacaggtcatctcaatcttgtcatctttccttttcttcattgtaagcacatcataaagtccaaccgtctgcatgatcatacgcacttcatggtatccatcttcgcgtcttcttaaaacatccagaccaaggttgatttttccatatgattttagaacaatactatgatccatatgcactcctttatcttatgtgaaatagtttctatctcacaccttgtatacagaatattatagtattgttctgaaaaaaatgcaatccttatttgctaaaatattttcatttcttttacgattaaaagcttatctcctggtttgatatcggaaatgtcctcattttgctcccgaatgctctcaaccgttgtaaaatacgccttggcaatagaccatagagtgtctccttctttgacgatatacccaacgatccctgggatctcacgtattttgtcatagtctagcggtccttgcttcatatccgtcataatccgctgtctgactctgtgaaaagcgataaaatcaaataaaacagaagctctgatctctatctcttctccttctgttggaatcgctgtcatctgatctacccgcacatccagctgatagtcctcatttccagtcagattcttcgtctcaacaaaaaatgtaaacggctccatataagaactgctcatcactggtgtcatatcttctgtggacagatacaagacatctgccatccacacaccttctacagataatccttgtgttgtcatttccacatcgtctacggttgcacttcctttaacggataacacttgcaacagctttcctaactcttgttccagccgaaagcgtttgtctgctttcatcaccgcttggttctttcctaccagtgtctcaaaatcgaacatatgatattctggaattagcgtttcttccatactatatccgtcatcaatatatgaaatcttatgatcttcataaattttaatatcacagtcgatcgtaacatccaaagaaataattctttcttctccatcctcatcaggtcttatctccaactgctgtcctccgagtgtcatcccgatccgtccgatcattcctggcatacattcataacattccagctgcgtatctaccggaatctcccatctcgcatactgtaccggcatctgggcatcttctccaagatataatacaaatatatgcattgcaccctgaatctcgatcatgtgctctccaatttttgcctgcagattttccatatctacctgtgtccataaaatctgataaatgttcgccttatttgcaggaagtaccaattcttcttttaatctcgcgatatcctttttatttacgatcagatctgtgatctgtacatctttctttaacacggatacattttcttcatgaatttcaatgatccctttttctttcatttcttccgtgatctgaaaggaaaacgtcaataatacacgaatgcttattttccttgaattgatcaaaatcgtattgatgtcatcgatcgtatattttacttttacataatccgatgggagcactccttctatatgtacatattcctcaaacggaagtgaatattctagcgattcaaggtatgctgacgtatcatttgtaccatatagtccctgaaatataaattcccccttgatccttacccggtcaaccatcatttccgtttcctgtatctttacgattcctctggtctggatcatcttttctacatctggttttgtatctgcaacattgcagtcctgatcgatcgtgatctgcatctgtttcttcgctttcgccacgatcccataaaattctttcttttcaaaatccataaaaaaattcctccctgtctgtatatacaaatatattcagacaagaaggattctatgcatcacccattagttttctaataacatcatacggacatctcttgtgatcacgtcctggtagctgaaacttacagttttattctggtcattgccatctgcattctctaactctaccaaaaagatattaggatatgtctgtgtgatcactcccttagctgttacaaatttatgtcgtcctctgtttgcactaatcttgattttgctgccaatctgattcttgatggattggcgtactctgttaagatctaattgtgtcataaattcacctcttccatatacagaatattctggaaattctatataatgattttaatattataacattttgcccagtttttgtcaaatttatgcatacaatatccagttttatcactattattaccaaacaagaaaactgtacgcctgatcggtgtacagttttcttgacatattatatggagttttgtaaattatatggattttatttttatatggagtgttttaactattatagacatctttgtctaattcattttctttatagctgacaatcacagtcgttgccgcatcaccaacaacgttcaatgtaattacagccatacccggcagataactgatcgcaagtactaatgcatatgctaccatacaaagatcagaacttaatcctaatcctgacatgataacaaagatcaatgttgttccagctaccggaatcgcaggtgttcccatcgctacacaaatagacaggaatgctgctgtgatcagctgggttggtgtgatattgatcccagctgctgttgcgataaatgtaatcgcaaccatatgcatggcagttgttccgttcatattaatagtcattcccattggaagtacgaaactactgatttccttgctgcatccaagttcttccatgcatgtttttctgtttaaaggaagtgttgctgcagatgactgagtcgctgctgcgaacattccaactttaaaaatcttctttgcaaacttaaatggatttaagccggttaagaggaagataccgattggataaatcgttacaaccaatgctaaactgataaagatcgttgcgatcataaatgttaacgttggtctgatatattctgttccataagttgcaaatgttctggctaacatacagaagatcgcaattggactgaccttgttgatcaaaaagtccatatatacctgtacgatatcattgagattctgtaataaactcttaatggttgctgctttgtctcccagagcattcattgaaagccctaagatcacagctactacaacaactgccagaatgctgttgtttgaaccaagtacttccacaacatttgatggcaccgcattgatcactgttgtcaatggattatatgcctccagtgttgctacattagaagttgttgtttctggaagattcacagagaaccatcccatggatttgataaagtatgcaaacaatccagctaatgttgcaccgcatacataaaaccctacgaatgttccaattgtctttcctgcgatctttccaagtctctttggatctgccatgctgcataatgcaaggcttaatgatgataaaacaagtggtacgattgccagctgcagacctctcataaataactgctgtatgatatagaataatccaagggaataaaatcccttttcctgtgtgatgtcctgaaagaagattcgattgatcagcttccacgttccttcattgccgcctgctgttagtgattcacgcagccacaagcaaacaactcctaatagaattcctgttaccatcgcgatcatgatcttcttcatgatagacatgctttctttccgttttgcgtccattgtgcacctccgttttaccatgtggtgcgattgaaacggtagcatcacagactatcatatcttcttaataaatcaacgtgattcctttttctttacaaaattcaacccattgatctgacggtctttcatcggttaccagataggttacctgatcccagtctaaaaattgtacaaatgccgttctctcaaattttgtatgatctgcaagaagagctacttctagtgcctgttttaccatctctgtcttgacatctgcttctcgttcactggagtccatgatacctttgtccatatcaagtcctttacagctaagcagtgcaagatccacatgataccttctaatattttcttttgctaagttcccttgcagagagagggagtcctcattgaacacgccgcctgttgaaagaatatgaatctctgatcctgtcatctcacggaaaatctctgttgatgaactcagtacggtaatattacggtttgccttcagtaaacgaatggcttccatgacagttgtactggcatctgctgctatcgttctcttctgatctaatacttccttaaagagttgcgcgatcttagccttttccttttgattgatcgatgttcgcttgtaaaaatggatatgttccttctgacttgcactgtttaatacagcaccaccaaatgttctcgtcaaaaaaccttccttttccagcttctcaagatctcttcggatcgtctcttccgttaccttgtaaatcttacttagttcggatactgtgactttcttctcattcttaacttgttctcttatatgttctaaacggttcttcacgggacaccccccccttgtaaattttttaatatagtatatattcttatttgtcacatacttcttaaatgttctgtga

SEQ ID NO: 776 - DNA, 13273 bp, Unknown
  gut microbiota DNA sequence
tttcttttattctatcattgattttgtggaattcaaagacttttttccatgttttccaacattttcaatttttctctcacaagggatctctttctgatttttatttatcgattgcttctgctgattctctcatgaatgctacatcttcaggatctaattctaattctgcagattttacattttctctgatttcgtctactgttgtagatccacttaataagtttaagaaatctccctgtgcaagaatccatccaagtgctaagttagcaattgtgcagtcatatttttcacataatggtttccaagattccatcatatccattgcgttctgcatgttttctggctggaaccatttcttaggaatctgagctcctactggtttgtagtctcttgggaatgttccagataataatcccatttcaagtggagaatagcactggatcgtgatgccattttcacgagcacatggaataatttcatcttcgattccacggtctaagatagaatatttgcactggatgatatcaagatcaccatatttgatgtattcctggatatggttgatgtctacgttagcagcaccgattgctttgatttttccctgtgcttttaagtcatttaaaacgtccattgttttctggataggaacgaaatattctgttcctggtgtagcttgccaatgtgtcatatatacatcaacataatctgttccaagacgttctaaggaagcttcgatctcttttttcacagattcactgtttaagttcttgtataactgaattccgttaactttgttgaacaggtcacctttcatttcctgatcccatgttacaccacattttgtgatgatcttaacatcttcacggttcattccttctaaggctttaccaaggatcttttcactgttaccaaagttgtatcctggagctgtatcgattaagttaacaccagcttttggagcttctctgatcgtatctaccactgtctgaagatcgtggtctccaccccaggcagatccaccaccgattgaccatgttccaagaccgattcttgaaacgtccattcctgtttttcctaatttcattgttttcattttaaattttcctttcagatctaacaaccaattaaccaaattctatttataatcttctttatacttcttgagcatatcttctaccatctgacgattctgtactcctgatgttgctcctggatgctgtactgcgatcgccgctgtacagtttgcatattcagcacattctttgatgtcttttccctgaagcagggctgcgatgaatccagatgcgaagttatctcctgcaccgatcgtatcaactgctgtaattcctttacatgctggcacgatcataacaccatctttgttgcggatgtagcatccacgagtaccgatcttcataactacgtttttgattccgtaagagaacagtttatctgccacttttgcttcatctttttcacctgtcatcagacaagcttcatcgtagttagggaagaagtaatctacatactgtaatgcaccagcgatatcatctaatgtctctcctaatcgaggcatgatcatatcagctgtaattgtcattccgtgttcttttgcgaatgagaagatcttttctaatgtttttccatccagtaaaggacagttaaaaatacttgctaaagataagatttttgcttctttgatcttgtcaaaatttacatgttcgatattctctttccaaagacttccgttacggtttgtgataaatgttctttctccatcctctgttacaagtccgatattaatggatgtatttaagtttggatcaattgtcacaccttctgtatcgatattgtcttcatcgcaagaacgtaaaatgaatgctcctgctgcatcatcaccgatcgctgccatcagacctgtcttgcatccaagacggctgatgatcgttgactcattcatagcgtctccaccgacagccatcgcgatgttatcaaccggatatgattctatatcaaaaacttctcttgatactgggcgcagcggaatatctactaccgctgctcccagacacaatacgtctaactttttctccactttattcatcagcccttccgtcatcaccaaataatttgatcttgtacatagcacgttcttttactgcctggcgaactgcacgttctacagctaagaaaggttcatctttatgttcgttgatagcttccatagcagcctggcaaagttctgtatggatgttgatcttagcaataccacactggatcgcttttttgatgtcttcatcaccgataccagaagctccatgaagtacaagtggtacactaacttctttgttaacttcttcgatgatatcgaatctgatctttggttcagcagagtaaacaccatgtacatttcctactgctactgctaaagaatcacatcctgttctttctacgaaatcttttgcctgagaaggatctgtgtaagcatactcagctaaagcttcttcgtatactgtttcatttcctacatgtcctaattcagcttctactggaatgttgtatgcatggaagtaatctacacatctcttgatctctgcaacgttttcttcatatggtaatgcagatgcatcacgcattacagagttcatgcagtgatctacagcgttctttaagattgtccagttacgtccatgatcccaatgtaagatcactggtactgtagcttttttagccatggattccatcatataacagaaatcttcaaaagaagtatttcctgtaaatcctgttccgaaagagatgatgattggtgcacgaagttcttctgctgcatcaataactcccattaacatttctgcgttccatacgttaaagtgagggattgcataatgtccttcactagctttctgttcccaaaatctgatatctgcgatcattttaatttctccttttcttgttctaaatgttgttgtttattcagcgactttgataacaccttttaccatgtcagttttcttttctggatcgattgcatccatgaatgcctgctgtacatctttgtaatcatatacatgtgttaccatatcttttacattaaacttaccgcttctgattgcttcaattgtctgaggataattgttacagtaacggaatgatgtctggatcgttacttcacggttgatctttaagaagtcgatcggaactggtttagactgtgttcctaccatcatgatctttccaccacgagctacgatctgtactgcctgatttgctgtaaatgtagatcctgcacattcaaatacaagttccacaccatgatctccgaataattcttctgaacgaagaagggcaactgtgtcttcttttgcaccattgatcgttctggatgctccaagttcttttgcaaggtcaagtcgtttgtccataacatctacaactgtgatgtctgttgctccaagactcttacaagcctgaagtaccataagtccgatcgttcctgctccaaggattacaatgctttttcctaatcttgcttctccaaggatcgctgcatgcataccaactgctgctggctctactaatgctgcttccattgttgtcattccttctggtacatggtatgtccattcttctggatgtgtcatgtactcacaaagagcacctttgtaattaggctgtgttgccatgaaatctacgtctggacaaatgttgtaacgtcctgtacgacaatattcacaagaatcatctggtacaccaggttcgatcagtactttatctcctggtttgaattttgttacttttgctccgacttttacaacttcaccagctacttcatgtccaagaccgattttctggttaggatctttaggtgggatgaatggtccaaactcgaatccgtgaatatcagatccacacattccaacatattcaactttcattaagatttcatgatcttttggttctggaactgcacattcctgaatctcaaattgttttggtgttactaagattgcttctgaatttttcatagcaaatgctccttttttgttttggtgcccaaccaacaaaggacgggcaccaattactgattgttatattttatgttaagttatttttaggattccctaatttgattactctacgttaccgatatcttcgacagattctcctcttgtctcaacaccgaatacgacgattgatacagcgatgatcactgctactgcagagatcagtgcgaatacaccgttagatcccatagatcctgctgctacagatgtaactaagaatgggaagaagatgttacttacacgacccattgcattacagaatccagatcctgataattttgcagatgttggccacatttctggtacatatactgctgatgcgtaacatacatacatatagatgaatgtatttaatacgaatgttgaagcgatcagtgctgtcattgttgtctgtttagaagtaatgatacccataacagccatggcgatcagtaagataacacctgttgcttttcttggtactttatccatgtataaagatgcaaggaagattccgaatggtgcaccgaacagaccgaacattgtcatgaactgagactgtgatgtatcatatcctaatgaacttaataatgaaggcatccagttcatcagtgtgtactgaattgtgttcataccgatcagtactaaagaaccacaaattgttctctttaataatttacctttaaataatgcagagtatggtaagtttttaactgcttttgcttcaactgcttcaactggtggtaatggtttacctgtagatgcttcaatttctttttcgattgatgtcataatagcatctgcttcttcaactctaccctgagattctaaccaacgtggagattctgggtatttgttgtaaataatgatacttgcaatgatagataatacagaagggatgatgtactggattctccagttcatgttcatgctgactcctgtagaaacgatcactaatgcaataccattacagattggatgagcaaagttaccgatgaatgagtttctggaagaccatacaccacggttcttaccaggtacatactcagtaaatgctgcgaataatacgactaataatgctcctaatccaaatccctggattaaacggaatacatataatactgttacgttaggtgctgctgctccaccgatcatagcgatgatgtggatcacttcatataataagatagattttttacgaccaatcttatcaccgatcggaccaccaactaatgctccgaataactgacctgctgtgtaagttgttccccacatagccagtaatgttgatcctggctctaaccagtgtaactcatttaaaagtacgttctgtactgctccaccgataccatttgaccagcatactaataatgcgaatgcggatactaaccacattttgatatgccagccagagtttggcagacggtcgagtcttgctccgatatttgcgtttttgtttgacatttgttttttcctctctttgtttagttaagctcgctttcaagctcattttccatgatagcccatgcttcttcgaagtcatcagccttattccacagtgctggtggtcctaggactaccatatctgctcctgcttcgtataatggacgatagacatctctgttcatggatccatcggcttcaattaagaaatcaagtcccttttcttcacgtatcttaaccagtttacgtatcttgtcatatgtttgttcaatgactttctgtccagaaatacctgcgtctacgatcatgatcgttaccttgtcaagtaatggtaaataatactcaatcgtctctaaaggtacggatggatttaatgcaattcccgctttacatccaagttctttgatcttgttgatcgttacgaaagcatctccttcgatgcagtctgtgtggggcgtaatataggccgcccctgcctttgcaaacgtttcaaggtactgttgtggatgcttgatcattaaatgtgcatccattggtgtactaactttgtcctttaatgctgctagaaattctggtccgattccaaagcttggtacatatacaccatctttgatatccatatgtaagaagtctgatttttcatcgatgatacgaacctgacgttccatatcaaagagatcacagcaacccatagatggtgcgatcattaattttcgttccatactctgctcctttatagactgcttaattatctttaaatctgataatgattaatcttcaaaatcatagtggaagattactttgatagcttcttttgctgccatagcatcgaaacctttttcatattcagataatcctaatctatgtgtgatcagtggctgaactttgatctgtccagattcaagtaatctgatcgcatttctccaagatgtagaatcataagccatatgaccgatcaggctcttattccaagatgtgatatcgttgatagagaattctaatggtttgaatcccatacctacacgaacgatctcagcgtttggtcttgtcatttcgattgcctgttttaatgcgatgttagctccagaacactcgatcactaatcctaagttgtctcttccgcagatttctgtacaacgttttacaacatcttctttagatccattaactacgtgtgtagctccaacttctaaagcaactgggaaacgagtatcaacgtcttcatcaaggcctaccataacgatgtttacagctcccattaatcttgcgatctgtactgagaataatccaagtggtccagtaccgaatactacaacgtcctgtcctgggatcaggtgagactgctgagctactgctttgtatgcgttacagataggatcaagtactgctgcttcttcatatttaacaccttctggaatctcccagatcgcatgtttgtggattcttaagatttctccaggaatcttgcagtattttgagaatcctccaccccatgtgttattatctaatccaaggttaactttttcttcacagcaaaggaaatctcccatttcgcaagctgggcagacaccacatacgtgagcactgttatcagaaacaactctctgtcctactttccaatctgttactttttctccaacctgaacgatctctcctgcaaactcatgtccacggattgagttgaattcatcagatccattatcaactctccagtgtttcatatcagctccacaaattgctgctgctttgatctctaagataatgtcttctggtccacatgttggttctggaacgtctctcattgtataaccaccaaatgcctgtccatatcttacaatcgccttcatatttttacctccaaaatgttgattacataattccttaaataaccttttatcttttaattactctatcaaaaagcgctttctttatttgatgtctttattttaatacactgttatgttttagtcaatcattttttgttgatttcaaacattttagttctatttcacagattttaagctttgtttccaaagagatcgtctgttttttgtgcagttttactaatgtttgaatattgtatacagaattttaagttttatatcgtaagattccatctatgaattttatattatcgatagtttttatttattctttgtgaattttctgtcagaaatcgctcgttttctatttgtttttctgcggttttctttttatttctttcttttttctgtaaaatgcagatttttttatgttgttccaaatttagttcattctggatcggaatcttttcgttaattaataaattaacataattgtcagataattaatgaaattattccttgatttcgcacaatttgtctgctatgattatctcatcacttaataatgagaggtaaaacttatgggatttttaaaaggtaaaacagccatcatcactggtggcggaagatctgtattaaaagatggaagctgtgggtctattggttatggaattgcaactgcatacgcaaaggaaggtgcaaacctcgttattacaggaagaaataaacagaaacttgccgatgccaaagaggaactcgagagattatacaatatcgaagttctaccagtccaagctgatgtaagtgccgatgctgacaacgagacagtcgtgcagaatgtcattgatgaaacaatcgccaaattcggacggatcgatgtcctgatcaataatgcacaggcatctgcttctggagttactttagctgatcatacgactgaacaatttgatctcgcactttattccggtctttatgctgcattttactatatgaaagcatgttaccctcatttgaaagaagcaaagggctctgtcattaactttgcatccggtgccggattatttggaaactatggtcaatgtgcttatgctgcagcaaaagaaggaatccgtggtcttaccagagttgccgcaaatgaatggggtcctgacggcatcaatactaatatcatttgtccactcgcatggacagcacagcttgaaaatttccagcagacttatcctgaagcctttgaagctaatgttaaaatgcctcctgcaggacattatggagatgttgagaaagaaatcggaagagtatgcgttcagttaacttcgcctgatttcaaatatatgaatggagaaacacttaccttagaaggtggaatgggattaaggccgtaacaagacctgctgaggatagaatgtgttttttacctttggcatccttttatatcagctatatggaaaaatgcggagacattcgtttaatcgatcgtctccgcatttttatgcttttcgctattttattttgttcactgactctgacagattattcttcatcgtcatcatcttccacccactgggcatatccagtattatatgtcgatgtattttcttcttctgtcttgatctcagaatctgtttttacctctgcttctgaaatttctgcatcattttcagctgtctctgatacatttttatcagactcttctactggattcttgtatttattgaagatttccatgaattcttttcctgtgatcgtctcacgctggatcaaaaactctgctgcttcgtcaagaatgtccatattttcacgaatgtatgtgactgctttggcgtaagcttcttttaacatcttcatgacaacttcatcgactttcgctgctgttgtctctgcacagttcataactgcacgtccatctaaatatcggtttgtaatggactctaaaccgatcaatccaaattcatcggacataccatactgtgttaccatcgctcttgcgatcgctgtggcacgctcaatatcattggatgctcctgttgtgacagagttaaacttcacttcttctgccgcacgtccaccgaagaatgagacaaggtctgctaacatctcatccttcttatttaagtatttttcttcttctggacgctgcattgtatatccaagtgcccccatggtacgaggtacgatggtgatcttctgtactggttctgattctttttgcaatgccataaccagtgcatgtccgacttcatggtatgcaacaatgtgtttctcttcatcgccaagaattctgtccttcttctctttaccagcaatgacaacttccactgcttcaaataagtctttctgtgaaacagcctttcttcctgccttgacagctccaagtgctgcttcgttgatcatattggcaagatcagatccaacagctccactggttgccagtgcgatttcttcaaaatcaacggtctcatccatcttcacatctttggcatgtacttttaatgtctcaattcttccctttaaatctgggcgttctacaataacacgacggtcaaaacgtcctggacgaagaagggctttgtctaagacttctggacggtttgttgctgcaagaataatgatacctttggatgtatcaaatccatccatctctgcaagtaaagcattcaatgtctgttcacgttcatcatttcctccaccatgcattccattatcacgactcttaccaatagcgtcgatctcatcaataaaaataatacatggtgccatctgctgtgcctgtttaaacaagtcacgaactctggatgctccgactccgacaaacatctctacaaagtcagagccagaaagtgaaaagaatggaactcctgcttctcctgctactgctttggcaagcaatgtcttaccagtacccggaggtcctacaagcaatgcaccttttggcagcttcgcaccaatctctgtgtatcgttctgggtgatgaagaaaatctaccatctctgtcagtgtttccttcgcttctccctgtcccgcaacatctgcaaatgtcactcctgtcttcttctcaacatataccttcgcattggactttccaacccccatcattccgctgcttcttcgcatcatcatgacaaggaatccaaagatcacgatcgtagggatcaaactgatcaatatcgataagaaagtatccatcggatcttctggttcctgttcaaatgcgatcttactcttgatcagacgattcaccagttcataatctccgctgatcctctgtaccgtatatgttgtcttgtaaaaaggatttccctcgttctttggtgtcactttcaactggctgtctgtgacctttacactttttacctgatctttatcaagcattgtgacaaatttattgtacgaaatcgttttctccgttccgtttctccattttgttaaaatcgaattaaaaaagaaagtaccaagaattgaaacgatcaggaagattgcaagaatcttcgcgtttttcttcttgttatctttatcatttttatcattcttattattctgttgattattcaaatgtcagctcctcctttgattcataagcaccattatatgttttctgattttataaatcaataaaactattctaaactttttataattttagtgaaaaatcacatctttttcgtaaaactggctttttagtacaatatatggataagattttccatacttctggtgctcttttgtaacccctgtcagtatcgtatcaatataaatatgtgtccggtctgcactaaattctctaaccttgatcttatagccgctccccggctgtcttccatatccgatcacataataagtaaaaccacctgtcgtatatgtaaaatgaaatgcttccctcttttgttcatcgatcagtttgcccaattgtaccgggatcacacttcttctacagacaacatatacaaccttctgtttttgccctcgttcatcctttttgatacatcctgtcaaaatcacacataaaataatactaaaaataaatatccagattctttgtttcatggatctctatcctttttatcattttatgcaaatagatttaagataatacttcccggatcattatcggtttcgttggtttttcttctattatatggtagttttctttaaaatgaagaactgcctgttttactttttcttcatcatttccataaatcgttgcaagcacatcgcctttcttcacaggatccgcaaccttctttgagaaaacaagtccaaccgttggatcgatcacactttccttcgtttctcttcctccaccaaggatcaaagagcagattcccatttcctgtgcatcaatacttccgacaaatccatcttgttctgatcgtatttcttctataatatctgcctgttcaaataactctagatgatcaatgtatttcgtatcaccaccttgtgcagcaacaaattgtttgaatttatccaatgctttcccactttgaatagattcccggactctcataagtccttcatcaaaatcctttgctgcaccgccaaggatcagcatatgcgaagccagtgtctcaataagctccacaaaatcatctggtccattgccttttaatgtatcgatcgcttctttgacttccagaatatttccaactgccattccaagaggttcatccatattcgtgatcacagccgtcatcttccttccggcactctttccaatctctaccatctctttggcaagttgcatcgcatcagattcttccttcataaatgcaccgcttccggtctttacatccaacaagatcgcatctgctcctgctgccagcttcttactcataatactgcttgcgatcaaagaaatctgatccaccgttgcggtcacatcccgcaatgcatacaacaatttatctgctggtgcaagatccttcgtctgccccatgattgaaataccaattgaattcacttgttcttcaaacgtatcatcttcaagctgtgttgaaaatcctggaatactctccagtttatcgatcgtacccccagtatgaccaagtccacgcccagacatcttagcaaccgggattccaaacgaagcaacaatcggtgtcaacgccaaagaagtcttatctccaacccctcccgtactatgcttatcaaccttgattccctgaatctgagacagatcaagcatctcaccacttcgcgccattgccatcgtaagctcataagtttcttctttatcaagcccttgaaaacagatcgccatcaacaaagctgacatctgataatccggtatcctgccatctgtgtattcacggatcatccattgaatctcatctttcgtcaaaggtttcccttgtctcttttttagtatcagatcatacattctcatagattcggcctcctttgctttttgttgtatatagtataacacaaaatttgtaggtaggcttacgtgtatgtgacagaaataaaagaaaaacaaatatttgaaagaatcaggtggcaactccgcatttttgagagcgttttttacaaatcgctgatccgtgcctgttcctttggaaacttcctcgctgcgagccaaaatgcccgcagcaacggtcagacatccaaccacaggcactgcgaatttgtaaaaaacgcactcaaaaagtgctcatgtttgccacctgaattctttcaaatatttgtttttcttttatttctgtcacatacacctgaagtctattcaaaccacaacacagtgtatatgttatacggtattggtatttataataaacactgtctaccactacaaaaattgaaaaacaataacatttaacatacacacccactcaagttttccaatcttgtaattgcccacactttagacttcaggtatatgataaaaaataaacaagcaaccgaaagtgatgcattggaattttgccatattttgaataaattcgcagcccaattggacgaatg

SEQ ID NO: 777 - DNA, 1065 bp, Unknown
  gut microbiota DNA sequence
ctccagagcgagttttcgtaggaaattgggcgaatcagcgatttgttcaaaatatgagcaaaattccaccgcatcgctttcggttgcttatttattttttatcatatactcgaaatctacagttggccaacttacaaattaaaatttcttcttccgattcttaagcagcccaataactaccacaattgctgccatatcaatcacaaacataatccattttcgtgttttaaacgtcgttttttcttctatatcatctaccagacttgttttatgatccatttgttttagcttctctgaatttctaatctcttcaatcgttaaatatttcttcatattccacctcgcatcataaatctttttgctttggtaataaactttacttccatctgtgttacaggagaattttttcatcattccatctgtgttaacgaagtattttaacataatactttggacatccggatttttattatatgcttttacggctagtgtctgataatcatcactgtctgtttcatataacccgttggaaatggtccatttcccttttgtcttctttaatgatgcaatcacatgatctccttcttcaaccgttgttttctcatgataggatgacgtatattttatattttcattcttcatgatgacatatcgatgatcttccgttctttttgcaattgcttctgatgttgattctgtgttgatataatcctttgcacttaaaacaaaatagttatctgaaacataagttacagatcccacaaacaaaacatcttgatttttattgttcatgatcctgttgatctctgtatctgcggatacgaactttatatttcctagcatcatgaagaggcagataaaataaactgttatacgtctcatcctgcaatgcacctccttatgttgttattatacatcgagcggtgttgcgaaatataacggaaaatgtgaaatatacttatgattttcttaaattctgatttgtaatagtgtttcatgtatgagatagaaataagataagaacaaatatttatatctcatacaacggaacgctattcaaatcac

SEQ ID NO: 778 - DNA, 534 bp, Unknown
  gut microbiota DNA sequence
tatgatgcagacagcaggaaaaatatatccttatgctaaacatgtaaatacagtctgcaatgacaaaatagataatattcctcaagatttcaatggaaaatttgttgttgaagaaagttactatgagaccaatggtaaacgtcatgcatcaccgcaccttttccttattacggaaaatgaagatggaattttactttcctcctatgagattccggaaggagaagacaaaaatacattttcatatgattctatgaaaaatgttgattatagtgaactgaaaaaatctaaaaagtttactccggcactttatcatgaaaatgatggcatctgggagggaggcagcacaagtcagttttcgccagtaatgacatttaagctttgggaaaagttttctgatagttgtttggaagtatctgaaattatgaaagttaacggaaagcggacttttggatacgatgatcccattatttacaaacgtgtataaataagtgatgaacatggtgacaactttcagtttgtcggaatcttaataat

SEQ ID NO: 779 - DNA, 958 bp, Unknown
  gut microbiota DNA sequence
atcttaacttaatgacattgatccaaggtcccttctcattttttgcgattttgcatttgcaaactcattcagtgattaggataaaaataactattgtgcctggttcataggaaagacatcagccacttcactgatcacaatataagctttcggatcgatttttcgaatgatatttttcattgtagtgatctgaaatcggttgagaataaaatagatcattgttttatcctcaccagaataaccaccacgtgcagcaagtcttgtcatacctgtctggaattcttttgataaagcatcacaaatatcatctgcctgatctgtcacgatgattgcacattttgcacggtcaaatccttcgatgataaagtcgatcgctttgatcgctgccatataagtcacaatagaatatagtggaaggatccagctttgcaggcagaagccacagatggtatataagatcacattgtaaaccataacaaaagcaccaaccgaaatcccaagctgcttagaaaagataactgctaaaacttcaattccatccatcgctccgccaaatcgaagagaaaatccactggctgttccagtgatcaaaccaccaaatagagaacaaagaagaagatcagttcctgcaagtggagaagcaatgcttacattgatcggaagaacatcttcgatcagccatgcaaagatagaataaatgataaccgtatagattgcatagatcgtaaaaacaggcccctgtttttttaatccatatagaaaaagaggaatgtttagaattaataaaaacatggatagtgaaaaggtggaaggtgttaattgtccaagtaacatagaagttccagagataccagtatcatataattttaccggggcaagaaagattgttacaccgatcgcgttaatgataccagcaaaagtgagaaccagaaagtttcgtcgttcaaagtcagataaa

SEQ ID NO: 780 - DNA, 331 bp, Unknown
  gut microbiota DNA sequence
cagtcacagatttcaaaaactggcttacttctttaacagaatataaaaagcatccagaaaagtatctgggtaagcctaagatgcctcgctataagaaaagtgacctgacgactgtgatcatcacaaaccaggatgctgtcttgtatcgggacgatatcgggatgtccttaaaactgcctttgcaaaagcaacgcttgtacttttcaaatctttcttcggatcctgtattaaaagaagtcaagatcaaaccgtattatggtcgttttttactctgtctgacactggaagaaccagatgttgcatttgatccttctggatctcatgtatgtgc

SEQ ID NO: 781 - DNA, 73274 bp, Unknown
  gut microbiota DNA sequence
aactaaagttacatccttaacccttgaagctgattcccatgcaagatcttcaaatgctcgtttctcaacattcgtaatatccactggaacagcgatcataagaccggttttcctgatccgtttgaaataatggtccaataccgttcctaacagatatctcatattcgtataatctgagatcacgccgtgttccattggtttcactacatgaatactgtatggctgtttctcatacatcgcaaatgcttcgttgccgaatgcttttagtttcgcatcttcatcaaatgcgatcatattctttatctttaaaaattcttctttatctcttgtacagattcttaaatgtctggttccaagttcaattcctagttgtgccgttttcatgttctgctccttacatcatgtgttcttctcgaaaacttaaatatgtctggtctccgatgataatatgatcacatagcggaatcccaagaaattctcctgcttctttcatccgcttggtcgtcagaatatcctggcggcttggcgttggatctccagatggatgattatggatcataagtacggaaaccgcttcgcatcgaagtgcttccagaaataattctcttggtgatgccactgtctgattcactgtaccaacagaaaccgtaagttcctttataactttattctttccattaaaaaaaattaaaatcatctcttcccggcttaaatgccgcatccgttccatataataatctgcaatggatactggtgaatgaaagcttatcttatcttcgactttcgcacttgctaatcgtttagacaattctgcaatacacaagatctgcatcgcctttactttcccaatcccgggaatcttttgtaattcttctcttgaagtgtggcaaattcccagtattccctcataaaacggatcgatcgacaacactttcgttgcaagatcgatcgccgtctgatcctttgtcccacttcttaagatcactgccagaagttctgcatctgacagcattgctgttccattcttttcacacttttcataaggtctttctgacactggtaattcctttaatgtctgatgtttttcttccatatctgatcctttctgtcgaaaaatctccatggtcaaaacatttctcacattaaatcttaccataacttttcactgatgtatagaaatcaaaccgttgttttccttaaatttttcttattttattttatgaaatctctggaatttctaccaaacctttttctgccattcgctgcagggacatgatgattccatatttggcatgtggatatgtaagacctccctggaaatatactgcataaggctctttcattggtccatcagcacttaattcaatggatgcgcccgatacaaatgttcctgctgccatgatcacctgactatcatatcctggcatatcccatgggattggtgttacatgactgtcgatcggtgatgctttttgaattccctcgcaaaatgcgatcaatttttcaggatcatgaaattccactgcctgaataatatcatgtcggtcttcttttccatctggaatcactttaaatcctaatttttcatataaattggctgcaaagatcgctcctttgactgctgcattgacaaccgttggtgccataaagaatccctggataaactgacgattaactccaagactggctcctacttcttttccaagccctggtgttgtaagtctgtatgcacactgctcgatcagatcgcttcttccacagatgtatccaccgatcggtgcaagtcctccacccggattcttgatcagggaacctacgatcatatcagctccaacttccgatggttctttttcttcgacaaattcaccataacaattatcaaccattacgatcaggtctttattgatctcttttacaaatgcgatcgcttccccgatcacatcaacagataaggttggtcttgtcgcatagccttttgatctctggatatggatcagttttgttttgtcattgatcgcatttttgatcccctctaagtcaaagcttccatcttctaacagatcaacctgtgcatatgtgatcccgtattctttcagggaccctttggattcacggattccaatgacttcttctaaggtatcatatggttttcctgaaattgcaagaatctcatctcccggacgtaagtttgcagataatgcaagtcctaatgcatgtgttccacatgtgatctgcggtcttacaagtgcatcttctgttccaaaaacatccgcatacaatgcttccacagcttctcttccagaatcattgtatccatatcctgttgtgccacccagatgcatttccgcaatctgatgtttctgcatcgcatttaataccttgatctggtttaactgtgcgatcgcatctaacgtttcaaaacgatcttttaatcccttttctacttcctgtgcatagtcgaagactttctcatcgacgcccatttctttataatagttctttaactgatccatcatagatccccttttcttttaatattgtaagcatatatgttaaaatctcatcttctgacccaaattgtgatttatctaccatacagacttccttttctcttccaaaccaggtcagctgacgctttgcaaaatgtctggtgtctttcttgatctgttcgatcgtatcctccaaagaaagatttccttctaaatactcaaacacctgacgatacccgattccctgcatggaaaccattgttttttcatatccttcttcttttaatcgttttacttcatcgatcaatccttgttccgccataatatcaacgcggcgattgatcctgtcatataagatatctcttttgtggtttaatacaaaataagcaaaattatatggtgaggtctttgctgcttccttctcattatgctctgagatcggatatccatttaatttataaaattctaatgcacggatcacccgctttacattatttttatgaatcttttctatagattttggatcgacttgttttaacatctcgtataaactgtcgtttccttctcttttagctttttcttccagttgttttctgtattcctggtctccatcttcttttgtgaaatcaatatcatataaaagactttggatatagaatcctgttccaccaacgattagtggaatcttgccttttgcatagatttcctttagggcatcttttgccatctgctgaaatctcgctacatgaaattcttctttaggatcaagttcatccaccagataatgcttgatcccttccatctcttccggcatgatcttggcagttccgatatccatcttcttataaacctgcatagaatctgcggaaatgatctctacatctaaaatctttgctaatcggatcgacagttctgtttttccaactgctgtcggtcctgttaaaattaccattggtttcatctatttaaaatcctttcggcataagttctgataatcgatatgtttcaaatccatctgggctttgacagatcactttcagatctggattgaattcatgtagaaactggcggcagattccacatggataaaccgtttctttgtcactgccattggatgcgatcgcgatcatttcaaagtcatgatatccttcactgacagctttgactgccgctgttctctctgcacaaatggctgctccataagaagaattctccacattacacccggtgaatacttttccttctttggtaagaattgctgctcctacttgaaatctggaataaggtgcgtatgctttctcttttgctttatctgcaaaatctaataattcctgatctgtcatagtcttccctccttgtctggtttcactatacgattctcttaaacttcttgtctatctcatacttactcatcttgatgatcgttggtcttccatgtggacactggtatggattttccagcttcatcagttcatctaaaagatgttctacttccattaacgatactctctgatttcccttgatcgacatcttacatgccattgtcgcaatctttgatgcgatcacttctgtatccaaggtaccattttcttgacttaccgcatctaaaagttccataaataagtctctttccccgatcccatagagattggctggaacttcccggatacaatattcattccctccaaaagattcgatcgtaaatcctaaacctgcgaatgcatctttgtatcttgttaacgcttctgcttccgtcatagaaaccgtcacaaccattggcggttctaatctctggctgtatatttctttttctttgaaattcttcatcagcctctcataattgactttttcatgtgctgcatgctggtccatgataaataactggtcttcgtactcaataagccaatatgtcttaaagagctgacctaagatcttgcggtcaggtcttgcctgaactgaaaatactggatcttctcttagtgtcatctgattgctgcttaattcatcggtcttgtattgtggaaattcttttttctgagtattgtagtttaagcctgcataagtcggtttctttgtattttttgatgattcgctggctgttagtgttttctttacaggatgtgacggcttttcaatctgttgttgtacagcttgcctttgcttttcaacctgctgttgtacaccttgcccttgctgatctaccttctgaacctcttctttccttcggtttacctcaaatggctcaggctttttcacttcttttgtcttcggcaattctttcttcttcggtgtctctcttaatacatcctgcaccagatctttctgaagtaatgccgctctgactgcatctactacaagctcgtagatttctcttccatttcggaaacggatctccatctttgtcggatgaacattcacatccagcagttcctgatcgatcttgaaatcaaggcacacaaatggatatctgtgtttcatcgtaaaggtgcggtatccttcttcgattgccttgtaaatgatcgagcttttgatatatcttccattaataaagtaactctcatagtttctgtttcctctggaaacatacggttttgcgacaaatcccgtgactttcacatcttcattttgtgcttctagcgggatcaatgctcctgccacatctcgcccataaatatgatagatgatgtcctttaccttaccatttccagaagtataaatcttatttttattgttatggataaatttaaatgaaatttccggatgacttagggcaatgtgtaccatcatctgttctacataccctgcttcggttgtcgcactctttaagaattttcttcttgctggcgtattataaaacagattctttaccagaaatgttgttccatcgggtgctccgatatcgtcaaaagcttcttcctcgcctccatagatcttataggatactccactgaagctttctgcagtcttcgttaccagctcaacctgtgcaactgcgctgatacttgataatgcctctcctcgaaatccaagcgaagatacacttaacagatcttcaaccgaacggatcttgcttgtcgcatgacgtaaaaatgcagtctttacctgatcttttggaattccgatcccattgtcagttaccctgatcaatgtcattccgccgtctttgatctccacagtcactgcatttgcttttgcatccactgcattttccacaagctctttgacaacagaagctggccgttcaataacttctcctgctgcaatattatcgatcgtcttttgatctagtaattgtatcttcgccataaaattactcctcgttctttaacttctcctgtaacacatataaataattcaacgcttccagcggtgtcatgtcagaaagatctttttctcttagttctgccataaatggatgttccatcgttggttcatcgctttctctgaagaaacttaactgttgtgcctctccatatggcatgatatccttcgctcctgacgtcagatcatgttcttctaattctcttgcgatctcttttgctcgattgatcacggcatctgggactccggcaagttttgcaacctgcactccataactcttatctgcaccaccttttacgatcttacgcaggaacacgatgtcatctccctgttctttgacagcaatgcagtagttatgtacactgtcgatcttaccttctaactctgtcagttcatgataatgtgtcgcaaacagagtttttgcaccgaggagcttggaattgctgatatattccacaactgcccatgcaatggacaacccatcaaatgtactcgttccacgtccgatctcgtctaagatcaacaaactgtttttcgttgcatttcttaaaatattggcaacttcactcatctcaaccataaatgtactctgtccagaagcaagatcatctgatgctccaacccttgtaaagatgcgatctacgataccgatatttgctttcgccgctggtacaaaggaaccaatctgtgccattaatacgatcagggcaacctgcctcatataagttgatttacctgccatgtttggtcccgtgatgatcgctacacgattcttcttgttatcaagatatgtatcattagaaataaacatatcatttggaatcacctgctctacaaccggatgtcttccatccttgatatcaatcgtccctctgacatttaacttcggacgtacaaaatgattgcgttctgcgacatatgcaagggaggcaagtgcatcgatctgcgcgatcacattcgctgttcttgagattcgttccatctctcctgctaatgtttcacggatcataacatacgtttcatattctaacgcatacagacggtcttcggaacccaggatcgtatccgccagctggtttaattcttcggttgtgtaacgctcggaattggccagtgtctgcttacggatataatgatcaggtacaagatctttgtaggaatttgtcacatctaaatagtacccaaatactttattaaacttgatctttaagttcttgatccctgttttttcacgttcccgttcctcaagttccatcaaccattgctttccttctgttttagcacgttttaatttgtctatatcttccttgaatccttccttgatgatcccaccttctttgatcgcaagcggtggttcttcaatgatggaatcttccaaaagattgtggatatcttccaatggatctaaatcttctcttaatccagacaataatggatctttgcattcttcaagaactgttttgatcgcaggcagcaattccaacgatgttttaaatgcgatcatatctcttggattcgctgtcttataacttacttttgtcattaaacgttccagatcatagatcggatttaagtattctcttaattcttctcttacgatcgtctgatccgtaagtgttgtgatcgcatcgtatctctcttcgatctttttcttgtccaccaatggctgctcaaccatgtttcttagcattctggcacccatggctgtttttgtcttatctaatacccataagagtgacccttttttttgtttatcacgtaatgtctcacaaagttccaaatttctacggctggagctgtcgatgatcataaattcacttgtctcataagcttcaatatgcatcagatgatccagagaactcttctgtgtctcatgaagatatccaagcaatgcacccgttgcgatcactcccattggatgatccaaaagtccaagaccttctaaatttcctactttgaactgacgcttgatcctttcctctgcctgttcttcatcaaaatggtatggctcaatgcttgagatcacgatcgacatcttgtcttttaagtaatcaaaatccatgccactgatcaaaaatgcatcattacaaacgatctctgccggctcgaacttgaagatctcatctctgactttcgctaaactatccattgatgttgttctaaaatcccccgttgtaacatcaacaaatgaaattccgtaacttccatcatttgcaaaaatacacatcagatagttatttttctcatcatcaagactctgctgggaaatattcgttcctggcgttacaatacgcacgatctctcgttttacgattccctttgcctggcttggatcttcaacctgctcacagatcccgactttatatcctttttctactaatttatttaaataggaatccacagcatgataaggaacgccacacattggtgcgcgctcctcaagtccacagttcttccctgttaatgtgatctctaattctttggatgctgtcagtgcatcatcaaagaacatctcatagaaatctccgagacgataaaataagatacaatctttattctcttctttgatctgcatatactgctgcatcattggtgtcagttttccttttttagccatggatctgctctcccatataatagaaacctttttcctcaactaatttaacatctgccattgtaccaatctgttctttgcatcctttaaaatgaactaacaggttattttccaatcttcctgttaacattccttcttcgtgcgtattctcttcttcgatcagaactctctcgatatctccgactttcttcttgcaattctttgcagatgtctcttttaataaggcaagaagtctgtcaaaacgatctttgatcacatctttgtccacctgatcttccatgctcgctgctggtgttccagaacgtttcgaatatacatatgtgtatgcactgtcaaatccaacttctcttacaacatctaatgtctccttgaaatcttcttctgtctctccagggaatcctacgataatatctgttgtaaaagacactccagggattctctcctgaatcttcttagcaagtgctacatactgttcttttgtataatgacggttcatcaattttaacaaacggctgcttcctgactgcattggaagatgcatatgtttacatactttcttgcttgttgccatcacttcgatcagatcatccgataaatcctttggatgtggtgtcataaaacggattctttctagtccttcgactttctctacttctcttaataattcagcaaatgacattggttcttctaatgtctttccataagaatttacattctgtccaagaagcatcacttctttgacaccttctgatacgacctgctttacttctttgatgatatcttctggcttacggcttctttctcttcctcttacatatggcacgatacagtaactgcagaagttattgcatccatacataatattaactccacatttgaatgagaatttacggtcacttggaagatcttccacgatctggtctgtatctttccagatatcaacgatcattcccttggagtctactcttgcttttaataattctgctaatttaaagatattgtgtgttccaaagatgatatctacaaatttatagcttgaacgaatcttctcgatcacatgctcttcctgcatcatacatccacataacccgatcatcatctgtggatttctctctttcatcttcttaacctgccccaaatgtccatataactttgtattggcattctcacgaactgtacatgtattaaagatcagaaagtctgcttcttctgtttcaacttcttcatatccgatcgtttctaagatccctaataacttttcagagtctttttcattcatctggcagccaaatgtggttacatggcatgtgagcttccttcccaattctccagactttttctgaacccattttttcatttcttccatatattcatactgtcttgacgactcgttctttaactgttccattctattatttctcctactttatataattcatctctatttttacagtatctttgattataacatgaatgttctgcttagacaattttaattttgtggcaactactcttcaaccaaatttttcgatatttttcttgtcacattgcttcgtttaaagtaaaatataagtaatatttatgttaagttattgttaagaaggagaactatcgtatgaactatactatcatacttgctctgatgggaggccttggcctctttctttatgggatgaaactgatgagcgatggacttgagaaagctgccggtgcgaagcttcgccggattcttgaaatatttactacaaaccgtttaacgggtatgttagtcggaatcttttttaccgctgttattcagtcctctagtgctgctactgttatggtagtcagctttgtaaatgcagggcttatgaacctgtctcaggctgctggagttatccttggtgctaacattggtactactgttacttcccagcttgtttcttttaacctttctgagattgcccctgtctttttaatggcgggtgttattatggtattatttatgaataatcctaccgtccagaaagtgggagaagttattcttggatttggtgttttatttatgggattaacttccatgtcaagtgctatgtctgtgttaagggattcacctttgatcacatcttaccttcagacactggataaccatttccttggtgttttatttggatttatcatgactgcgatcttacagagttcttctgttactgtaagtatcgttcttttgatggcatctcagggattattacatcttccaatctgcttctttattattcttggatgtaatatgggatcttgtgtgtccgcattgcttgccagcttaagtggtaacaaaggtgcaaaacgtgctgcgatgattcatttcttatttaatatatttggaagtatcatcatctttacaggacttagctttgcacttactcctatcacaaactttttcttaagtatttccggtggaaatcttggacgaagtgttgcaaatgctcatacaacatttaagatcattgaagtattatttatgttcccatgtacacctttagttgttgcattaacagagaagatcatccgtggaaaagatgaaaaagttcaccataatgaactgcagtatattacagagatttccttaaaatctcctgcaacaatgatccctcaggcgaagaatgagttaagacgtatggctaatatggcacaggagaatttagaccatgccatccacggatttctaaatcaatccgatgaatttgttgataaaatctatcatcgcgaggaagatatcaataatgtcagtcatgcgatcactgattatctggtaaagtccaaccagctatcactgcctttagccgatcagaagatcttgggttccatgttttatgttgttaatgatatcgaacgtatcggtgatcacgcagaaaattttgctgattttacaaaaacagagatcaaacataacactggacttactggagatgcaaaagaagagatcaaaaagatgtacactgctgtttccaaactgttaaaactttccctggaatgtttcatggaacaagatggtgtcaacaaacctgaagaaaagcttgctgagattgcaattctggaagcttcgattgacaaaatggaacgcagatatcaaaaacaccatatcaaacgtcttgccaaaggcgaatgtgagccaagagctggtttattgttctccgatatgctttctgaattagagcgtattgctgatcatagtgtgaatattgcttattccatgagtgatgaagatgaagatgaaatacttgctgctgagagtgaagccctcactgctaagaattaaatttgagttgaacctagaatataagaaaaggatctgcaaacccttttgatactttatgtatctttgatctgcagatcctttttcttttttgcttttataactctatcactttataatctataggtgctacatttgccttgatcacagcgttgctcaagttctttaacagcgcctgtaatgcattctcatttacaccttctttgaccttgttgagatctagattgatctcttcttttttcatcgtcggattgacgagaagtaatattgctttgttctcacttgcttctccaaagacatcttttttctcactgataaatcttaagatcgcaaggacattttcagtcggtgccatgtataatgcatatcctgtctgtaagactttttcccggtttctaaggctagtcagtctcaaaacttcctgataggtttctttgtcattttcaaaaaatgctcctcggttaaatgggtccatcagtccatgcattccatattcgtctccataataaatgcatggcattcctgggacaaagaactgaactgccattgcaagtcttgtgagtgcttttcctttctgatccatctttgatgttataacatattctgcctgctgctctctcgatggcagattctcattcattccagttgcaagtgttgtccgaattcttggaatatcatgagaagataacaggttcatcagtgcataatacaatggttttggataattacactgctgggatatcaagaatgtcttcatatctttggcactttgattaccgagtaaataatctgtaacgttgactttcagcagatagttcattgcgctgtctaagcctttacccaaagcatatttacgtttcgttccgtaactttctttggttgtgacatcttcccatacctcaccgatcagtgtataattcttgaatttcttctttaattcacttcgcaatttaaagataaattcatctggaagttcgtctgcaacatccagacggaatcctgatgctccaagttttaaccaatgcttgatcaccgaatcttctcctgtgataatgtaatcaacaaacttttcatttaattcattgacttccggcagtgtttcaaacccccaccagctcttataagttccatcttcgttaaagtcataccaatcatagtactttgactcttccccttgatatgcccctggttcttcgtaatttccctttttgttaaaatagacactatcatccccagtgtgggaatataccccatccaagatcacatgaatcctgcgttcttttgcaagctggcatagccgcttaaaatcttcgttatttccaaggaatggatcgactttcttataatctgatgtattatagcggtggtttgatgctgcttctccaatcggattcagataaatacaactgatccccaatcgtttcagatcatcaagtttggatatgattccctcaatatctccaccaaaataatcacatggatcataaaattcttttcctggaagtggtccaaatactggctgttcttcccagtcatcatgcagatagaccgttcttcccatactttcatgatatgctttcccacgtttcatattttctttgtttccctgacagaaacgatctgggaaaatctgatacatgattccttttgacatccaccttggggtatcgaaatcttcttcatatacggtaatctgaaaactatccgggttgtcatcaacgatcattccttctccttgtgtcttcccatgtctggctccataaaaataacatttcccatgttcccagattctgaaataataccagacaacacctgcttcactggtcatctttatgtgttcttccatgcagtctttttttcgtttcatctcatactcccggtgaaaactttcagaatacatgatgatctctgccttattgacttcctgccctacatcatacaggcggatcatcatctcgcttccacatgtgactgcacctacgggagttctgtatttttctattgacgcgttatgaatcataatttaatctcatcttttttgtaactcttattttactggtttcagattccagattttttcattatattgctcaatcgttcggtctgatgaaaaatatccggattttgctgtattaacaactgcttttttgatccattcatccttatgatcgacatacaaatgatatactttttcatatgtttcaatataagacggaaaatctgcaagtatgtagtatggatctgcctctccatattccccaaataaaagattctggtaaatctctgaatattttctgtttccgtatcgtaacagatttccttcgatcagacaattacatacatcacggattcctggatgattctcgaaaataatccctggattgtatgtatggtacattttttattgtaattaccctcagcgctgtccccgaagataaagatattctcctgacctacacgctctgcgatctctatattggctccatccatagtgccgatcgtcaatgcaccattcatcataaatttcatatttcctgttccagatgcttccattcctgcggtagaaatctgctcactgatatctgctgccggaatcagcatctccgcaaccgatacacaataattttctacgaaaaccacctgaatctttccgtccatatctggatctttattcaccatttcctgaatggaatggatcagccttatgatctcttttgccctggcatatcccggtgctgctttcgccgcaaaaataaatgtgatcggtgttgtaatacatgctggatcttttttgatcttctgatatatataaatgatatgcagacattttaacagctgtcgtttatactcatgcaaacgtttgcaatgaacatcaaaaatagattctgggttcacttcgatcccttgcttttctttgatatactttgcaaaacggatcttattatttcgtttgaccttctcatattttttacaaaattctttgtcatctttatatggaaggatctgttcaaacagacggtaatcctttaaaatatcccctttcacatactctcttaccagatgatatagcccctgattggccagtgctaaccagcgtctgtgtgtgatcccatttgtgatcgcaagatatttttgtggaaagatctgataagatcctttaaaaatcctcgtttttaaaatatcagcgtgaagatttgaaacaccattgatcctgcggcaaagagctacgcataggtttgccatgcggatctcattgtttccgatcactgccatctgtgcgatcttttcttcttccttgctgtaatatacggaaagtttctgacagtatttctcattgatcgcgcaaatgatctgatagattcttggaagcagtaaacgaaacatattctcatcccaacattccattgcttctgtcatgatcgtatgattcgtataatgaaatatcttcttgaccataccatatgcctcatcccatccaaaatcttcttcatccatcaagatcctcataagttctggcatcgccaatgccggatgtgtctcattgatctgaatgacaacatgttctggcaaggagttcagatcatcaaatactgctttatgtctcttgatcatcgactgcatcgttgcagatgccagaaaataaaactgttttaaacgcagcattttaccctgcatatgatcatctgacggatataagactttcgagattgcttctgcaaatgtctggtctgccatcgctttatcatagattccttcattaaacgaatgaaaatcgaaccgccgcttgcttctggcactccacagacgaagagttgctggcgtcttagtcttgtatccaatgatcggtacatcatatgggactgcaatgacggtattataatctttatgttcaatctttaatccattctctgtccagttttcctgaatcgttccattaaaatgtacttccacacttaattccgggcgctcgatctcccaaacatttccatctcttaaccagtcatcttccatctcaatctgcgttccatctacaattttctgacgaaacattccatattcatatcggatcccgcatccgagtactggaagttccatcgtagaaagtgaatccaaaaaacatgctgccagtcgtcctagtcctccatttccaagtcctgcatcattttcttcatccgtgatcttatcaaaatcaagtcccatctcccagaatgcttcccgatatgcctcatataatccttgattgatcagattattagaaaatgcccttcccatcaaaaattcgactgacatatagtaaagtttcttaactccttgctcttgtatcctttttctgctgtctgcccaggatatcatggtatcatccctgatacactccgctgctgccttatagatctcatcatttgttgcctcactgatcgttcttccaagtgcatgaattaatttattctcaatccgttgtccgatcttattgctgtccatatagtccattgtgatctaagcctcctttctagtctttatctttgacctgtaaatttatctcattttttgtctttatgaagaatgggcatcttaaaataagatgcccattcttcttttgaatttataatacactattatacatatcaagataaatctttgcagattttgcaaaactgttatcggattccatcgctctttggatcaatccatgttttctctttggactctgcaatgtctgtaatgcataacggattgctcccagcatctcatgtgcattgtagtttgcaaatgagaatccatttcctgtgtcctcgtattcattgtaactttgtactgtatcacgaagtccacctgtctcacgtacgattggaagtgttccataacgaagtgcgatcatctgagagattccacatggttcaaatttggatggcattaagaagagatcacttcctgcataaatctggtgtgcaactgcattatcatatgcgatatatgagcatactcttcctttgtatttttcttccatgtaacggaaaaattcctcatattcataatcacccgttccgagaatgacaaatgcgacattctctgtacacatgatctcatccaacatgtatttcacaagatccagacctttctgctctgttaatcttgtaaccataccgatgatcggaactcctggtgtgatcgataatccaagagccttgatcagttcctgtttatctttcttctttccagaaagatcatctttgttaaaatgatatggaatcaatggatctgtctctggattaaattcttcctgattcattccatttaagattccccatgtatctcctgctctcgcatttaagataccttcctgacggtatgcaaatgctggatcacgaatctcctgtgcataagttggacttactgtgcttaaacgatctgcaaacacaagtgctgctttcatgaaacttgcacattcatagttatgcataaattctggtgtgtcatactttggatcgattcctaaccaatgttcaaactgatcgaaaccaaattctccttgatacatcatattatggatcgtaaagatcgtctttgcatgtccaatatcccaatgtccgtactgtgtgcggagtaagataggaatcagacctgtctgccagtcattgcaatggatgacgtctggaataaatccaatacggcttgctgcttcgatcacggcacgacagaagaaagcatactgctctccttctgcaagtccaccacgatataccgcatcaccaaaaaatccttcattatcgatcagataatatgtaacttcattataaaccagttcttctacacctacatatgtttccccaccactaaaattgatgttgaaatctgccagatgtcttgtctgtgcgccatatttccctttcatctgactatgaaacggcatgatcacacgggcatccgcaccgatctgattcaattcctttggaagggttcccataacatccgctaaccctccaagcttcacaaatggtgcacactctgcccctgcaagcagcactttcagtgaattgttattactcattaacacttgctcctttcggaataaatactggatggtttgatgatcctgataagtgtgcatttgaataaacttttacgtgtcggtctaaaattgtatggttgatctctgcctgtggtgcgataaatccttctgccataacaacagaattcttgatcacagctccctctgcaatctgtgatccacggaagatgacagagttttcaacttcaccatcaatctcacatccactactgatcaggctgttgctgactttcgcatttggtccatattttgctggtgctccatcggcagattttgtgtaaattcttctattacccaagaataattctttgtaaacatctggttttaacatatccatatttacattgtaatatgcttctaaagatgtaatacatcctacatatcctttatattcatatccctgaattacaagacgatcgaagtttggaacgataacatcaaagaaaaagtgtttcttattatgtgcgatcgctgtctcaataaaatcgatcaataatgttgtcttcatgatataagcatccatgctcttcttatttgaacgatgttttccttcagaatagcacatatcaagaactttatcgtcttcatctgtttttaaataaactccatcataatcgcagttcgttgaatcatcactattatcaaaatacatcagtgtgatatctgctccagatttgatatgtttatctaacatatcctgaaaatctgcattacagatcacataagaacgtcctaataatacatatttttcttttgctttctttaaaaatccaagtgttccacgaagtccatccataacacttgcgtattctccggatggagatgcatcattaatatatggtgggaagatatataatcctccacgttttttgtttaatccccagtcttttcctgaattcacatggctcaacagtgaatcgtaatttcttcttgttaataatcctacattcttaatccctgcatttaccatattacttaacataaagtcaactgtacgataacgtccaccaaccggaagtgctgataaacttctggagcgtacaaggtcttttaattttctattttcttctcctgcattgataatacctaacatctgtttatccatatcttcaatcctcctagtgtaagatggtatctgggtagatcattgctccgtcttcaacagtcgcattctctaatgcaacacaatgatatccgattacagttacattatttccttctccaaccttgcatccctgctcgatgactacttcttcatcgatcagtgctttgtcgatctgacagtctgttcttacaacagtatctttcatgatcacactgttcttaactacactgccttttccgatcttaacaccagaatggatgacacagttctctacttcaccttcaataacacatccatcggcaagaatagaattcttaacagatgcacctggtgctatataatgaggaggtaatgagaagtttcttgtgtagattctcatcttatcatcatttaagtcaatctgaggattttcatccagaagttccatattagcttcccataaactgtcgatcgttcctacatctctccagtatccatcaaatgagtaagcatacatctttcttccatcttctaacattcttggaataatgttcttaccaaaatcgtgttctgactctggatcatttccatcatcgatcagatactgacggatcagtttccatttaaagatatagatacccatagaagcttttgtactctttggttctgctggtttttcttcgaattcataaatacgttcatcttcatctgtattcatgattccaaaacgttttgcttcttcataagttacattcagaactgagatcgtacaatctgcacctttctctttatgatactgaagcatcttgtcataatccatggtacagatctggtcaccagataatacaatgatatgatctggatcaaaattatcaatgaaatttatgttctgataaatcgcatctgccgttccacggtaccagttacctgtttctcccttcatatatggaggtaaaacataagcacctccgtttaagctgtcaagatcccagaatcctccagtaccaatatatgcatttaactccagtggttcatactgtgttaaaactccgactgtgtcaattcctgagtttgtacagtttgacagtgggaagtcaatgatcttatattttccaccataggatacggctggttttgctttcttctgagttaatgcgaacaatctgcttccttgtccccctgcaagcagcatcgcaacgatttcttttttgttaatcatagctctttgtcctcctttattttacaccttgatcattattcttttttgttcttcttgtcttgcttgttcttttttttggctgttcctcttctttctctgttgtttgctttgttacctttatatcttcttttttgggagtgtctttcttagtctccggcgcctcttcttttgttactttctttgtaacttccggctttttctctactgttttcttcacagcttctgttttcttctcctgtgctgccttctttgctggctctgctttctttgcagtggctttctttgccggctctgctttctttgctacactctttcgtgatttcgtctccacttcctcaatcttatagtaaacaacacttaatggttttaaggaaatttctgctgcctgttggtaaacagctttctttccttcagatggtactttcaccctcttcgttgaaactttagattcggaaacatccccatctccaccaaaatcaagctcactgctgtctaagatcttcgtaagttttgatttctttggtaatggtaccttgtatttatcccattccatcggtgtaaaattgcagacacaaagaatctgttgttgttttcttcctctgcccttcttattctttcgtataaatgctacaacactgtggtctgcatcacgttgcaagcaccattcaaatcctgctggatcctgatctaattcatataatgccggttcagatttgtaaatctcatttagtttagctacatatttgtggaaagaatcatgcatctcatactgatcgatcaagaaccagtcaagctgttctttgtctctccattctacaaattgggcgaattctccacccataaataataatttctttcctggatgtgccatggtaaatccatataatgttcgcagtgaagcaaacttctcatcatatgcaccatacatcttattgatcatagaacctttgccatgaacaacctcatcatgtgaatatggaagaatgtaattctcactgtaagcataatccatagagaaaatgatcgctccatgattatccttacgatacaatggatcaagttccatatagtaaagagtatcatgcatatatcccatattccacttgtaaacaaatcctagtccttccggatcatcaacatcacttgttacctttggatatgctgttgattcttctgcgatcgtcaagaatccctcatgtgttgtacgaagtgcttcgtttagattgcgaaggaagtcaactgcttcatagttgatattggttccatcttcattcggcacatattctccttcctgtttcccaaagtcaagatatagcattgcagatacagcatcaatacgaattccatcgatatgataaacatctgcaaagaacatcgcacttgagatcaagaagctctgtacttctggtttcccatagttaaataataaagttccccagtcaggctggcttcccttccttggatcctcatgatcataaatatgtgttccatcaaacattgccagtccatgctcatctcttggaaaatgtgctgggacccagtcaaggatgacactgatccctgctttatgtaactcattgatcatataattgaaatcttctggtgttccatatcttgatgttacaccgtaatatcctgttacctgatatccccaagaaagatcatatggatattctgtgatcggcatcagttcaacatgtgtatatcccatctctccaagataaggaatcagcatgtccgcaatctcacgataattataaaattctctctcttcttcctgcggcattctccatgttccaagatgcagctcatagatagacattggctgatctaatgcctggcgtttcttcctctgattgataaaacgtttatcagaccatttaaaatcatcgaaatcccagactttcgaagctgtatctggtctgcattctgcataaaatgcaaaaggatcactcttatatctgcagattccatcatagccttctacatgatatttatatagatcacctttcttcagtccttcaatctcgatcgtatagatcccgtctttgtcacctttcatcggatgcgcaagaggattccagaaattgaaatcacctacgacactgactgactttgcatttggagcccaaacagtaaatctgtgagtctttgtcttcttctgataatggcatccaaatgtcaggtatgcctgccttgcctttcccgtctgaaacaaatacaaatcctcacgattgatagtttcattcatagtataactcctccttaaaacttcaaaacaaagaattcttgtgattgaatcccacacttacagaaaatcttatcttataagacttctttgtgaaactaaaaagtctaataaaataaaaaagcgtaaacaaccacgaacaatcttcttgcaaatggcttatttacgcttttatagtcatatctttaatttctataggtataataaaaatgtgacacgttgtcatcttacaagatattttcatattcaaagaacaatgtactgtaaatatctttcgtttctagtccactttctggttgtttatctgctgttcaaaaagtgtttgtttcactaactttattataccaaatcttttcatatatttcaacaaattgtacaatatttaatgcactatttatatccatattgtgaaattcatccaagcaatttaatatacagatgtagaatttctcattttaggatcatatcctgcttttttcaaggatttaatgatcttatttttatgttctgtaccgaatgcttccattgtgatcgtaagttctaccgcactatttctgttgatacttacgaactggttatgctctagtttgataatatttccctgtgcatctgcgatcacatcagaaactttatttaactctcctggtttgtctggaaggaatacagataccgtaaagattcgatctctcatgatcaatccatgctgtactaaagatgcgatcgtaatgacatccatatttccaccactgatgatagaaactactttcttattcttaacatccagatgttttaatgctgcaattgttagtaatccagagttttctgctaacatcttgtgattttctaacaagtctaagaaacatgggatcagttcttcatcttctactgtgatgatatcatcaaggttttcctgaatatatggaaaaatgatctttcctggtgtctgtactgctgtaccatctgcgatcgtgctgacatgatcacatgacactacttttcctgcttctaatgaagctttcatacatgctgctcctgctggttctacaccgatcactttaatctttggatttaacagtttggcaagtgttgaaacacctgttgcaagtccgcctccaccgattggtacaaggatgtaatctacggttggaagttctttaaagatatccattgcgatcgttccctgccctgttgcaaccgttgggtcatcaaatggatgaacaaatgtatatccatgttctgctgcaagatctaatgcgtgtgcacatgcttcatcataaacatctccatgaaggatcacttctgctccaagatcttttgttctgttaacctttaacagtggagtggttgttggcataacgatcgttgctttgactccctgtcttgctgctgccaatgcaacaccctgtgcatggtttccagcagatgctgtgatcaatccttttgctttttcttcttcagataatgtactgatcttgtaatatgcaccacggatcttgtaagctccagtcaactgcatgttctcaggttttagataaacatcgtttcctgtctgatctgaaaaataatcacttttgatcagcttggtaggaaggacaacctcctgcactttattatatgcagcttcaaaatcttttagttctaacattttaattttcttctcctttttcgaataatgcattgacaaacatatctggatcaaatctctgaagatcatcaacctgttctccaataccaatgtattttactggaattccaagttctgactggattgcgatcgcgattccgccttttgctgttccatctaatttcgtcaaaataattcctgaaatgtctgttgcttctttaaactgttttgcctgtgccatggcattttgtccagttgttccatctaagacgatcagtgtctctagataagcttcactgtattctttttggatgatacgattgatcttgcttagctcattcatcagattcttcttattatgaagtcgtcctgctgtatcacataacaacacatcgacatctcttgcttttgctgctgctaccgcatcatatacaacagccgcaggatctgcaccctctgcttgactgatgatatcaaccccagcacgatttgaccattctttgagctgttcgattgctccagcacggaatgtatccgcagctgccagtaatactttttttccttgtccttttagtgatgctgcaagttttccaacagatgttgttttccctacaccatttactccaatgacaagaacgacactctttttatcaataaaatcataagcactatcttccagtctcatctgatccttaatagaatcgatcaaaagctgtcggcattcttccggctctttgatcttattttcttttacttttttcttcagatcttcaatgatattcattgttgtatcaattcccatatcactcatgatcaaaatctcttccagctcttcataaaaatcctcatctattccagaaaatccgctgaaaatagagtcaaaacttgaggcaatattatctcttgttttacttaatccctgtgcaagtcttttaaaaaatccttttttctctgacatagccattctccttttattcatctaaatcattctcgatcaaatttacagaaacctgagttgaaatacctttttcctgcatcgtgattccatataaaacatctgctgccatcatcgttcctcttcgatgtgtgatcacgataaactgtgtatcctttgtaagtttatgcagatactttgcaaaccttgtgacatttgaatcatccaatgccgcttcaatctcatccaggagacaaaacggagatggttttaaattctggatcgcaaataataatgaaatcgctgttaaagctttctctccacctgataactgcatcatattctgaagtttctttcctggaggctgtgcaatgatcctgattccagattctaatacatcatcatctgtaagttccaatcttgcttctccaccaccaaataattccacgaatacttcctgaaatactcgtttgatgtctttaaactttgcattaaactgacggcgcatcgcatcttccagttcttccatcaaacctgtcagatgtgcttctgctgtcacgatatcttcatgctgtttctgcataaattcgtaacgttcggaaacttctttataatcttcgactgcattgatattaactggtccaaggttcttgatcttattttttaactcagagattgtttccttaacctttgtaaggctctgcgtctcatccagatcgatcctctgttttgcctgatgatatgtgatctcgtaattctcccacatataatccaaaagctcttttttctttcctttgcgattctctctctgactctccagacgatacatttctttgtcatatccactgatacgttcaagcatctcttcgcgttctttaaggatatccttataaaggacttctttctccttcacttcttcctgcatcttctgatgcctgttctgatcttctatgatctttcgttccattgcttcgcatgattcttttaaatgtccaatctgctgttttaatgcttttacattctcattgatacttccagtatctttctgattttcttgaacctcttctgatagatgttcgatctcagatcttactcgctcctgattattctcctgaaattctaacttctgtgattctttgcttaactgcatatgaaccttggaaacctccattgcatgctgttcggcatgttttctaagatgttcaagtagctcactgatctccttgatcctttcttcatcctgctcatttgcactttcaagatctacctgttcatcttgcagtctgtcagcatcatcttccgcattccttaattcttcttccagttgttgtctctgtatacttaactgttcgtgcctgttatcaagctcttcttttcttcgcttgatcgcagattgtgacatctgctgtgtatttaattccaaagagatttcttgcatctctttctctaagtctatcatattttgctgatattctttgagttttttttcattttcatgatatttttcttcatcttctgtgattgctttcgtccatcgatccagcttcttctttaattcttcaacttctctggatcttccaagcagattgctcttattcttaaaagcacctccagacattgcaccgcctcggtttaaggaatccccatcaagtgttacgattcttacactgtgatgatatttatttgcaattttaattcctgcatccatatcttttacaacaagaatctgtccaagcagtgatgcaaataaatccttatatacttcatcatagatcacaagttggttggctgccccgatcacccctggttctaaaagaatttctttccttgcaaattcttttcccttcactgcatccagcggcaaaaacgtaactcttccataacgattcttcttcagatattcgatcatcttcttcgctgttttctgcgtatccgttacaatgttctgaatacttccgcccagagctgtctcgatcgctgtttcgtatttttcttccactttgatgatatctgcaaccgatccaatgatcccagatgtcacagcctgttgttccatcaccttcttgatcccgaatccatatccatcataacgttctgccatattccgcattgtttcatagttggaacgcactctatgatatttctctcttttctgatccatctgttcctgaatctgacggcgttccgctatcaatgtttcttcgattctcttggcattatgacattcgatctcagatcgttttttcttctcattgatctcttcgatcttctgactagaagaatctttttctttttcctgatcattgatctgccgttttatttcttctatctgatgatccagtcctatgattcgaacatttagctgttctttcactgtctggaaacgctcaatcgctccagccacccgcatacggccttctctgacagcattcactcggatttcaatctcttcttgttctctctccagatcctgaatctgcttctgatacaatgcaacttcgctttctttttgtatcttttgttccatgacagattcatattccttacgaatttcttctgtctctgcctcaaatctctttaactgtgctttcttttcattcagatctttatacagcttatccttagactccagatacatactctcacgcatatgttctgtattgatctgttcatttaaaacctgaatctttccttcttttttctgctttgtaagcttcatttcagaaatatgagcagtgatcgtttcgatttcctgttttaaatgatccaaaaactcttcttgttttccgtatttctcttttgctttggcaagtgtctgatttgcctcattgatctcccgctgagcgatttctatcttttcatccagctcttttaattccttctcaagattctgattctcaagcaggaataacttcacatcttcatctttcaactgatctcttaacaacagatattctctcgcatgttctgactgtttcttaagcggtccaacctgacgttccaattccgttaagatatctgtgactcgtaccagattctcacgttcgatttccaaagatttttgtgtttccagcttgtttttcttgtatttaacaattcctgctgcttcatcaaataattctcttctctcttccggttttccacttaagatctgttcgatctgtccctgtccgatgatcgaatatccctcttttccgattcctgtatcaaaaaaaagttctacgatatcctttcttcggcaggcacttccgttgatcaaatattcactttccccagaacgatagactcttctggcaactgttacttcttcaaactggattggcagactatggtcactgttatctaatgtgatcgcaacataagcagatcccatcggctttcgaagctctgtccccgaaaaaataacatcttccattctagaaccacgaagctgttttgctctttgttctccaagcacccatcgaacagcatctgcaacgttactctttccacttccatttggacctacgattcctgtgatcccatgttcaaatttaaagatcattttatgggcaaaagatttaaaaccattgacctcaatactttttaaatacatgtccacctctgtttcgtgttattttttgtggcgtttgattgcctcaaatgcagcatgctgttctgctgactttttactatgtcctgatcctgttccgatcacattctctccaagacgtgcttctaccgtaaagattttggcgtgatctggaccttcttctccaacaagcacatattttaatcgtccttttccttctccctgaacaatctcctgaagattcgtctttgcatcgaaaaacagaactttattttctacatctttaaataaatatgtctcaatgaattttgttgctgtttcgattccctgatctaaataaatcgcaccgatcacagcttcaaatgcatcagaaagaatggaatctcttgatcttccacctgtcatatcttctcctttgcttaagagaacatatttcccaaggttgatatctcttgcacatcctgcaagtgtcggctcacatacaagactcgccctgatcttgcttaactttccctctgattctttctggtatgtgcgatacagataattacttgttaccagctcaagaactgcatctcccaaaaattcgagacgttcattattcttatctttgctcattcttcgttcatttgcataggaactatgaatgaaggcattccaaagtcgggatggctcatgaaatttaattcctatctgctcttgaaattcttccacactttttgcatccattttcttcttatcctttcacaatctggtctttgatcttctgcgtaatatcttcttcggcaaatgcgatacactgaatgatcgcatttttcatttcttttgcacttgaagatccatgtgctttcacaaccaatccatttaatccaagtaatggcgctccaccatattcagaagcatcaaatttctttaacgtcttctttaatgctggtttcgctaatagtgcaccgatcttactctttaatgttgacatcattccttctttgatctgactgactaacactgctgctaatccttcttccagtttcagaacgatatttcctgcaaatgcatcacatacaacaacatccgctgcaccgtatgggatttctcttgcttcgatacttccgatataattgatattttcacattcctttaataatggacctgtttcttttaccagctgatttcctttggcttcttccacaccgacattgacaagtccaactcttgggttcttgattccaagaacatcttccatatagatagatcccatctgtgcaaactgaagcagatattccgctttcgcatccatattcgctccagcatcgactaataacatcggacctttggctgttggcatcactgctcccagtggtgctctcttgatccctttgatccttccaacaacaaactgtcctccaacaaggatcgctcctgaacttccagctgatacaaatgcatctgcagtcttatcctttaccattttcagggcgaccaccatggaagaatctttcttcttacgaatcgcttctactggtgattcgtcacaagaaatttcttcttctgcattcacaacttcaatttgttcatttttatactgatatttgcttaattcttcatgaatccttggtgcttttcctacaagaaatactttcagattgtttttttcattcacagcatcaacggcaccttttacaacttctcctggtgcatgatctccacccatggcatcaactgccactttcactaatttctccatatgacctgttactccttttcttaaaaataggaaatgccacacgcctaaaccttcttaaaaagcctaaacgtatggcatttctcttcatttaccattattcagcgtgtgctgaaacaatttcctttttattgtaagatccgcaggctttacatactctgtgaggcatcataagagcaccacatttgctgcattttacaagtgttggagcagtcatcttccagtttgctctacgtctgtttcttcttcctttggatgatttattctttggacaaattgacattggttttacacctccttaaaattcttaaaaatatcctgaatcgctgccatacgagggtctgccaccgtacgatcgcagccacactctttttcattcagattcgttccgcacaccggacaaagtcctttgcagtcttctttgcataacactctggacggaagttttggaacaacttcatcgaagatcagtatatcaagatcaagatacttgtcctcgatatatgaagaatcttcttcatcgagatccgaaaaatctaattctttcatcacctgcacggaaaccggataactcacttcttcaagacatcgactgcatggaattccaagcgtgacttctgtctcaaatgcaaatgatatcttatcctttccaatatttctaaaaacaatcaaaaaatcattcttctctcgaataggataagacacacctttaagcttaatctcattcagatcgattgacgcttcgacggtttcttcatatttaggtactgaaataatttttgataattgaatcttcatacgatctcctaaattttcatactgtactattatacgaatgtgcttctggtttgtcaagtaattttccttacttttaaaaaaacaatcccgaagcacattttaacaagctttattttttatgaaatgattatttgacaagggctactgtgtctcttgcgatcattaattcttcatttgttggtacacaaagcagtgtaactttagaatcatctgtagagatgatcgctgtttctccgtgaacatcgttcttcacttcgtcaagttctgttcctaaatatccaagatattcacagattgctttacgtgtgatatcatcattctcaccaagtcctgctgtaaatgcgatcgcatcaacaccattcatagctgctgtgtaagctccgatgtattttgctacgcggtatgcatatgcatctaatgctgcagctgcaactttgttaccttcagctcttgctgcttttacatctctaaagtcagaagatactcctgataatccgtaaactcctgattctttgtttaagatatttaatacttcagatgctgttttgttttctttattcgcaataaattcaatgattgctggatcaagatctccagaacgtgttcccatgatcagtccttcaagtggtgttaatcccatagatgtatctactgattctccacctttgactgctgtaacacttgcaccgtttcctaaatggcatacgatgatctttaagtctttgatatcttttcctaagacttttgctgtctctaaagatacgaactgatgagatgttccgtggaatccataacggcggataccatcttcatcgtaatattttctaggaataccatataagaatgctttctctggcattgtctgatggaatgctgtatcaaatactgctaccattggaagtcctggcattaattcctgacatgcgcgaactccgatcagtcccgctgggttatgaagtggtgcgaatacgctgcattcttcaacttctttgataacttcatctgtgatcaggcatgattttgtgaatttctctccaccgtgaacaatacgatgtcctacagctccgatctcatcaagactttctacaactccgttttctttatctgtcagctggtcgataacgattccgatcgctgtcttatgatctggcatagctggtgtagatttgatcttgtcttttcccgctggctgatgtgttaatgctccatcgattccgattctttcacataatccttttgctaaaacactttctgtctctgaatcgattaactgatattttaatgatgagcttccgcagttgataactaaaactttcatgaactatgattctccttatatttttcttatttatctgcttccagtgctgctgcctgtacacatgtgatcgctactgcacctacgatatctgatgctacacatccacgtgataagtcattgactggttttgcgattccctgtgtaataggtccgaatgcctgcgctccacctaatctctgcactaatttgtatccaatgttaccagcatctaagtctgggaatactaatacgttcgctttaccagcaacttcacttcttggagccttacttgctgcaacttctggtacgatcgctgcgtcaagctgtaattctccacagatcaagtactgagggtatttttctttagcgatgtttgttgcttctacaacttttgttacatcatcatgttttgcacttccgcatgtagaatgggataacattgcaactctaggtgttgctccgatcaactgttcaaatgtcttagctgagcttgaagcgattgctgctaactgttctggatttggattctgattcagtccacagtcagcgaatacgaaacatccattttcacccatatctttagcctttgtatccattaacatgaaagctgatacgatctctgtaccaggtgcagtcttaacaacctgaagtgctgcacgaagtacgtttgcagaagagttgatcgctcctgctaccattccgtctgcatctccaactcttaccattgttgctccgaagaacagtgggttggataacaggatctcttttgcatcttctggaagcagtcctttgctctttcttgcttcacacaaagattcgatatatgtatttaaatgatcacagttctctggatcaacaaaagaagctttggctaaatctaatccttctgcttctgcttttgccttaatctcgtcttcttttccaactaaaataatatcagcgatctcttcactgataacctctgctgctgctgttaatgttctcatgtctgtagtttcaggcagtacaacagttttcttatttgcttttgccttgtttttaatctcatcaataacactcatttttcgcgttgctcctttcaactttccaaaaagatgaatttaatcttgttaaattatacaacatcatttctttgtatacaataatagtatttgtatttttcgttgtacatttccagaaaaatctatattctattctacatttttttgttttctctgacaagatacttgttgctcatttttcattttttgtgcaattttacttttattcatttgtgatttataatacatttacaaaataaacgattcaaataaggaatctcgaaaggatattttatgaaaacagcagctatcatttgcgaatacaatccgtttcacaatggtcatgaataccacatcatgcagacaaggaatatcacgggtgcagactacgtcattgccatcatgagtggaaactatgtacagcgcggaactccggcggttatggacaaaaaaatacgtaccaagtctgcccttcttggaggtgccgatctcgtgatcgaactccccttatttgcagcatgttcatctgcccctgattttgcaattggagctgtcagtctgcttcacaaactaggggtaatcgactacctttcttttggaagtgagtgtcaagatattaacaaacttaagcagattgcatcctttcttatccaatatgaagaagaaatcgagcgtggtacaaaagagcttatgagtctcggacattcttatccgaaagcaaaagaactttatcttagagagcatcttgatgatgcttctttgatcgaagtattaaaacagccgaataatattcttgggattgaatatttaaaagctttgctacagttagacagccctatcattcccgtctgtgttacccgtgtttcaaacgatcatcacagcaaggagttgacaccttcgatttcttctgcaacatccatccgtgaaatcttagaacaaaaccagatcagacctttattctcaagagtccctgaagctttgcatgatatctatcagatgcattatcaaaaagattttcctgtctgcctggatgatttttctctgcttttacatgcagctatttattcttgcgaagatcttacacagatcagcggtatttcaagcgattttaaggaccgtatttttaagatgttaaaatctgatctttcttttgaagaactgatcagtgcctgtaagaccaaaaacctcacctggagcaaaataagcagaaatcttttgcatatcatgcttgatataacaaaagaaaaggttgaaaaagcacgaacttacgatatgtctccttattttcagattctaggtttcaaacgttctgcttccttcctgatcgggaatatcaaaagaaaatcttccatccctatggtccgccatctgcgtgttatgaatgatcctttatccaaagatcaagaagaattattatctacagaacaacgtgccaaccagttatatcgtaccgtgatcggacagaaatttcatacgatcataaaagatgagcagatcatcttctagtttcacctcccgcttcatacactataaaaagaaagcgggagatttttcatgaaaaccagttttatccagtttttacttatttttagtgttctttccttgttattttttccacaaacatcggtccaaggcgcaaaaaatgggctgattttatggtctgcaacgatcacaccgactcttttaccttttttactgctcactggttttatgcaatattaccaaacgttccatctgatctcccggctcttttaccccctcaaaaaactttttcctggtatcaatgaggactttttttacacctgtattctaggttttttttgtggatgtcccctcggtgcgaagatcattgatgattttatttcttgtggatcttttacgaaatctgaaggagaaaagctattatatacctgcaatcagatcagtcccatgttctctgctggatatactcttacattgatccttcatggcaaaatttctgctctgcgctttttcttttgcctgtattttcctgtcatgtgttatctgatctatctggtctttttattttttacaagcgattttctacatacacaccactcttctcccaccattgcacacaaaaaatcagcagatcaggtaatctttgatagtcttcattccattttcatgattggaatctgtattatgatcttttcaattgccgtttctcttttagaaattcttccacttcctttctatttaaaaagaggattgaccgctgttcttgaaatcacaaatgccatctcctattttggttcttcccatatgtctatcagccgcaaagtcatattattgtgtatgatcacttcttttggcgggttgtctgctgccgtgcagactttaagtgtatacaaaaagagcagactctccctctggaaatatctgctcataagatctctttttagtgtttcaagcggactacttgcttatctagtcttcatctgaaatgaaatcttctaccgttcttgttcttgcctgtggaatgctgactccggaaagctgttcttctatctccttcgcattcgttttaatcgatgcaagatctgaatctaatgcggataacaactggttaaacacactctcctgtgcttctttgacacttgccacataaccttgtacatcttccatgatctcattgacatagcgcaatgcacctgcacggatctgatctgcttcttcattcgcattatgtacaacacttcttgctgtatctttggcgtgagtttcaatctcattcgctctcatctttgccatctcaacaacctcattctgatcgatcaattctcctgcatctcttgctgcctgatcgatcatctgctgtgacttcactctggcatcttccaagatcgcatctttgttcagaatgatcttatggcttcgttcaatctcacctggaatctgcttccttaattcctcgatcactgtcatcaatacatctttctcgatcataatcttacctggactaaatcttgctggttttgcttcgtcgatcagtacttcaatatcatcaatcatctcatgtaaatacttctcactcatattcattcgcctcctatgatttaaatttcttctcaagacattcttgtacgtaaggcggtaccatctcagaaacatctccatgataagatgcaatttcctttacgatcgtggaacttacataagaatactcaatgctggttgtaaaaaacatggtatctaagtctttatccaatctcgcatttgtctgtgcaatttgaatctcatactcaaaatcagttactgcgcgtagtcctcggactgatacactggctccctgttgttttgcaaagtctaccaacaatccggaaaatgacataacctctacattatcaagatgacttgtcacttttcgtatcatatcaaccttctcttgtgttgtaaacattggtttctttgcactgtttaccaatactgcgatgatcagcttgtcaaaaaccttggctgaacgctctataatatcaatatgtccataagtcaccgggtcaaaacttcccggataaactgcaatactcatcttctaatcctccactgttttcatcaaaaatgtatgtttatttgtcttatattcttttactcttataacctttaatttctcaaaatctggtatctctgtgtcaagagacgattccacgataactaccgtatcttctgtacaaatagaggatcgatctatgattgataatacttcttcttcaaatcctttcttatatggaggatccataaaaatatgatcaaatgttacattcttcgtctctaactgcctgatcgctgaattcacatctgttgccaaaacctgtgctttcttatcaagctttgtatatcttaaattctctcgaatgcatctcaatgcaggttttgctttctcaacaaaataagcttcctttgctcctctgctcaatgcctcgatcccgattcctccacttccagagaaaagatccagaaatgtacttcccgggatatcatactgaatcatattaaataacgtctctttgatgcgatcctgggttggtcttgtctccattccttcgatcgtctttaattttaaactcttcgcacttcctgctacgactctcatatctatgtatattccttgtcttttatttgctttgcaaagttattccacttttgctcactatttcttttattttattatatctacagattttgtcaaccgacaaaccaatatttcagaaagagacagtcaaagtttatactttcgctgcctctttctgaaatcttatgatgtttgaggattgcttcattgctacgcaatttcgcaatccggatacatcatcttatctaattagcgagacatttcttcttcctgtctgcggatcattttacgaaccatctctcctccgacagatcctgcctgagcagttgttaagtgtccgttatatccttcttttaaatccacaccgatctcatttgcaacttcgaacttaaatctgtctaaggctcctctcgcttctggtacctcgactctgtttgttcctttgcttcttgctgaagttcgttcttccatgttgaaagtcctccatttcttttgttttgttatctgttacgctcatagtatatgcaagcgtacaaaagatacactgggagtttttacatgatgttgcattttatggattgttattttttgacacttacatcattttaataacgaacatgaaatcttttctcattttcttcatatggacgttcttctttctcgatctcatccactcgaacgaaacgatttcctgtctggatcaaatttaaaaatttctcaatttcaactctggttccctgaacttctgctgtcactgatccatcagacatatttttcacccatcctgtcaaatgacatctttctgcattcatcgctacaaaaaaacgaaatcctactccttggactcttcctgtaaatcttaaataaaaacgtaccatacgatatacctcctattatatattccttgcaagcccgatctgtttttctaatctgctgttcttcaaattcgaaaaatcaaatccgctttcctccagttgttttaccgcatcagctgcctgtttcataatatctgcattggtatagatatctgccagaacaaaatccatcatcccgctttgtctgactccgaagaaatcacccggtcctcgaagttttaagtcttcatttgctatataaaatccatcatttgatttattcaacacttcaagacgctgcatcgtttctttcttcttggaactcgtcataaaaatgcaataggactgatagccgccacgtccgacacgtcctcttaactgatgaagctgtgcaagtccaaaacgttctgcattctccaccatcataaccgttgcatttggcacattcaccccgacttcaacaaccgttgttgatactaaaacatcaatcttgccttctgaaaaatcatccatgactttctgcttgtccactgccttcatctttccatgaaggtaactgatccttaccgatggtgcaaactggcttcttaacatctgcgcatactgaatgacattttctccttccatcgtctcactttcttcgaccatcggacagataatatatacctgtcttccctgactaacctgtttctcaacgaaacgatatgccgtcgggcggtaacttgtgttgactacgcagtttttgatcggcaaccgctctgccggcagttcatcgatgatcgatacatcaagatcaccatataaaatgatcgccaatgttcttggaattggtgtcgcactcataacaagtacatgtggtttctcaccttttagcgataaactttctctttgtcttactccaaatcgatgttgttcatccgtgataaccaatgctaacttgttatattccaccttatcctgaatgaccgcatgagttccgatcacaatatctacttctccatctttgatcttttgataggtttctcttttttcttttgcctttgtggaacctgtcagcaatgcgatctttatatcataagattctaaaagttctgtaaatgattcataatgctgagctgcaagcacttccgttggcgccatcaaaaccccttggtatcctgctttggcacacattaataataaaataaccgcaaggatcgtctttccagatcctacatcaccctgtaccagacgattcataaccttaccagacgccatgtcttttgccatctcatttaacgctcttttctgcgctgtagtcaactcatatggaagattctttaccagttctttcgcttccttgcagaccccaatcttgtatccttcttccttgagatcttctcctgatgtgattatatgcatcgctgcgataaaaataaaaaattcatcaaagatcaaccttttctttgctttgatcaactgctcttttgattccggaaaatgaatattccagattgcctgatgatattccattggctgatattgatctaaaatattttgcggaagatattctggaatatgaaagatatagttttttgtctgtgccatagccttagaaacaagtttattggtaagtccacttgttaatggatatactggctgcaatgtctcctgtttagcttcataatcttcctttgtaaagatctctggatgttccatcgtgatccgtccatttttatagatcggagttcccgtaaatatataatctcttccctgatgtaattgtttctttaaatatggcatattgtaccagacaagcatgatcgttcctgtatgatctttcgctgtgcatgtaacaatcttcattctttttgcatactgaatatgaacttccgaattgatacgaacgaaaatagatactctctggccaatctcgatctcattgacatctttgggatcttcataggtaagataatactttggatacatcgtaatcaaactgtctacatcacggattccaagtcgtccaaaagctgtcgcactcttttccccaattccttttaattctatgatatttgttgtgccatccatcttctgtctccttcaaaattctttatcatattctcacgaaaagcaaagaaatcccgccatcaagcgggatttcccatcttctcttattctactgataataagaaataataaattggctgtccgccatattctaactgtacatcacagtcaccatatgtttcttctactttctcaagtaatgcttctgcctgttctttggttgtgtcttctccatagtaaatactgatcagttcgctgtcttcatctaccatctcttctagtaattctaacgtgactttctcgacatcctgtccgactttcttgatcccatcatcatcgattcccatgatatcatcaaccttgatcgtaataccattgatggatgtatctctaactgcataagtaacttctccagtcttcacgcattcaatgatgtctttcatgttgtcttcattctcttcggcatctgcttctggatcaaatccaatgatcgctgagattccctgtggaactgttgttgtcggaatgatcactacattcttatcttccactaaagactgtgcctgtgtcgctgcaagaatgatattcttgttatttggcaaaataaatacagtctctgcattcacctgctcgatcgcattcaacatatcttcagtactagggttcatggtctgcccaccttcaatcaagtaatctacacctaactcacggaaaatgtcattcattccctggccgatcgatactgccacaaatccaaagtcttttctaggttcttctggtttgctttcttctgcctgtgcttctgcctgtgtgagatttaaacgttctctatgctcttctctcatattatcgatcttcatattcgtaagttctccatatgtgagacctttctcgatcgcttttccaggatggtttgtatgaacatgtactttaataatatcttcatctgcaacaaccacgatagaatctccgattcccattaagaaatctttaaacttctgttcttcttccatggaaatctcttctttcgtcataacgataaattctgtacaataaccaaatttgatgtctttctcttctaatggtgcttcacttgctgttgctgctggtttaactgctgtcttctcaatactgcttaaatcaacttctttacccattaaagcatcaacagcaccctgtaggaattccacaagtccctgtccacctgaatcaaccactcctgcttctttcagaactggtaacatctctggtgtcttctgaagaatctcgttcgcttccttgatcactacctgagcaaattcttcaaaatcttctgtattccttgcacaatatactgccttctctgctgttactttcgctaccgtaaggattgttccttcctttggtttcataactgctttataagctgtctctactgccttcttaaatcctgctgcaacagtttctgttgttaatacgtcctgatctttgacacctttataaaatcccctgaataactgggatagaataacacctgagttacctctggctcctcttaaagaaccgcttgataatcctcttgttacttctttcactgtcacttctgctgcattcccaacttctttagcagctgcaagagctgtcattgtcatattcgttcctgtatcaccgtctggcacagggaatacattcagttcattaatatattctttattcgcctctaatctcttggctccgccaatcaacatcttctgcagcaaagctgcatctatctgtttcatcttaatctttgcctccattatctattatcctatatcctttacgccctctacgtaaatattgatccgttctacttcaaggcttgtaaattcttctacacgatactttacagattccataaggttacttgccactgtagaaatagaaactccataagatacaataatatggaagtctatcgtgatcttattattctttacagaaacaaatacaccttttctgatattatctcttgttaacagcttggcgatcccatctttcatattcaccattgccatccctacgataccaaaacatccaagagcacagattccggcatatttcgcaattacctgattttcaatggaaatctctccattctttgtattcacatgtcctttcataaattatacctccaaacgagaattcatatatttcgattatacattatgaaaccacctaagtctagtgtttcaaaaaatgatttaaaataaaagcaaatttattcttgatttttataaatcaatctgttagaatgaaatagttgtcgagcctggaatgaaacaggaatagagattggaataaggaggtgctaacatggcaaaatgtgctatttgtggcaaaggtgctcattttggaaacgcagtgagccattcacatagaagatcaaataaaatgtggaaatctaacatcaaatctgttaaagttaaagttaacggagcagctaagaaaatgtacgtttgtacttcttgcttaagatctggtaaggttgaacgtgcttagtcttgattgatcatataagaaaccactaagagttggaatttattccaactctttttttattcttcaagcgttatttaaagaatagacagtaagctgtgatatcacatccgatacagataactattttcatcggatcgtgagtaatccagaatcctgtaaataagcccaatgagaaaaagaaaaaagcgatggcccagactcgtttcatatttgaagatcctttttgtacatatgtattccaaaattctggtttgaatgacggaaattaatggtggaatattataaacatctgtgtaccactacaaaaattgaaaactaataatgtttaacatacacacctttccgtttgaaaattcttaattttatacaagaatgtcttcagctattcataaaaacataaagaaagatagagctacgaaatgatagaattccatagaattcgtttttcgtagctctatctttctttatgtttttatgaatactcaatacatttctgttagacaatcaaattttacttttcaagatcatccacaatatcttctaatgtctcattcttccccgtaaacttatcgatcacatctggtaccatatccagtaatttcacgattgtttcctgattcttaatattcacaagtttcgtctgtccatctttaatgacaagaactgcacttggagtcatctttcctccgattccaccaccgctcttgtccttcttatcaccagagaaagctcctgctcccattccgaaggagacgtcaactaatggtaagataatcgtatctttgatgtagattggttctcctacgaccgtttttgatgttaagaatccttccataccgtcaaataatgaacccatggtatcttttaaattttctttgctcattttaactgcctcctatcattcttattgctcggtctttttgtttgatcaattcatctttatctttatatactttccataacaaatgtaagatcttgtatcttcggatccttcctttgatctttagctctcctttcaagattctcttctcaaaatctggtgtgatattgatatgatcaccgtagattggaatcaatgcagcggtccagcctaagacttttcccgtgtaatatgggtcttcgaatccaaatataatctttgcatttagtttctgtggaagtaacagctttaccccattcactccatatctcttgatccgcttcactgcatcaatgatatcctcatcttccaatagatctccgatcatttccatcttatttgtgatcttacggatctttgttatgaaattcttgcatctattataacattttttgagaaaattcacgattcttttgccaaaaaactctttctctttatctgttgttttgtctatcttagattctgatatcttatcttctgatctttcgtacatttttcttgttgttgatgtctttgttctttcttctttttcatcccatgtgagattatatacatcttcatcttcagaaggatatgtactttttttcttttctactcgtttcttattgttttttttatttttttgtttctttttagagtctgatcttttcttatgttttttcttatctttctttttatgctctccaaatacagaccagtgttctttccttgaatcataaatcggtattccaaaaatcctgattccaaaattcagctcttcttcatagaatgcttttgcacgtaaaaatataactgcccatgatacctttacctgtgctttgggactcttcccatcaaaatctccttcgatctgataacagatcgggaagattaaaaggatcaacaataacacgatcggtatcaggatcaggattcctatgatctttaatattaaaaatagtatactcatttatcttccccacaaaaatatgttgttacatcctcaagttctcctttatgatacagatcattgatcatgcgtcttaacataacaactgcatcatctcgtcctgctgccattcctacgatcatgatatcttttccttcgtgaatatcggataatagttcattatatggatatatttccagaaatgcactgttccagagcggcagtgtaatacagtacaatcttgaaattgatttcttttcttgtattttacaaaaaagacgtttcttttgtaattttaatatctctgatatgtatacacgttctgaaactttcactcatttttcctcctgaaaattctccccattcatttctgataaaattcctgataaaacaaaaagggatgtattactacatccccattttaacatatattgttgtcgattactcgccaaattcgccgatttttacaactttcagcatgtttgtaacaccttttccacgatggttagctggtccaccacctgttaagactaagatgtcatctttctcagcaagtcctgcatctaatacgatatctgttgcttcatctaacagatcttttgttgtctcagctttgtgagatttgaaaggacgtactccccaatagatctgcatctgacgtacgatcgcatcatctggtgacagaccgataatctgtgcatctggtttgaatttagatacgattcttgttgtgaatcctgacatacttgatgctaagatacattttgcatttacattgtgtgctgtctgtactgcagaataagcaactgctgctgaaattccacgattgatatatttagatctgtaatctttgatctttgtgcttaagtgaacttctgttgagattgcgatctgattcatcatcttaacagcttctactggatatttaccttttgctgtttctccagataacatgatcgcatctgttccatcatagatcgcatttgccacgtctgtagcctcagctcttgttggacgtgggttacgaatcatagaatctaacatctgtgtagctgtaacaactggtttgaatgcatcgttacattttctgatgatctctttctgtaagaaaggtacttcttcagcaggtacttcaacaccaaggtcaccacgagcaaccatgataccagcagatgcatcgatgatcgcatcaatgttttcaacaccttccatgttctcgatcttagagattacaccaacatgcatgttatgtgcaccgatgatatctttgatttcttctacagcttctgcattacggataaatgatgctgcaatgaagtcgattccattctcaagaccgaattcgatatctgctttatctttttctgtgatagatggtaagttaactcttacgttaggtacgttaacacccttacggcttcctaaaagtcctccgttgataacgtcacatacgatatctgttccatctttgatctctttaacttttaactcaattaatccgtcatcgatcaggattgtgtttccagcttctacatcctgtggaagttccgcatatgtaatgctggtaatttcattatttcctttgatgtctcttgttgtcagtgtatattcctgacctgttactaattcaacatcatcatctgtttctaataatcctgtacggatctctggtccttttgtatcaagtaaaatagcgattggtaaattcagttcttctctgaacttcttaattctcttgatacgtcctaactgctcttcatgatctccatgagagaagtttaaacgggcaatgtccattcctgaacgcatcaggtcttttaatacctcatcgtcgtctgttgcaggtcccattgtacaaatgatttttgtcttcttggttagcataatttttctcctttggtttcaaaaatatatttaaataataaacaactcaccttttcacatgcttatgggtaaataaatgatcttgacaatattcataattcccatcgcattttgaacaataacgaaattccaattctggatcgtcaagttctgttctgtggcacactgcacattcgtgcatcgcaccattcttcttctttggcgtgatcgtcttagctttgtacgctctcgccttcttcttatgtattgttttagccttgaagtttgctcccattcttcgaatcttcttcatagagaagaaaaatagtagaaaatttaacaaagctgcaactatagatactttaaccgaaattccggcaactgtaaagcctgaacttaaaaaaatgtagattaaatataatccatctaagtatccaagccattttaccttgattggaaggatcatatacaaatatacttccatctctgggaacatagacgcatatgctaaaaataacgtcatgttcagataaaaagtatccatgttaacaaacgctccatagccttctccatatgcgaatgtaaggatcgcataagttaaaaatgccccaacgatcgttcctaaaactccgatcagataatacatattgaatcggaatgttccccatacctgctctaatgagcttccgatcgagtaataaaataacaatacaaatattacaaagatcaaattcgtctctggtccgatcagcaggaatgtcacaattctccagacttgtccatgcaagatcagatacggattcaattccagtaaactatataatcgtggtgatatattggcgatcacaaaaccgactgcatacaataaaacaatgatcttagggagattcggtatcgcatatctgccaaacttctcttccagtttattaagccacataaaaaacctttcttatcatcaaaaattaaaacatatttttctttccaaggatatatcctccaaagatcgtaaggatcaaggatacgatcacaaggatcaaaaatccatgtgctgaatgtgccagtggtactggaacattcattccccagaaactcgcgatcatcgtcggaatcgacataacgatcgttatgatcgcaagaaccttcattacaatattcaggttgtttgagataacggatgcgtatgcatccatcgtaccacttaagatattgctgtagatgtctgccatctcaatcgcctgtttattctctatgataacatcgtccagtaattcctcatcttctggatactgtttgatcttatcaatctttaacatcttctcaagcaccagttcgtttgatctcagggatgtagagaagtaaaccaaactcttctctaattccagaagctcgatcagttcctggttctttgttgaaatatgaagctgcttctcaacagaatcactcttcttatcaatgattcgcagatactgcagatacaaggatgcattccgataaaggatctgcaagataaatcttgtccttttaaatgtccagaaatttcgaacccttccattcttaaagtctgctaacactgctgtatcttccagacagaccgtaatgatcactttctctgtcaggatgataccacatggaatcgtcaggaagtattctttttcctttctctcttctgttgtcggaacgtctacgataaataaagtataaccttcttccacttcgatatgagaacgttcttcttcatccagtggtgctcttaagtcatctatatcaatcttatagtctgttgcgatcttcgcaagttctgcagctgtgggatgaattaacgatatccaggttccttccataggttcactgatttcatgaatctggtgatccatcgtacgataatacttgatcattgtccgctcctttctatggaagtaccttgtccataagttccccacaaacaggactctatgaatcctgttttatcatctgaaatatctaaaattccaaacttttacctattccattataaataactcattttgctttgtcaattaacagtactgtaccaactggaagtgttaactccctaatttttttgttactttttgctaaattttccactgttgttttgtgcatcttggctatatcaaggattgtttctcctttttttacaacatatggaacgaaagctccttcgatcacgttcgtaaatccaggcacacataattcatctccaatctgtaaattatatacatttacaaaaggattttgtctcatgatatcttttaccctgacaccatgtgctttcgcgatcttatataaactatccttttcctttacaacatacactgtccctttacacgaatttgtctgcatcattcttggcattccttcgcttttttatagaatatgcagcagcattcccttgtttccattattttctccgatttttttagataatattcctatttgcaattattttgaaaatgattataatagatataatgtccatgtatattggacagatatgtttttttaacattattttaacgcttgaaattatagtacttttatagaaagcaggtatacgagaagatgaaacgattaggaattgatattggctcaacgacagtcaaggtcgctgtcatcgacgaacaacataatatacttttctctgattatcagagacattttgccaagattcaggaaactttatcttccttattaaaaaaggcaaaagaccagattggggaaatgacatttgctccaaccgttaccggttccggaggactttccatttcttcttacttagatattccattctgtcaggaagttgtctgtgtatcaagtgcacttcaggattatgcacctcagacagatgttgccattgagcttggtggtgaagatgctaagatcatttatttcacaaatgggatcgatcaacgtatgaatggtgtctgtgccggtggtaccggatcatttatcgatcagatggcctctttattacaaacagatgctggcggattaaatgaatatgcgaaagattatgatacgatctatccgatcgcagcccgctgcggtgtattcgccaaaacagatatccagcccctgatcaacgaaggtgctacaaaaccaaaccttgctgcctctattttccaggcagtcgtaaaccagacgatcagtggtcttgcatgtggtaaaccgatccgtggaaatgttgctttcctcggaggacctcttcatttccttacagaattaaaagaagcatttatccgtacattaaacctaaaagatgatgagattatcgctcctacacactctcatttatttgcagctgtcggtgctgctctgaatgctaaagaggaagttacaactgattttgaacatcttttaaaacagtttgagaagaagatcgaacttcagcaggaagttgaccgtttagagcctttatttaagagtgaacaagaatataaaaatttcgtaaaagatcataaccgtcatgttgtgaaacgtggagatcttgctacatataaaggaaattgttacttggggatcgatgccggttccactacaacaaaagttgctttagctggtgaggatggagaacttctttacagctactacaataacaataacggaagtcctcttcacgccgttgttgaagcgcttcatgagattgacacacagatgccaaagacagctaagatcgtatcttcctgttccacaggatacggagaacatcttgtaaaagctgccttaaatcttgactttggagaagttgagacgatcgcacattactatgcagctgcattctttgatcctgatgtggactgtatccttgatatcggtggtcaggatatgaaatgtatccgtatcaaaaatggagttgttgatgatgtacagttaaacgaagcatgttcttctggatgcggttcatttattgaaactttcgcgaaatccttaaatcattctgtacaggaatttgccaaagttgctttaacagcacagaatccgatcgatcttggttcacgttgtacggtatttatgaattctaaagtaaaacaggcacagaaagaaggtgcaactgtcggagatatctctgctggtcttgcttattctgtaatcaagaatgctttatataaagttattaagttaacagacccatctgaccttggaaaacatatcgttgtacagggtggtacattttataatgatgcggttcttcgaagctttgaacgtatctccggatgtcatgctgtaagacctgatatcgcaggtatcatgggtgcctttggttccgcactgattgcgagagaacgttacgaagatggtatggaaacttctatgcttccattagaagaaatctttgcgatgagtgttgatacttccatgacacgatgcaaaggctgcacaaatcactgcctgttaacgatcaataagttctctaacggacgccgttatatcactggtaaccgttgtgaacgtggtattgggaaagaaccgaatgctgaaaatattccaaacctttacgattacaaacttcatcgtacctttgactacgaacctttatctgatgagaaagccactcgtggagtcattggtatccctagagttttaaatatttatgagaactatccattctggtatacattctttacagatcttggatttaaagttgtggtatctcctgaatcttctcgtaagatttatgagttaggtatcgaatctattccaagtgaatctgaatgttaccctgcaaaattagcccatggtcatgtgatgtggctgatcaaacagggaatcaaggatatcttctacccttgtattccttatgaacgtgacgaaatggaaggtacaaacaaccattataattgcccgatcgttacttcttatgcagaaaatatcaaaaataacatggaagaacttgcaacagagcatatcaactttatgaatccattcttagcactggataatgaagaagctttaaaatcccgtttatttgaggaattagaagctcagtatcatttgactgctgacgaaataaatcacgcggttgataaagcttatgcagaactttcacaggttcgtacagatatccagaataagggtgaggaagtccttgcttaccttgctgaaactggcagaactggtatcgttctatgtggtcgtccatatcatatcgatcctgagatcaaccatggtattccagaattgatcaactcttatggaattgctgttttaactgaggattctatttctcatttatcaaaggttgaacgtccattaaacgtacaggatcagtggatgtatcattccagactatatgctgcagcaaactatgcaaaagcaaataaacagttagaagtcattcagttaaactctttcggttgcggactggatgctgttacaactgatacagtgaaagatatcttaacaaaatccggacgtatctacacagtattaaagattgatgaggttaataaccttggagcggcaagaatccgtatccgctcactgatcagtgctgtccgtgtccgtaaaaaacataagatcgaaccaaaacctgtatctccagcgatcaaacgtgtggaatttacaaaagagatgcgtaagaactatacactgttagttcctcagatgtctccgatccattttgaattcttagagcctgctctgcagtcttgtggatataacgttgaagttttaaatcagggtggtatggaagatgttaacacaggtcttaagtatgtaaataatgatgcctgctatccatctctgatcgttatcggacagttaatgaatgcattgctttctggtaaatatgatcctcataagatcgcacttgtcatctcccagacaggtggtggatgccgtgcaacaaactatatcagttttatccgccgtgcacttgaaaaagctggttacggttatgttcctgttgttggtttaagtgcccagggaatcgagaaaaacagtggatttagctttacacctggtttattaaacaaagcagttcaggcgatcgtttatggtgatgtctttatgagaacggtttatcatacacgtccttatgaagtaaaacctggttctgtcaacaaattacacagacaatgggctgctaaatgtaaacgtgatattgccaaaggtaacttctatacattccagaagaatatccgtggaatcattcgtgacttcgaccgcattccattaaaggatatcaagaaacctcgtgtcggaatcgttggagagatccttgttaaattccttccagacgcaaacaatcacttagtagagcttctggaacgtgaaggtgcggaagctgttgtacctgatctgttagacttcttcatgtacagcttctacaacagtaacttcaaataccgttaccttggtaaatccaagaaatctgcgatcgtcagcaactccgcaatctgggttgtagagcgttaccgtcagactcttcgtaaagagctagccaagagtaaccgttttgagccgcctgcatatatcaaagaccttgcagaatatgcaaaaccattcgtatcaatcggtaaccagactggtgagggttggttcttaacaggtgagatggttgaactgattcacagcggtgctccaaatatcgtatgtacacagccatttgcatgcttaccgaaccatgtcgttggtaagggtgttattaaagaaatccgtcaggcattccctgatgcgaacatcgtggcgatcgactatgatccgggagctagtgaggttaaccagatcaaccgtattaagctgatgctttctgcggctgagaagaatatgaataaatagttatttttctattgtttagaatcaaatgctaataaaaagaagccatgttccggcatagataaatcttgtctatgcttgtaacatggcttcttgtttgtttctttctatttcaattagatcattctgctaaaatttcttccagaatggctgttgcatcttcaatgcagcctggacaggatcttaagacttttcccgtttcaatcccttttaggtccttacattttgttgctagattcttctcctgaaagcgttttacaagctctcctgttagtttatatgttgctgccttggaaactggtttctcgatgtctccacagctttttatggcaccgatgactgcaacggctccggtgattgctccacatgttccttccatgcagcccatacctagtccatggccttccatcatcttgaaaatgatggattcgtcgattcccatttcttcagcaaatgcacaggcaactgcctgggcacagttgtagcctttctggtggttttgtgctgctttgtctgttttgatactcatttgtaatgtcctccgatttttattcattattaattagattgtagatttcttctgctgttttgtctggatgttgttttacttgatcgtagattggtcttatcttggttgctgactcttctagttcatctgctatttgttctagattcttgtttttctttacttttttctgaatcatagaaatttgatttagtaattttcctgcccttaccccacgattttccgcactctgcagctgactcactctgtcactcgctgccatcgcttctctcaaatatagatatctgtcccgttcgtcctggctcatctttaccatttcttcttgtatcctttccatatatctattacctgctgattcctgcgcaacctcttcccatgtcgttgcggcgatcagtcttgcccaacagtatagaggatgctttcttgctttgcctttggctgtcttgattttctataattctacttctttccttaattattcatactattttgaatacatcacatcatttttcgaaagtaaataaacacagtattgattcatactaattccttctctctgtgaatgttctgctaatgatctgtgtagacttcgtggtattcttaatttgaattgtccagaataattttccaagctatctggttcataaatttctattccctcttccaatgctgctctgatccactctctttttgcatcttttgcattctgcattgcactctctatcgtttctccacatgtaatacaacctggtaaatcaggataagatattacaaacccaccttcatcttgatcttctatgatttccatcttatatgacatactcatatactcattcagcgttttcattttctctttcctcgctttctacaacctttcttaccatttctacatatacttttttaattggttcatgctttggtattgtaattggacttttcccttgttttctaaatgtataatgactacttccacttcttggggcatccatcctatacccataagtttctaataccctttgtaattgtgtaaatcgaagatccttcgacaaattgcaaatacgtgcgattagtttatcccattttgacatttgtatcttcctttcttttattatatttggtgtcgtatttggtgtcaatattttatttatgtaaatatttgtattttatgtaattaaaacacatttacttattcctgtcaatattttacaataacattgtattaaaaaagaagactcctcacaaaaaagagtcttctttccttatcatcaaatgatgtaattctatcttctgacactgatccctctctgatccagatattccttcagatcagatatcttcaattcattgaaatggaacaatgaagcagcaagtgctgcatctgcttttccttctgtcaatgtatcataaaaatgttctttattccccgcaccaccagatgcgatcactggaatatcaacattctctgcaatgattcttgtcagttcattgtcatatcctgctttcgttccgtcacagtccatgcttgttaacaggatctctcctgctccgcggcggtttgcttccatggcccattctacagcatctaagcctacatcgattcttccaccgttcttgtatacattccatccgcttccatcggctctgcgtttggcatcaatcgctacaacaacgcactggcttccgaatttgtctgcagcatcattgatcaaatctggggtattgatcgctgaggagttaatggaaatcttatctgctccttctcgtaagattgccttaaaatcatcaacggtacggattcctccaccgactgtaaatgggataaataccttttctgcgacttttcttaccatatcgatcatgatatttcttgcatcggatgatgctgtgatatctaagaatacaagttcatctgcacctgctttgtcatatgctgctgcgatctctaccgggtctccggcatcgatcagattgacaaaattgacaccttttacgacgcgtcctgctttcacatctaagcatgggataattctctttgtatgcatagccaattcctcctatagtgaaacgaagttctttaaaatctgtaatcctacggtgctgctcttttctggatggaactggcaggcaaagatgttgtctttctctactgctgcgtgaatcttcacaccatattcggttgttgctgctacaatatcttcatcgtctgcctgaagatagtaagaatgtacaaaatatacataaggattctctggcagtcctttgaataatcttgaatcttctttgactttgatattattccatcccatatgtggaatctttaaatctccactctttggaattcttaagatctttccaggtaataatccaagtcctttgactcccggtccttcatcgctggattcaaacatcagctgtaacccaagacagattcctaaaaatggaatattcttctctacaacttcatggatcgtttcttctaatccataatgacggatcttctccatcgcatctgcaaatgctccaactcccggaagaatcactttatcgctgtttacgatctcatcgtgatctcttgtgatgattgcttcttctccaagataattgagtgatttttcaacacttttgatatttcctgcatcataatcaataatcgctatcataggtgcctcctattcgtgtgctatgtttaaaaagtcacggctgtccatcttgatcccgattcctttttctttgatctcttttccgatctggtatagtgaatgatgaactcttacgaacgttgctttctcattgtagaatgccatcttctcaaaaggccagcggaacaaacttggaacttcaaaaccttctcctaattctaatataaaaagctttttatttaaagtgttttgcaaccattttgtgtaacttgcccatgaatttaagtaagctccttcgatatagatagattttgtctcttctgtgcggacattaaagatcaattgttttccacattttggacattccagatgttcgatctttcctgttttttcataatagtcgatcaaatctctaagtcctaagttcgcaggatagagctgctcattacatggtgcactgcactggaagaaatctccgtttccacatggtgctgtcacgtgatctttctttaaatgggtatgatacagtaatccatcatcgttactcgtcactacgaaatattcttttccttccaaaacttcttctaattctttaaacagatctgtctctttcatggataataaatactctctctcgtaaacagttctcatccatttggaatcttcatcttctttatcgatgagattctggtaatgttcatttgtgatcgctttcttgaaatcgatcacacggtctgcacgcaattctcgtccgatccccactaatacaaggtctgcatcctgaatctgttctttgtaatcttttaacatatttcttttcatcctttttatcctattatccaaaagaaaccagtttacactgatttctttttacttacactatttatctatcataccacaaaactcatttctttgtctgtagcatttttacttccatacacaacacaatgaaaatgcttttttaacattgtacagattcagaatccgcagattccacatcaaagtaaaattctacaccaccttctacattggcaactccataatccttgccatgtgctttcatcgttgcttctacgatagacaatccgattccgcttccaccgtattctcttgttcttgctttatcgactttatagaattttacccacaatttatcaatatcttcctgcggaatatggtctcccgtattaaatactttgatccttacgtcatttccatgacgacaatagctgactttgatgatcccaccatctgtcacatgatttctggcattgctcagatagttgttcacaacttcttcgatcataaattcatctgcccacacatgagtctctggctcatcaaatatgatcttgacttcttgcttttccacaaggatcttgcttgattctaccatattgcggatcatttctgtgatatcaaatcgttccatattaacctgattatttccgaattcaatctgattcagtgtcagaagtttctgtaccatacggttcatcttctttgcttcatctgcaataacgtcacaatagaactctttgctttcttcatcatctaagatattgtctttcaatccttccgaatatccctggatcagtgcgatcggtgtctttaattcatgggatacatgggataagaattcctttcgcatctcatcaatctgaactttctgctcgatatctttttgcagttcattgttcgctgttttcagttctgaaatggtgaattccaatttagatgataactcattgatactggctccaagtcgtcctaattcatcatcagatcctgttggcactttcacatcaaaatctaaatgtgacatctgattcgcggccttggccatatcttcaattggtcttgtaaactggcggctgtataaatacatcgcaactgcaccgcaaatgatcaagatcagtccaacatacatcgtaaactgtccggataatctggcacttgtctggatactttccatcggtgtacttatgatcactgtataatcaccatccagatagcccattagattgatgcttgttcccatactcttattggtattggtcataactgcataaccttgcttcttgatctggttactgatcttatcaagattttcatttaaaatgttccaaaggcttttatacatcaagctcttctctccttcagaactataaacgatcgttcctgatccatcactgatcaaaaccctgtaattataagtcttcgcgatctcatccacatcattcttccgtaccgtatctttttgaaaaactttctgtatctggtaataggattctttgatcgtcttcttttccttcacagtataatatgtcttcaacatagtaagattgatcagtactgataataagatcaccgacgtcatgataatgatcagcatcaatgtcatcttgactctgactgaacggttctttaataatttctttctcaattctcttcaacctcaaatttgtatcccattccccagatcgtatgaatataagaacctttttcaccaagtttatttcttaatttctttacgtgggtgtcgatcgttcttgcatctccaaagtaatcatagttccatacctgatttaagatactttcccttgtaagggctcttccttgattggacataaaatactgtaataattcaaattctttgtaactcagattgatgctttttccgtcaatagagacatgatgtcccccaacatccatgacaattccgccagcttctatctgttcaccttctgtctgaaccgttcttcttaaaatggcttccactctggcaaccaagatctttgggctgaatggtttggaaatatattcatccactccaagttcaaatccaagaagttcatcttgttcctgatcttttgccgtcagcatgatgatcggaactttagatactttacggatttctttgacaacttcccatccgtccatcttcggcatcataacatctaatactaacagattgattccctttgtagaataaaaggtatcaaccgcttcttcaccatcctgtgcttctaacacctgatagccggctcttgtcagaaagtctttgactagctttcgcattctgctttcatcatccacaactaatatctttaattcattcaccttgtatcttcctcctaatcttattttctcataccatttatttatatttctttcctataaaaaagaaacatccttcttattttgttgactttattctatcataggattatgtcaaaactgtgaatgtttatcatgaatttacgatcatcatctcttcacaaaatatatcaaaaaaagaagtctcacagataaattcctgcaaaacttcttttatgatcatgatacttttgtatcatttaattgttcgtattattctgcgatcgctttgatcttctcaagaccgaagacaatcacaataccgataataaagaatactggatggaacgtatgaagtgtcatcgctgcttttgtattctccagtgttgttggtcccataacgatcgcatataaagaaccgatcatcattccgataacaaaatagatcatcgcacttctatggttctccaatgcacggcggatcagtttgatcacgagtgcgattcctgtcaaaactccaagtccaaagatcactatgactgggaagtaagacaaatgaagatgcatcacttctttgagtgctgtgatcactggaacatataacccaaagatcagaagcattgttgatcctgaaattcctggaagtaccattgctgagattgctaccatcgctactgcgaagatataaacaaccaatgcgatatttaaatgttccacgctaacactgattccttttccagatactggattaaagtatgtgattgctgcaacaagtacaactccaatcactgcccagatgatattctggtattttccttttaatgaatctttctcttctttgcagatcatcggaattgcaaaaatgataagtcctaagaataaagaactgatctcataaatcctgtcatcaaaaatacttgccagaacagaaactgctgctcccattccaacgacccatccaatgccaatccttattaaaaacttaattgcttcaattctttcttcttttgttcctgacatcaaataatcgagtgacatgataaacttgtcataaaaaccaagtaagaacgcaaccgttccaccagatacacccggaacactatcagctaatgccatacaaaatcctctgataaaatttagcatactacctctttctcctgttatgtgtttaatatacaacacattgtattgtaacataacttttttttagaagaaagtatgaaataaaattcacatattttcatttgctgcacgaaggatcgtagcccctccagcaacaatgtctccatcatagaatacgactgcctgtcctggcgtgatcgctctctgtggttcatcaaagacaactcttacttcatcttcccctgtcatatagactctgcaagggacttccggactattatatcgaatcttcgccatcagtttcataccatcttcaaactctggtacagacatacagtttactttatttccatataaaacattggcaaacagatcctgtttgtctccgactacaacttcattcgtatctttgtctactttgatgacatatcctggtttcttcaaggataatccaagacctcttctctgtcctactgtatagtaaatgatccctttatgctctcctaagacattgccttctggatctacaaatttcccttttggaatctttgttccagtcgtctcttcgataaattcgccatagttatcatctacaaagcagatatcctgactgtcaggcttgttggcaactaacagtccgatctcttctgcgatctgtctgacttcatcttttgtgtatgccccgatcggcatgagtgttttagaaagctgattctgagtcagattatataatgcataggtctgatctttcttctgtgtcttagaacattttaatgcataacgtccgttatcaagctttgtgatctgtgaataatgtccggttgcaatatagtctgctccaatgtctaagcaacgctttaataaggactcccatttcacataacggttgcatgcgatacatggatttggagttcttgcatttaaatattcttcacagaaatagtcaatgactttatctttgaagtcttttctaaaattcatgacataatgaggaattccgatcatctgtgctacacgccttgcatcatcaacagctgatagtccacagcatcctccattctcttcctgaacaaactcatcttcttcctgccagatctgcattgtcacaccgatcacatcgtatccctgtttctttaagagatatgccgcaacggatgaatcaacgcctcctgacattccaaccacgactttttctttcacaactgcctcctagtattcctcttcttcttcaccttcactgatatctgttttaggtttttctaatccttcgatcttgataccatttttctcagcataatcccataatgctgcgtgaattgcttcttctgcaagtaaagaacagtgaactttcactggtggaagtccatctaatgcttccataaccgctttatttgttacttctaatgcctgctgaatgttctttcctttgacaagctctgttgccatactgcttgttgcaacggctgctccacatccaaatgtcttgaatttaacatcctggatgattccattatcatcgatatctaaatagattctcatgatatctccacattttgcgttaccaactgttcccacaccactggcattttcaatttctcctacgtttcttggatgctgaaaatgatccattactttctcactgtacattatgattcctcctgatcttatctataaattctactgaaattttattttcattattttcctctatggaaaacctcttaattatttttctttacaaaatcttcatataatggtgacattgttcttaattttgtcacgatctctttgatattgtctacaacataatccatatcttcttttgttgtttcttctccgatcgtcatacgaagtgatccatgagcgatctcatgaggcagtccaatagctaacagtacatgagatggatctaaggatcctgatgtacatgctgatccactggatgcacagattcctgccatatcaagcatgatcagtaaagattctccttcgataaactggaagctgatattgatgttgtttggtactctcttttgtgcatctccatttaaacggcagtatggaacttctgccaggattctcttgatcgcatagtcacggacttctgtctcatgcttgattctttcatccattgttgcaaatgcgatctcaactgcttttgcaattcctacgatacctgtgatgttctctgttccggcacgtctttttctttcctgtgctccaccatgaatgaaagaacgaagttttaatccttttctgatatataagaatccgattccctttggtccaccgaatttgtgtccgctgacacttaacatatcgatattatattcatctacattgatcggaatctgagcatatgcctgaactgcatctgtatggaataagattccatgttcttttgcgatagctccgatttctttaattggctggatcgttccgatctcgttgtttgcaaacatcacagagattaagatcgtatctggtctgatcgctgcttttaagtcatctaattttaagattccgttctcatcaacgtcaatatatgtgatctcaaatccttttttctcaagatattcacatgtatgaaggatcgcatgatgttcgatcttacttgtgatgatatgttttcctttgtttgcataagcttctgctgtacatttcaatgcccagttatcagattcagaaccacctgctgtgaagtagatattctctgctgttgttccaagtgatcttgcgatcgtttctcttgattcgtctacaactttacggttatttaatgctggtgtatatacactggatggattccagaagttttctgtaaaataaggaagcattgcatctacaacttccggtcttgttgctgtagtagcagcatgatctaagtaaatgattttcttttccatgattatgattcctgcctttcttcttgatcatatttggtatgtatttcgattgattcttccatcaattcttgtaaagtgatcgaatcaaccgcctgttgaacgctgtcattgattcgttgccaaactgtcttggtcacacagaattttgtgccgctgcaagtcgatgtgtctccggtaaatgctgcacagtcgattggtgttaaatctccttccaaagtccttaaaatatctcctgccgaaatatcttttggatctttatctaacatatatccaccctgtgctccacgaatacttttgatgatccccgctttcttcagtttgggtaataattgctctaagtatctgacagaaatattctgtctctctgcgatcgcactgatcggtaccgggctgtcctgactgtatactgcaatgtctaccatcgctcttaatccatagcgtccttttgtcgataatttcattctctcacctcaatcccgactatataactcggatttcatttgttatcttaacaaagcatgtatcttatgtcaacattatttgtcatatcttttttttttatttcatacaatgattaaaaatggctggtatttcctatgaaaaaggcaagcccgtttatttgcggaactgtgatcttaacactctctaattttttttcaagactcatcggcttctataatagaatatttctggcaggcgtgatcggtgcacatcagattggaatttatcaattgatctttcctgtttatctccttgggtttgctgtctgttttcagggatttcagatcgcactttctaagatcactgctgagaaaaaagctacgggaaatattaatgctgctcgttatgtacttcgcattacgatcattcttacactgtgcctttgtatcattttctccttctttgtattttggtatgcagaactgatctgttcagtttttcttcatgaaccaagctgtgtaccatgcctgagacttgctgttcttgttcttccatttgtcgggatcaaaaactgtattcatgggtactgccttggaattgagaattcgggtgttcctgctttttctttgtgtctggaacagatttcaagggtatcctctatctttttactttctgtattcatgatagagaaaatgccagttcctgcttttctagctgtctgtggaatggctgttggagagattgtttcatttttctttactctgatcttctatttcttacacaaaaagtctgctgacagcttgccaaaatctactctttctgcatcaaaacgttccgtatttcatgaactgttatcccttgggatcccactgactttgaatagtttttctgtcaccttattacagagtgtacaaagtattctgatcccaatgatgttatatcgtttttatggaaatcgttaccgcagcgtcgagatctatggcatcttaagcggcatggcactgccttttatcatgtttccttctacgatcaccaatgcattatctttgatgcttctgcctaagatttctgctgccaaaactcacaacgatccctcttatcttcgacgttgtgcgatcttacctcttatcttttgtacatttcttggaattggagcttttggcggattctttgtttttggaccctggattggaaatttcttttttcatgatcctctttgcggaaagtatttaagatcattgtcttttttatgtccgtttttgtattgttcttccatcttatctaccatattaaatgggcttggaaaaacaaaagatacactgcttcataatagtgtatctcttgtgatccagatttgttttattttatttgcgattcctttgtatggagtgaacggatatttgtggggactgtttcttagttgtttgtttctttgcttcgtaaattatcgaaaagtaatgctgcatgtatgagtcaaaaaatagctgttaccgaattcccaaaaatgtctcatacagatccacttgaccatacccccattctctgtttggatagattctttccggatctctccttgctccccggatcagataatttttaattcttgtcgtattgatctgcatatcatttttctgcatgatcccccattctaacatcaatgctgctatacccgcggtaattgctcctgaaacgcttgttcctgattttctgccatagcgtttccttggtaatggtcctagaatttctactcctggtgctgtaaaatctggtttaaccgcatttcttggaaatcccctgctgctgtcgatcgcgaggcttcctgtgttggaattataacttccacaagatatcagcaatcctgtatttgatggtgctaccagtgtattatatggtgtggattccaagaaaaatgtatcttcgctgataaagtttgtgatcggaagccacagatcaaattcacgatttcctacgccatcgtcactgacatagatgttccagattcctggtgccggattttgaaatctcataacgataactggagctcctgcagatgtatctaccgtaaagtattctacgatcagccttgttttttctaataaaaatgttacatatctttgcccgcttaacccaccttgtatcctacctgttttctgtcctgacggtgactcaatatctacataatatcggttcggagctaatccccatagttccattgtaaatccatactccgactctccaactttgacttccacttttgcatcattttgtgaaacctgaccactgtaatgatgtcttgcctgcccctcatttccagcgcttgtgacaactgcgactccccgaagcatcgctctgcctgacagatactggtctaatggtcctgttccaagatgagacgcaaggttggtgccaatgcctaagaatatgacgatcggtctttgcaactgttctgcaatatgatcgatatagtgaactgcaagcatgatgtctgtttctgcatatgcttcgtattttggatcaatacagtaatattctttcaaatagtcttttgcttttcttaatttcactacgaccaatcctgcattcggagcaattcctgaaaatcctgtttcgttatcctcatttccagcaattaaacctgctaaaaaagtaccatgtccggattcatccttcgatggtactttctgctgtggcacgtcgctttttagtgcctcttctatttgttcttttgtatattctgtcccatatcccagaaatgtatcttctgagtcaccttctattgtctgatcccagagagaatatatcttactgctgccatcttcatagcgaaatgctggatgttcatagtcgattcctgtatcgatcattccaactaaaacaccatttccataaagatccaagacactccttctgacttgcgctactccgacatcttctaacatctgtgtgtccatcagaccgaaacaacgtggaatcgtattatatggataattttgtccatatatggatgtccgtccgttctttttgacatatgcgatcgcgaatctctgatcgatcactgtaatacattctgtgttgaattcttcttttacatagtcaagtactccactgtattctccgataaattcaaaataatcattactctgggctgcattttcacatagcataggaatacctcaggttttttatagtttatgcacccaatttccatctgttaatctatgtgtatgatacaatttatgaaaattaatttaaatacgctccgtaataagtcccttctgataagcccataataactgttcgagatctgccactttctcctgtagtgccttgccattatcagtatccataacacatttacgtttcgttaccttattaataacgatcgtatctgaatggatatctgtttcctctctgatcgctatagttcttgatacaaatggttcgtgtgctacgagttttaatccgtaagaattagacactaaggtataacctgcgatccctgttgtcttctgatatgctttcgagaatccaccatcaatgacaaatagctttcctccacatttgatcgggctttcgcctttctttactgctactggcatatgcccgtttacaatcttgcctgtcgatgtatctaatccgaattcttctaagatctggttgatcactgcttcattttcataccactgatagtaatagtctttcttttctttcttaagatctgcatcatccaagaaatagcgctcaaacgttgccatctttgcttttccgtagactggtgagttttcatttgaccagatgaaccacatgatgtcttgtccatattttctggctttcatgtctttttcctcataatagccctgtcttgccagatgttctaagacgtcataaagttctttccctgcgtactttcttccttcaatctctacttcacgaaatgttccatcttcgtttagcggtacacagccatgatatagaagcattccattgaataccttgtataagtgtccttttgcaaataagaatcttatatgttcctgaagataagcacagtatttaaatacagttaccagatgttccatcacatattcttcttctttggtcaatttatatggatcatttggatcgatcgttggaaaattcttatcttttaattcatattcttttccatctaatgtgatcgttcctttttcatagtcgatcttgtctaatagtaatctttgatccatcaaaaagtctggacggcgtttgatcaattgaccttctactttaaactgcatgatcgcaatggctttgtgcatcttcttattcaattcttcttctcggatattactctcatccacttctccagatgcatggaataattcacattcatcatctttgtaacactccaatgcaaatcttgccagcgggatcagattgatgccataaccattttccaaaacatccagattattgtatcttgcacagattcttacaacattacaaatacatgcgcggtgcccagatgcagctcccatccataaaatatcgtgatttccccactgaatatcaacattcactgtcttcatgatgcagtccatgatcctgtgtggaccagatcctctatcgtaaatatctccgatcacatgcagatgatcgatcgtcagatcctggatcagatgggccatcgctgcaataaactgtctgacccttcctgtcgtgatgatcgtctcaagaatctgctctacatagcgtttcttatcagctctccggtgttctaccatcaattcttccatcacataggcaaattctggtgacattgctttccttacttttgatcttgtatatttattcccgactgatcttgcaacatgaaccagacgtaccatcgtatcatgctgccattcaagaaggaaattctttggtaattcttcctccattaaatccatcttctgctccggataataaataactgatgccagatttttcttttgctttgttgtcagtgtattcccaaattcatcttcaatcctgcttcggatcgctcctgatccattccttatgatatggctgaatttctcatattcgccgtgaacatcagaaacataatgctctgttcctttgggaagatgcaagattgcctgaagattgatgatctctgttgaagcagctgcgacatttggataacgcactgccagttcctttagatacttcatctggtccatgagaaggctcccctttcgtttacgcttttttgattgttctgtaatattatagcattatttttcatactttcccaataactttctttcattttccttaattattatacttttatgaaaacaaggctgtttcttatgttatactgtaaacagcctaggtaaaatctatgtaaatttccatatttactgtccttgatcttcacaggctacttacaataaggaggagattatgttaaaaaagaacaaaagcattgcactggtgatgatcttagctttattgatcatcacatcttcttgtgcaccaaaaaacacacaggcagaaattgataaacctgccaaaacaagtgcctcttgggagaggaaactttgcagatcaaaacttgatatcatcagttcttacggtgatgatcaggcatttcacccaaaagtcttaaactttgaaaaaccatggaacggctatcgctattggatggcatacactccatatccaggtgcagatcagcgaaaagaaaatccacacgtctgtgtctccaatgacaggattcattggaagccatttgaaggagagggaaaagctgtttcacttgatccattgaccccatttgaagaccctgacaaacagtataattcagacacccatcttgtatatagaaaagatatcgacaccttagaatgttactggcgccaagtcgataatcgtaccaggatcgataagatcatgaaacgtacaacaaccgatggtatccactggagtaaagctcagaatgtattggtttccgatgcacgcactgatcgtattctaagtccggcgatcatttatgaaaacggacgatataagatgtggactgtcaactgtaaaagaaaattccctgttttataccgtgaaagtaaagatggttttcattggacaactccaagcacgattcagttaaaatatccatctgacagacttcgaagctggcatctggatgtcattcatacagagaaaggctatgaaatgctcgtcgttgccttctacaaagggcataggcaccgggaaatgaatctttattatacttcatccaaaaatgagcatgattttaagaaatgtattacgatcttaaaaccatctgaaaaggaaaaagcatgggacaaccgtggtatttaccgtagcagcttttttgtggaaaatggaatttattatatttattacagtggtattggatatccaaaagggccaaacagctctcagggtgttggactcacatatggtccatcggtgaaaaacattcatggttacgatgcataaaatctcttgacgttataaatattcaggtgtaaactgttagcaataagaatttttagccgaccatccaaagactggctaacgactctacaatacgaataaaaggaagtgcattaatattatggaaaagaaaaatatcgactgggctaacatcggtttcggttatatgccaacagattaccgttttgtagctaattacaaagatggagcatgggatgaaggtgaattaacaacagatgccaacatcacaatctctgaatgtgccggtgtattacagtacgctcagacatgttttgaaggaatgaaagcttacacaacagaagatggacatatcgttgtattccgtcctgacttaaatgcaagccgtatggcagattcatgcagaagacttgagatgcctgtattccctgaagataaatttgtagaagcgatcgagaaagtcgttgcagcgaatgaagcattcgtaccacctttcggttctggtgctacattatatatccgtccttatatgttcggaagtgatcctgtgatcggtgtaaaaccagcaaatgaatatcagttccgtatctttactacaccagtaggaccatacttcaaagaaggagctaaacctattactatccgtgtcagtgattatgatcgtgctgctcctcgtggaacaggtaatatcaaagccggattaaactatgctatgagcctttacccaatcatggaagctcatcgtcagggatttgatgagaatatgtatcttgacccagcaacaagaacaaaagtagaagaaacaggtggagctaacttcatctttattacaaaagatggtaaagttgtaacacctaaatctgacagtattcttccatctatcactcgtcgttctttagtttatgtagccaaagaataccttggacttgaagtcgaagaacgtgaagtattatttgatgaagtcaaagatttcgctgaatgtggattatgtggaacagccgcagttatctctccagtaggaaagatttatgatcacggtaatgaaatctgcttcccaagcggaatggaaaagatgggacctgtcatccagaaattatacgatactttaacaggaatccagatgggtcatattgaagcccctgaaggatggatcaaggttattaaataagactttcgttaatagaatattaaataacataaaatgcagccagacagttattgatttaactttctggctgcatttcatttatacatattggcgtatcattcttatttactgatctcttagatgaatctctggatttccatgattctcaatataatctcttgtgatcgttacgcttccgatcgtgtcgtcttttggtatctcgtacataatgtcgagcatgaatttctcgatgatcgcacgtaatgctctggctcctgttttctttttcagagcttgttctgcgatggcctccagagccccttcgtcgaattctaattttacttcatctaattctaataacttctgatactgttttaagatcgcattctttggttcttttagaatcttgactaacatctcttttgtcagtccttctaatgtaaatatcattggaagtcttccgataaattctggaatgaatccatattctctcaaatcttcattcgtaacctgtgcaatgatattttcttcttcatcaaaacggtcttttaaatctgctccaaatccgatcgatgttttcttcatcagacgttttttgatgattccttctaagttcgggaaggctccaccacagataaaaagaatattccttgtattgatcgttgtgagtggcaccattgcattcttgcttgtagctccgactggcacttcgacttctgctccttctaagagttttagcaatccttgctgaacggattctccactgacatctctgctgtttgtattttgtttcttggcaatcttatcaatctcgtcaatgaatacgattccatgttctgcacggtctacatcgttatctgccgcctgtaagagctttgataaaacactttctacgtcatcaccaatatatcctgcttctgttaaggatgtagcatctgtgatcgctagtggtacttttaacagtcttgcaagtgtcttgaccagatatgttttaccacttcctgttggcccgatcatcagcatattcgatttatcgatttcgatctcatccattgtgtttgtaaccactcgtttataatgattgtatacagcaacagacataactttcttcgcataatcctgtccaataacatattcatccagcattgccttgatctgatgtggtgctggaatatcttttaatgtaaactctggctcttcttttttgtctttctttttcttctttacttccgcttttggctgcatgctctgcatatcgttcatcatctttgtgatatccatgctgtcaagatccatatttcttgcgtcaataaatccaaactgaccattgcccatagaatttaatgtcctctgcatacaatctgtacatataaaaatattattcggaagttctaacatcttaccggctgcagattccggacgtctgcaaagatagcagtaatgttccacatctttgtgttcatcctcatttgttacttcctcaatctcattttgatttttctcttctgacatatgattgtcctccactttttatataaaatcagccagaaaacccatggtctttag

SEQ ID NO: 782 - DNA, 1597 bp, Unknown
  gut microbiota DNA sequence
tgaatggcgttagactacttttacttgcgtcattacagttgaccttgctgtaatgcgtttgcaattacttaattttggtgttttgtagcctcttggcattgtactaaagtcaatcttattgccatcaatatccataagaattgcatatcccgtagacattcttcctttgataaagtaatcatttccaaaataccgaaccttatcaaactttctaaaaccacaaatcttatctgtaacaataggttcttcagaacgaatacctttagtcttttgaaaatcaccatcagaaacacatttctttttgtaaagattactctttacattaaaagcatttccttgtgttgcgatagtacaggcatcataataatgttctttgtctacacctaaatgcaaacgattcgcttttgttacatatccaaaagtttcaatagcatttggatagaatctgaaaagctgcttacggatagaattcatctgtgtagcatatttaaggttacccttaactttaccactcaatttgggattgatctttccactatgcaagtctttatggcaagtatgacataaagtaagtaaattactttcttcatcagatccaccttgactgcgaaatacaatatgatggacttctaatttgctatccttatgcttgcctttacaacattgacaagtatagttatctctattaagcaccattgctttggtattttcaaatccataattagcacctttttggtatccccatggtctcacttttgggttggcaagacttggatttttcataagctgcatatcaaactgacctgtttcaaataccatttctgtaatgggaagaatagactgaatgtattctatttcccttacatggctgtgaagtttgctctgcattgtaggactaaatctatcttttttaatagaacttgcacgatttaaccatcttgcttttctataacgagttttacgatttcgtctatttctgcgatactttgctctttgtgtcattttgtcagtaatgtcgtttcttacaacaacttctgacatatagacaatatctccattgtctttacttacagcagtgccaatagttccgcttccagtatctacaccaagagttaagccttgagtgtaatttgttgtttcgtaagtcaatttaattgtaaatggatcacgcttcttaacttttgctttgccttgcttaagtaataatcttgcaattggatcactacatggcattagtggtttaccatcttgtgaaatcacataaaccataaataagttcctccttataaatactctaccaaatggtaggtgatgcgtactttgctgtactgttaccatgcaactgttccgacttcaactcgacaatgatataaaggctttttcgcatacatatcacaaggctgttcttactctgacctaacttaaatatgtacgatagagcgacggtctgttgcgtcaaccgagggtatcatgacctaaatatcgtagtatccatttctgaatgcttagtctggtgaaccatttgacagaagcccactaccttttttaggtggtgggtagttcactttgaatagagtacttctcctataatttcaat

SEQ ID NO: 783 - DNA, 9022 bp, Unknown
  gut microbiota DNA sequence
tttatcatatcttcttttttcattctcgtaaaccccaaaatatattcttctttcaatggttttccttctatataataccatgagagcggatagatcatcacgcctttttgtcttaattttttttgaaactctttttgatcactgacagggaatcttacgatgatatgtgctcctgctccatgaccatatatttgaatatcggagtttaacttcttaatttctttgatcaatagatcatgtttctctttataaatattcctcatacggtttaaatgtcgttcaaaatgcccttctgtcagaaacagcgtcaaaactttctgatcgatccttgatactgcacaggaaaatgtctggccaatctgctgatatctctttgcaagtttctttggaagcaccatataacttgctcggatcgctggtgcgatcgcttttgaaaatgttcccatgtagatcacattttctccatcatctaatccctgcatcgctggaattggttttccatgatatctgaactcgctgtcataatcatcttcgataatataatgatctggatcttttttagcccatcctaataattgacttcttcgccctattggcatgatcacgcctgtgggatattggtgtgccggggttacatatgctaagttcgcatctgttttctgcaattgttctacacacattccactttcgtccatggagatcggatgaatcttaaaatccaattcctttaagatttcatacgcatttttgtaaactggattttcaattccaatggaaactttttctcctaaaatctgacgtagtaaaaatagcagattctccattcctgctgccactacgatctggctggcatgaacatgaacacctctggattgtctcagataatacatgatcgctttgcgcaattccaaatctccttgaaaattccccttttgaaataactcactgttatcattgatcatgatctcttttagtagttttctccagatatgataaggaaactgttccatatcaactcctgctgatgaaaagtcgtatggtatcttctctggtcgtatttcttcttcctcttcttcgatcttaactggaatgtgaagctctgccagttcttctacctgacagacaaagaaaccacgttttggttttgattcaatatatccttctgcacaaagctgtgcatatgcagtgtccacagtattcctgctgacatctaaatgtttggaaagtctccttgcagaagggagtctggccccaaagggcaaaactcctgttataatttcttctttgatagaattataaatctgctcatataacggctctttttttgaagtatcaagtgcaacgatcagcatataaccacctgttttcctctaatttattctgcatttgaaacagtcattttctctattacaactttcttcactggctggcttacttctccacttccattatcttgtgtcttgcatcctgaaatcttatctaacacatcatatccattgatcatttgtccaaacacagtatagcttcctgttaaagatggatatccaccctgatccaagaataacgcttgttgtttctttgtgagctctacattcccttcttccagacctttcttcgctgtatctgctttcgcctgcacgataaaaaactgacttccattcgtatctgctccggaatttgccatacataaagaaccgcgaagaggcagaagttcctcacatacttcattatcaaagtcttctccccaaatactttctccgcctgttcctgttcctgttggatctccactctggatcataaaatcattgatgactctgtgaaagatctgtccatcaaagtatccattcgatgcaagagttacaaaattcttcacagccaaaggcgctttcttcatgaagaacttaaactgcatttctccataacctttgactttcatagtgacgatcgtttctcccttttgtgcatccgcaagttggtctgttttctttgctgctgtgatctttggtactttatattttgattgcactttcatctttgtttctgttgttgcttttgttgtatctttactgccgtcttttgcagatgaacacccaacacaaagtgtcatggctgccatcagacatcctgctgctatgatctttctcatgtttgctttcctttctgttttaagagattgttcacttgcgatcactgttcccggatcttatctgccggaaatacaattcctgtctgtcttcgcacttcatccgtgatatccatctcgatctcggatgctcttaaaaattgatgatccactttatgttctttgatcaatctgataaaatcttttgtttcatagatcatcggattatctcttttgtcaaattgtaattcttctgtttctccatttctatagtagatcgtgatcttcttgatgatcggacattgttcaatgatcatgcatccattttcaccctgaatctgtgttggcagtttggaatctgtaatcttggaatatatgatctctgcctgtttatcaccatacgatgcgatcacacttcctgcaccatccactccattttcaaggaacaaactgtctgcgagaatcttttctggtttcccaaataaacttgcaaggaaatggatacagtaagatccaatatccatcagtgctccattcgataatttgggattaaatgcgttttcaatgatcccttttttaaatttgtcatatcttgaagaatactgacaatactgaatcgttgctcttctcactgttccaatcttatgaagattgtccatcatcgcatggaatcctggagaatgtacattcttcatggcttccataaatacaactccttgttctttggctgctttgatcaggatatctaattcctcacggttggagcaaacaggtttctcacaaagcacatgctttccgtaattgatcattgtgatcgaatgtgcataatgcatataagttggactcgctacataaaccgcatcaatctctggatcttttgccatctcttcgtagttatcatatactttttctacattatattttgctgcaaactgcttccctttttctaaatttcttgaatatacagctgttaattggatttcatctaattccaaaattccttccatcagccagtctgtaataaaattggttcctatcgttgctaatctgatcattgattctcctccatcatatatcttatattttataattgtgacagtgtaatgtcaatgatcacgcctaccgcataataatatacacactatagcaaagatacatgcagatcattgcaattccttcggttcttgaaatcttttttttcgttgctccaaagatccatactacaactgaaaatacgactaaaactatgatgtcgatcacattttcaccaattagctgtaatggactgatcgcagatgcgattccaagtaccataaggatgttaaagatattggaaccgatcgcattcccgaccgccatatcaacttcattttttcttgcggctacgatggaagtgaccagttctggaagagacgttccgatcgaaacaatcgttaatcctacaagattctggctcattccaaaatctatggcaatcctgcttgcggcatcaactgtaagatctccaccaaatgcaatggctgctgcacctccaacgatacataacagactctttggataagacatgatcatcaattcttcattttccattgtttcaagttgtacgacttcctgattatttctggcacgcattgcctgaaaaaccatcataagaacatatacagcaaatataataaggaaaatgaatccatcaaaatgtccaaggatcatatgtgatctatctccgactgcaagataaccaaatatgagaagtaatattgcacatacaagcgataatggaatatctcttataattgtttctctttttacaccgatcgttgccagaattgaacagactccgatcacaaacatcatattaaagatattagaaccaactacattactgatcgccagtgcattattattagcaatagacgctgttacactgactgcagtttctggaagtgatgttcccatggcaacgatcgtcaatccaatgataatagaaggaacttttaaacgtttggcgacacttgaacttccttctacaaaatagtctgctcctttcattaaaaatgcaaatcctatgatcagacagatgatcactaaaaataatggggattggttgataaatttctccatttgtttttctcctttcaaaattgtctttttatttgtacataagaaaaactcatgtatgttccagatgtactataagaacatacatgagtctcattctttaatatttgccaggctgacttgcttgatatctgcgagtcattaccgagtctgttgacaaatcacgtctttgtatgacgcgaactactccctcatggaatattgattgtttgattactttaacaaaaaaatattgatctgtcaagtatagtttaaattgcaaattgatacataaaaacgtataataaaattaattatgttgattttgatatataatacgatcaacaaatggagggggactattttgatcaaacaatcatacaaaactaataaaaatatttccagactattttatattttgatagcgataatctttgtctggtttattggaatgcagattttgggacctgatgaacagttttttgaccaatctggacattctatcatctataatggtacttttacatggaagaaatccgatggcacaaaacaaaacatttctgttcctggacgttataaagttccagcaaaacagacgatgatcattactactacacttccagatgattataacgagaatgtgatcgcgatccgttcttcccttcaggatgtacgtttttacattgatggaaaacttcgaaaggaatataacgcaaaaagtctgcaccgatttggcaaaaactctgccagccgttatatattctgcaatacttcgtctgcagatgccggaaaggaacttcgtctggaacttataacatatacgagtaactactctggtgttgtcaatacgatttactgtggagatcaaatgcagatctggagttatattttcaatcataacttctctggaaccgtgatcggatcatttatcttttttgcatcgattgtcacaatcttattcagtatcgcccttggaattgtttacaaaaccaagtttaatatggaatatcttggatggtgtatgcttatgggttctgtctggatgatcggagaatcaaaaatgcggcagatccttgttccaaatgcatctggacttgcaacttcatgttttattatgctcatgttatgtccgttgccgatttccttatatgtcaataatcttcagaaaggtaaatataaaaagatctttcaaccgatctgttttattgctttattgaattttatcatctgtacgatcctgcatcttacaggcgttgcagattatattgagacaatgccagcagcacacgcaatccttattattactttccttgctgtcattcttactttctggatcagatattggaatcatcggagtcgaagtgattgcctgttgttctttggactgcttattacaatgctttctgtgatttttgaagcaatttctgtatattacaaagtatctgtttctggtgtatttgtcggtatcgctattttgatcttactgtttataaatgtgatctatacgatccatatcatccgtgatatcatcaaacgccagcagcaggaagaactcgataaacgtaaaaaaaatatagaagagatgtctctgcagttgatgcagatgttatccaccacgatcgaggcaaaagatgaatatacgaaaggacattctcatcgtgttgcagagtattccgttttgatcgctcgtgaacttggatggaatgaaaaagaacttagtaatctaaaaaatgctgctcatcttcatgatatcggcaaaattgctattcctgataccattttaaataaaccaagcaaactttctgaggaagaattttctattattaaggaacatacgatcattggtgcaaatatcttaaagaatatttctctgatcgatcacgtacaagaaattgtacgcaatcatcatgaacgttacgatggaaatggttatcctgacagtttaaagggaaaagaaattccactacatgcaagaattgttgcggttgctgacagttatgatgctatgagttcccagagaatttaccgaaatcaacttccaccagaaaagatcatacaggaattagagaataataaagggactcagtttgatcctgagatcactgatatctttttaaaactattaagggaagaccgtattcatgtcaaagaagatcatttaagtatcactgagaataccaagattcctgaagctgaaatcgaaatgagtcaattcatttctgacatcatgagcacgatccgtacacaaaaagccaaagaaaatctcgactttttaactgggcttccaaccagaaataaaggtgagcaagccattgcgcagttgatgaaacaccacagcggatgtcttgtctttatggatatggacaatttaaaaaccatcaatgacatctatggccacaaagctggtgaccgtgtattgaagcttcttggtaatctattattagaatattccagtgaatgtcttgcctgtcgtcttggcggagatgaattcctattatttatgccagatgctgatcaaaatagtattacagaagttataactgctatttttaagaaatttaatactcgaaaggaacaagatcctgagcttcatgctgcatccatttctgccggactatatatgtgcaatattggagattcttttgacgaatgttatacaaaagctgataaagcactatatttcgtaaaacaaaatggaaaaagcgacttctcctttcatgaaaaataaagcaccaaacatataaagaagagagtggcaagaatttacttttgccactctcttctttatatatggaataactgaatcaacacaagaccagaaagtccataatatgtgataactgcaactagatcattgatagttgtgatcaatggaccagaagccactgctgggtcaatattgatcttatgaaagaacattggaatgatcgttcctacaaggcttgagatcaccatcgcaacgatcagtgaaattcctacgcaccctgaaatcaggaatgaagaaatccatgcataatgtttaaataaatgaatgtacacccctaaaaatacgagtgccatgattgctaggctcgctccatttaagaaaccgatcttcatttctttaaataacaaagcaatctttttcttacctgacagattttcatccattaatacgcggattgttacagctaaagactgtgttccaacatttcccgccatatcaagtaccagggattggaaacagataacgattggtaataccgcaacaatagattcaaacattccaacaactgaggatactgccattcctaagaataacaatgcgatcaaccatggaagtctcttcttcatactaactatcgtgggttcatttaaatcctcctcttctgttaaaccagcaagttttgcatagtcatctcccatctcgtcatcgaccaattctacaatatcggaagatgttaagattcctgcgattttcttatcttgtgtcagtactgggatggaatcttcttcgtaatctgttaagatttccatacattcactgattttttcatgttcatatacataaggataagaactgcttatgatgtcctgtagattatcatgttctcttgcgatgatcaaatctttcagatcgatcgctcctgcaaaaatcccattctcatctatcacataaagtgtctggatattatcatgttctcctgcctgctttacaagtgtactcattgcctcacgaatcgttacatcatttcttactacgatataattattcgtcatacaactaccgatctgatcttcctcgtaagacagcagtttctgaacatcttcttttgcttctttatccagtctctttaataatttgtatttatcttcttcatttaattcttcaaacagatccatcgcatcatctgaatccatgtttgatacaactttcgctgcctgttcaattggcatttcttccagatattttcctggttcctcttcgatataagaaaaaatctctgcaatatctgcaatgtctaaaatgtcatagatacattttctaactgttttatctgattctacgattgcatttgcaatatctctttcgtgataagctgcaatctttttctttaattcttctctatctttcgttgtctgtacgatcttgattaattcttttgcataatctattctatgctgatttcttgcatttttcatgatatcctccttcttttcctaaatctggttgcaaaacaccaatatttaggcacaaaaatacaccgcttcagattgaaattcctaaagcagatcacatactctgttgtgatgtaaagaactttctgtttcgcggtgtatcaaaaaggacatcataatacaaatgttgctattcgtgtatcttcacagagagcagcattcgcatcttatattttcttttttgaacccgcatacaacttcgtcctatacgatcgcaactatccatgaacatacacctcctttcacatcttgactaatatctctcagcattctttgttttcattctgggttatattatcagatttttctgatatcgtcaacctattttactatgatttaacaatcttttccgccgccacagtgtgatcctgcccggagggctttttattgcataggggatttcatcgaaatttcctatgcaataaaaaaagcatccttatctctaagaatgcttgaatctcattattaaatctatatataaaggatataccttcaaaacaacatacaagaatctctctacatctcttacacttcagccttctttggttaaagcctcgaccgattagtaacagtcagctccatacg

SEQ ID NO: 784 - DNA, 445 bp, Unknown
  gut microbiota DNA sequence
aaggatctgaatatggagtttcggataaaaaatataaagaattaaaagcagatggattttttgatggaacgaagttatatcaaaaggcaatcgaaaagagggtaaaaagagattacacatcgttagtacatgagggagtgttctacattttgcaagaagatatggtaacgatcggtggtttgatcatgatctgtttttttgcattgatcattccatatcagctaaaacaacgtttaagacaggttatcccgattctggcaacgacgaaaacaggaagaaggatttatcagattcaattgatagcaagtgcacttgctgcactctttgttggaattcttcaaatggctgtatatgggatcatctggcatttgaagggattatcagtattttggagatgtgagagttggggaatcgcatcaaattcttactggtgtgataagctttc

SEQ ID NO: 785 - DNA, 204 bp, Unknown
  gut microbiota DNA sequence
tcttttacaagttttcttgctttattggcacgtttgccttgtaatttacaactaaatacagttattatctaaactaaatcttcaacaagttcttgttgctctgtcttttcagtatgatcgatgatctcaatattacaatcatatagacttgcaatatattcaactaattcaaatccaaatcgtaacaatctgtctttataaaaa

SEQ ID NO: 786 - DNA, 848 bp, Unknown
  gut microbiota DNA sequence
cagagggaatatttatgatgtgaatggaaaactgcttgcatacaacaaacttgtatatacagtgaatttccagaatgacaatgcatttcagacattggcagcaaagaatggtacatcagaaagttatgagaagaataaagtcatttataaagtgatcaagatcctggagcgaaatggagactcctttatcaatgagattccgattgaatatacaggaagcggaaagtttcgttttacagagactgggtcaaaattaaagaagtttaagagagatgtttttggaattggaaacagcacagacctttcaaagtccgagaaagaattaagagataaacagctgaatgcaactgcagaacaggtttttgaatatttgagaaatggaactcttggctccgcaggaacaggaaagatgtttgatattgataaatcttattccaagaaagatgcattaaagatcatgtctgtcagatacagtgcatttttaagtcgttattctcagtatatgaaggtgacgatcgcaaatgagatcaataacagaagtattgccgagatcaaagaaagaagttcagaacttccgggaatagatattgatacaaagtctattcgtgtatataataaaagtgaggcgatgtctcatgtgatcggatatacaggaacggtcaatacggatgaacttgaaacatataacaaaggaaagaaagaagaagataaagattactattccagtgatgagacggttggaaaggccggtgttgagaagcagtttgagaattatcttcacggagacagtggaagcaagactctggttgtcaacaatgttggaaagatcatcgacacgaccaagacag

SEQ ID NO: 787 - DNA, 2087 bp, Unknown
  gut microbiota DNA sequence
attgcttccccacatatacagctcgcctttgtctcttttattatacacgaaagagaatatgtttggaatacgaatcaaaaattttctttaatagctttttcataaatgaggaataaaatcattcgcacttcattgctatttcttattaattatagtaaaattggtatagtttgattccataggaatcgtattaaaaatgaataaaaataaaggaagtgcagaaaatggaaactatcggaagaaatgatgcatgctggtgtggcagtggaaaaaaatataaaaaatgccactgtcagtttgatgagaaattaaaagaattacagcaggaaggacatatcatcccatctcacgatatgatcaaaactccagaacagattgagaagatcaaagaaagtggaaagatcaatatcgctgttttggattatgttgcagagcatattaaagctggagttacaacacagcagattgatgactgggtatatgaacagacaacatctcgtggtgcaatccctgctccattaaattatgagggatttcctaagagcgtttgtacttcagtaaatgatcaagtatgtcacggaattccttcagaagatgtcgttttacaagaaggtgatatcatcaacgtcgatgtttctacgatctatcatggatatttctcagattcttctcgtatgttctgtattggtgaagtttctaaagaaaagaaaaaattagttgatgttacaaaagaatgtgttgagattggtcttaaaaatgtaaaaccttggggacttctcggtgatatgggacatgcagtgcatatgcacgctgtagaaaatggttacactgttgtcaaagaaatcggtgggcatggtgttggtcttcagttccatgaagatccttatgtaagctatgtttctgaacctggtactggtatggttatggctccaggtatgatgtttacgatcgaaccaatggtcaatatggggaccgacgagttttatgttgatgaagttgacgaatggcagatctatactgatgatggacagccttctgcacagtgggaagttcaggttcttgtaacagaagatggttacgaactgatcgcttattaatattctgatataagcccaaatactatttaaaaaatgaagtattatgaataaataacgttcataatacttcatttttgctattttaatatctttatattactccatgcactataatgtaattgctttccatctactttataagcacgaattcttacataatacgattttttctttttcattccataaatcttaggattgaacttataagttgaaatttcttttatcttagacttgttattcttaaatttcttagatgtagagatttgaatcttataaccatctgcttttttatttttcttccatacaattttgtatcttgtattttgagatttctttatattactgatcactggagccttcaaatataaaatcttttttgtagtactttttgttccagttgactctataaaatcaatggaattagaagcatatgcataaatcttatattgatatttcttaccattctctactgttttatccgtatattgattttcttttagtattttcagatctttccacttactatttcctaattttctctgaatacgatatccatgcgcattatttactttcttccattgaactttaattcctttgttcgtattcaatatattcatgatttttggagcagaaagatattggggtaatgctggtcctggatctatgatatcttctggccaattgcatattatatcagtttctgtattttgttcttcattcttttcttctgcaaatacatcacaatcatacgaatttacgttacaacttattaatataactaatgaaataatcacgatacttccatattttatgaattttttcatctttttaccccttcttttcatctatctgataatatatattataccacaaagaaagaatactgcatagaaagattttttctctgtgccggaacattctaataaaacgaaaaaaaacatccttatctctaagaatgcttgaatcttcatattaaatctatatataaag

SEQ ID NO: 788 - DNA, 903 bp, Unknown
  gut microbiota DNA sequence
gtgaattacccctcccatgcggtacagtagttcctatggaagtggcttctaacagtcgtgacagttacccatttctgaccaaaagattggctgtccgtaccaatcaaggcatattcacttatgccgctatccctttgacgggaatacctttcggattcagtttgtggaatccatacacatcaggagcagaaagaaacgtataatctctggtatctttccagatatcagggatcgctttccgcatgatatttgctgctgcgtgacaatccgcatttaagatcattccgttagagcaacggtataaaccacgtttgatcctctttccagaaaacgaagcatccttatcatcgacaccataggttgggatcctgtcatttgcgatcagatccgctttggaagtataactttcttcctgctctatgattctgatgccggcattcagagctttatatgtgagcattgtccgcaggagagtgatcggcatggagacaaaattctggttgttgatcttattcatattggatctctgcttccagagcagattcacaccaaggatcagtgttccacactggtgttccatacagaagtcaatgatactacgactgatcttgtggcactggtctttcacaaaattggcataatggaaagaaaggtctcttaaccgcttggaaacagcgtgtttcttttcatgaccttttgtgatgatggagacatactttgctctctgtttatggaaccattggatcttggataagacagctccgcctttgtatattgcggatgagtgatcatcacatacgatcgctgcgaagttatctgttccaagatcaatagcacatacatgagatccagaaggatcaaatgcaacatctggttcttccagtgtcagacagagtaaaaaac

SEQ ID NO: 789 - DNA, 3286 bp, Unknown
  gut microbiota DNA sequence
tatgagatagaaataagataagaacaaatatttatatctcatacaacggaacgctattcaaatcactacagggtgtgtatgttaaacggtattggataataatttttgtattcgtaaacggaaatttaaagagatgcataagcaccgatttatcgagatgtttatgacacataataacattaccttctgtttaaaaatcccctattttacaatcaatactgttctccatacacatccacttaaattttccaatcttgtaattgtccacactttagacttctggtatatgataaaaaataaataaacgattggaagcgcagcattagaattttgccacgttttttacggattcgcagccggcttggtgcgttgtttgagcctcaaagagttctgattttcaatacctttgaaggcgagttacgcaaggaaagccggcgaatcagcgatctgtaaaaaacgtgaggaaaattctctagctgcgcttccaatcgtttatttattttttatcatatactcgaaatctacagttggccaacttacaaattaaaattttatacttctaccatattcatctgtttctttcatacactgaataaagctttccttcgtaaccccagcattctcaggtttgaagtcccattctgtagtggtcattgctttctctgccattgcatcaaaatcatcttctgtgatctcaatgtcttcaaagcatactggcaatcccatacttaagttgaattttgcgattcgttctctttcttcgtattcttttccgaatgttaacaggcatagcacacctaatgatacgatttctccatgtaaatgtttttctccgccttttgtaacggttgatccgtaatatacacagtgtgcaaggcttgagttatagtaatattttggtgctgcacttaccatgttagatactaatcctgtactgatgatgatgtctaacgctacctgttctaattcataagatactttattcgctcttaagtcgtccaatgctttctttccatattcaacaagtggtgtagtacagatcttacttagctgtactcccatcattggtgtatgggataattcgtcttctttggatgcaaatactgcttcacattctttgcttaatgcatctccgattcctgcccataataattcttctggtgaatcagcgatgatggatgattcgatgaatgtatggtttgcattctttggatagtaatattctctgaatgatccatctgggttataaattacagagattgctgtgacagatgcacagtttgatgctacggttgggaagcagaataatggtttatccatttcatttgccacatatttacatgtatcacaggcacgtcctccaccgactgcgaagatcatgtctgctttcttgacaacgtccatgtcgatcaatgcgttaccattttcataggtggaatcaccaccgtaccagataaaatcaaggatttctacatcggaatctttgattccttctaagatcttatcttttgctttagacatcgcaatctttccaccgatcacaacagctgtttttccataaaatcttgttgtatgcggaatctctttataacatccctctccgatcgtataacttggtaaattcacactataataactcatcttgttcgttgccttctttctctttattcttttgactctttatattggctacattatagtcctcaattctcaaaaaatcaaagaatcttgtgttctttttcttattcatgaattttattccacattgataaattttacttgatttccatgcaactttatgacattcacaagatcagcaagtttcatccagatcgttgctgtattatcatttggatggactgcaatgtattcatattctttcagatcttcgtcaaagaataccggaatcacacattcctgatcgttcaaaacgcctaacggcgaaacagatccgggttcaatatttaaatatttcattagacgctcggctgaggcaaaacttagtctggaacttccaatctcatctcttactttcttaaggtccgcctgcttgtcttcccgaatgatcacaagaaaatgatgctttccgctgccatctcgtaaaaataaattcttagcccctattccattctcatgattccacaggtcagagtcttcgatttcatcgactgtgtataccgcttgatgttcaaacatttcatattcgatgttctgctcatttaaagtatctaacacgatttttctattttcattcattttattcattatcttatctgctgctgtccgcttgctgcataaatctcgtaccattcataatgctctaatttaacatccattgctttcactgcagattcaatcctctcaacctttctgcttccaacgatcggcattgcctgtactggatgatacatgatccatgcatacacgatcgtatctggttcacagttatgtctctcagcgatttctttgatcttatccattgctttcttacattgtagatcatcttcttgaaataatcttcctcctgcaagtggtgaccatatcattggatgaattttattaactgtcaaataatccatcattccagaattgaaatgttcaaaacatactgggttccattcaatctgattcgttacaagtgctccgtcaaccgctttattcattgcatcaaatttaaatggatcaaaatttgacactccgatttctttgatcagcccttctttcttcagatccagcattgctctgcctgcctcccatggatctaaaagagggtcttctctgtgaattaaatataggtcaagataatctgtatgtaatctctgaagactttctttacaggatcgtacgattctatcataagttgtattataatacccaaatgattctccattaatttcttgtttgtaaattcctgtttttgaaatcagctctacttttccccttaatgccggatctttggcaaatgcttcacctatctgagattcacataaagtatctgcataaatctctgctgtatcaaaagatgttacacctaagtctatgcttgatttcatgttatcaataagttcgtctgttgataattcccaagtatccagtctccaaaaacctcggatgatctgagataatgaaaggttatctgttaatttaatctttgtcatattaatatcctttctgtttttctttcatcataacatattttcttttaacaacgcatatttttttacctgcaggaacttgtgatttcttaaggtcccagggaccttaagcggtactggttaataatttt

SEQ ID NO: 790 - DNA, 3449 bp, Unknown
  gut microbiota DNA sequence
gcaggacagaaaccaggagagacaagacttgatcttgtcaagaaaaacgtagcaatctttcaatcgatcattccagagatcgcacagagaaaatgtgaagggattcttctgatcgtagccaatccagtagatattttgacacaagttgcagtaaaactatcaggatttcctgaaaacagagtctttggttctggtacaaccctagattctgccagattaaaatatctgcttggagaacatttgcaggtagatgcaagatctgttcatgcatggattatcggagaacatggagattctgaaatcgtagcatggtcaagtgccaatgtatcaggcgtaccaatttcagaattttgcgagatgagaggttacacagaacacgacgagcatatggaagagattgcacagggagtcaaaaacagtgcatataagatcattgaaaagaaaaaagcaacatattatggagttgcaatggcagtcagaagaatctgcgaagcaatcatccgagatgaaaaatctgtattaccagtatcttctatccaacatgatacctatggaattgaaggtgttacattaagtatgccagcgatcgtaggaaaaaatggtattgagaaacaactggcgatcaagctgaatgaaaaagaacaggaagcattgaagaaatcagcagaagccttgaaagaagtgttagaagatctggatatttaaaaatttattttggtcaggaggattcgtatgtggtttatgatcaggaaattacagaaaacagatataaatagagttgcagatatatggttagatacaaatttaaaagcacatgattttattcctgccaagtattggaagaacaattttcaattagtaaaagaatatgtaatgatatggtcgcaaaaataaattcacaggagagaaaagtaattggaaggaaatttaacaaaaggaccaattttaaaaacactaacgaaacttgcggtgccaatcatggcatcgtcatttttaggaacattatacaatattacagatatggcatggatcggacttcttggatcaaaagcagttgccggagttggtgtcggaggcatgtttacgtggttttcacaaggattagcttcgatgtcgagaatgggaggacaggtacaggtagcacaatgcattggacgaggagacaaagaagaagcccataagtatgcacagacagcagttcagctggcaacgcttatgggacttttatttgcagcagtgatgttactgtttttgcatccgctggtaggattctttcagctacaagatccagaggcattgcaggcagcattatcttacacaaaaatagcctgtggattgatcgtgttttcatttttgacactcactttaactggaatctatacagcacaaggagattcaaagacgccatttatagccaattttataggacttgtaacgaatatgatcttggatccattactgatcctggggcttggaccagtaaacaagtttggggtaaatggagctgcgattgcaacagtaagtgcacagacaattgttatgactattttgatccttggaattatccgacagaaaaaacaaaatgtattaaaaggaatcaagttatttacaaaaattccatttaaatatctaagtggaatctgcaagattggtattccgacagcgattcagggaatggtttactgtggaatttccatggtattaactcgtatggtttcagggtttggagcagaagcagttgcagtccagagagtcggagggcagattgaatctgtttcatggaatacagccgatggatttgggacagctctaaatgcatttatcgggcaaaattatggagcaggaaagatggatcgtgtcagaaaaggatacaaagcctctttgtgcagcgttggaatatggggaatctttattacgatcatgtttgtttttcaaccaaaggcaatcgcagagattttcttccatgaaccaaaggcaattatgatcgcgatcggatatttgacgatcattggggtgagtgaagcgtttatggctgtagaactgatgacagtaggtgcgttatcaggattaggaaaaacacatttatgcagtgtgatcagtattctatttaccagtgcaagaattccgcttgcaatcattttgggtggagcattgcttggactggaaggtatctggtgggcattttctgtaacatcaattgtaaaaggaattatctttgtatgtacattttgctggatcacgagaggcaaaggtacggcaaaaatgatgaaactcaataaggaataatagaattattgccgataatatagtttgatcatgtttaagggatgtctaaaatatatatgtagactggaaaggatgtagcgatgaaaatatatatagacttcgatgacgttatctgtgaaacagcgaagtatttcaccaaaattgcaaaagaattatttaatattgatgtgccatatagggaagtacagttctttaatcttcagaaatcatttgatctaagtggagaacagtatgatgaattgatgaaggcagggcatattccagaaaatttactagattatgaagaaacaccgggagcttcagaagtgatcaacaagtgggttgatgaaggacatgaggtttttgttgtcacaggaagaccatttgattcttatgaaccatctagaagatggttggatgaacatcacttaaataggcttcctatttattttgttgataaatatggacgagaaatgttcaaacaggatcatacctataatctgacattagaagaactttattgcatgcattttgatttcgcaatcgaagattcaccagctgcgtttgagcatgtgcagcattttaaagattgtaaagtagctgtatatgatcgtccgtggaacaagcaggtggaatttccagatgaaagttttgtgagatgcctggattggaaggaaatagatagattatggcaacagcaggttgcttttcagattgcagatttatcgatatgataaagatgacggaggtgacgactatagaaacaaaaaagataattcttaagcttagaacagaaagaggaatgtcacaggatgatctggcagataaagttatggtgacgagacaggcagtatcccgttgggaaaatggagatacagttccgaatattgatacactaaggcttttatcaaaagaatttgatgtctccattaatacgcttttgggagaaccaagaaagctgatctgtcagtgctgtggaatgccgattgatgattctatcttaggacgtgacaaagatggtacattgaatgaggaatattgtaaatggtgctatgcagatggaacgtacacgtataatgatatggatgaattgattgatgtatgtgtaaagaatatggtaaatgaaaactttaccgaagaacaggcacgcttttatttggaagagatgcttccaaagttggatt

SEQ ID NO: 791 - DNA, 142 bp, Unknown
  gut microbiota DNA sequence
gaaattattggtggaatattataaaaagagatcatgtgcctgcaacccactcgcgttcggactcccacgtaactgtactaagctcctgaatggtctaacgaccatccactcgctaagtgcagacgtgtccgtacggttgctg

SEQ ID NO: 792 - DNA, 1580 bp, Unknown
  gut microbiota DNA sequence
cgtattatggaagtcatgatacaagtgagaaaataagaacacagatggagtggggagaatacggaaaaggatctgtgtggacaaaaattataagagaaaaaattaaaaatcagagagatttattgcgacagtttcagaaaaaagaaagtgaattactagataattacttggaagaacttacatacagggataagacaaatagagaagggcatgcggcgaaagtatattttaatgcattgtttggaacaaaatttactcgctcagcggaaacaccagtgaatgcagcactcaattatggatatgctatatttttatcatctgtgaatcgagaaatcgtatcaaatggttatattacgcagattggtatttttcatgataatatgttcaatgattttaatttaggatcagatcttgtagagcctcttagaatgattgttgatgaatatgtatacacgcatcagccagaagaattcggacataacgagaaaatggcacttcttgaccttctaaatcaagaagtatggattgatggaaggcgacaggttttaaataatgcaataaaaatatattgtaaaagtgtgtttgaagcattaaaacaagaagatgcacagattataaggtttattggaaatgagttatagatttatgagaattatagttatgtttgaccttccagtggttacatctgttgaaagacaggaatatacaaaatttcgtaaatttctgttgaaaagcggatttattatgatgcaggaatcagtttacacaaaaattgcattaaatacgtcagtagcagatggaattatgcaacaagttcgcaatcataaaccaccggaaggactagttcagatgctaacaattactgaaaaacaatttcaaaaaatggaattagtagtaggagaagagcacaaagatgtgatagataatgatgaaaggctaataattttatgaaaataatacatccaatatttcaagaacctatagttttggaagatgacaaagtttgtgtgattcagattgagaataagaaatgttatcgagaactattatgtgaaatattgtatcagtcaaaacgtctgcgagaaggaaatttacttataacagaagaaggaaaagagtttgatcttggaaaagatattcatgtgataacggatgtactttctgtagattctaatcaaagaaaaatacttggtaagctataccagagaatggaatcaacggcattggaaagtgatttttatctggaaacacagcagattctgtctcagcttcaacgatttatgacaattttaaccgatgatgagatgatcgcattggattttaaagatgaaatcagtttacaggatttatttaaaattgccgatttaaagattgaatgtgagaatattaagttattagaaaagttattggattatttagaagttgtccaggaatttttgaaaccaaaatgtatcataattatggggttaaaacagttctttgagaaagatgaattggaggagatttataagtttgtgatatatcaaggaattagattagtgttaattgaaaatgcgatagataaggagagttatgatttt

SEQ ID NO: 793 - DNA, 765 bp, Unknown
  gut microbiota DNA sequence
ctcttttagtgacggataaatgtttgaagaaattcaatatcttgtctcccatgaaccgagtttgttccatgcacagaatctacattagcggctgactgtggttcttcccgctttgcttcgtgcctgtacattgacgtcatacatcgcctcacactgaacagccggaaggataaagttacccgcataggtagcttgcaacctgattgtaaatatcttcgtttcgccccggcgcagattgaaataagtcaatacacgatcgtcgcggatatcctgataagtatattggccgctcacattaccggacgagtcggttgtctcttgtggctctgcttcgggaaccgtcattctctcgttatacacttcccagccggacgggatgatgtgagtcaatgccaagttggtgtaatcggtggtcccgcttgtgttggatatcgaagcaatagccgtgaagtccgttccctgccggatatcgttgacagacatcggtttaccatccatacttgcatacctgatatccatacgaagattgtcggaaatagccggcaacgtatcattcaacaactgtgtacgtgtaataaggtctacgcttagtgctcccttgccttgattctttacggcaaccgttcctgatttgggagaagtggaaatctctttctcgaagacggctttagccgattttacggcaggctgttgtttgccgttccatgtccaggtgaagtctaacgagccggacaacttctccgccaggcatcccattgccataag

SEQ ID NO: 794 - DNA, 12742 bp, Unknown
  gut microbiota DNA sequence
atttgttcatcaaagttccgtttctcttctgagaaactccactgtgctgaacaggcttaaagcctaacaaaaaaataaaaattaggcacttttatgcaaaatgcctaatttttatcatgcgtttctatgaatttttgtgcaattccttagaatttacctgctttagcagcttcctcaatagatacagctactgctactgtagctcctaccattgggttgttacccataccgattaatcccatcatttctacatgggctggtactgaagaagatcctgcgaactgagcatcactatgcatacgtcccatagtatctgtcattccgtaagaagctggtcctgcagccatgttatctggatgtaatgtacgtcctgtaccaccaccagaagctacagagaagtattttttaccctgttcgatacattcttttttgtatgtacctgcaactggatgctggaaacgagttgggtttgtagagttacctgtgatagatacgtctacaccttctttgtgcatgattgcaacaccttctgttacatcgttagcaccgtagcagttaaccttagctcttaatccttcagagtaagattttctgaatacttctttaacttcacctgtgtaataatccatttcagtttcaacatatgtaaatccgttaattctggaaatgatctgtgcagcatcttttcctaatccgtttaagataactcttaaaggtttctgacgaactttgtttgctttttcagcgattccgatagctccttcagcagctgcgaaagattcgtgacctgctaagaatgcgaaacattctgtttcttcttcaagaagcatctttcctaagttaccatgtccaagacctactttacgctgatcagctacagatccaggaatacagaatgcctgaagaccttctccgatagcagcagcagcgtctgcagctctcttgcaaccttttttgattgcgatagcagcacctactgtgtaagcccattttgcattttcgaaacagattggctgaattccttcaacctgagcataaacatctaatccagcagcttttgtgatttcaccagcttcttcgatagaattgattccatactcttttaaaacagcaagaatctgtttttctcttctttcatatgattcaaataaagccattattcgctacctcctattcctttcttgggtcaataatcttaacagcgtcatcaacgcgtccgtactgacctttggccttgtcaagtgctgtctgagcatcgtctccagctttgatgaagtccatcattctaccaaagttaacaaactggtatccaatgatttcatcatcagcatcaagagcgatacctgtaacgtatccttcagccatttcaaggtaacgaggaccttttttaagtgttccgtacattgtaccaacctgagatcttaatcctttacctaagtcttcaagaccagcaccgattggaagtccttcttcagagaatgcactctgagttcttccgtatacgatctgtaagaataattctctcattgctgtattgatagcatcacaaactaagtctgtattcaatgcttctaaaattgttcttcctggtaagatttcagatgccatagcagctgaatgtgtcattcctgaacatccgattgtttctactaatgcttcctggatgataccttctttaacgttaagagttaatttacatcctccctgctgaggtgcacaccaaccaataccatgtgttaatcctgagatgtctgttacatctttcgcttttacccattttgcttcttcaggaattggggcagctccatggtttacaccctgagctactgtacacatttgttctacttcatgtgaataaatcatgttgaaactcctttcagtattaaaaataacatctttattttagcacatcgttaaaaataaaacaacaaattatcttaagaacttcgttaagtttttcaatgtttttgttggtttgtgtgataaaaataatttttttgtcaagttgtttttcttttatataaaaaatctcgaattttctttttttttagtcaattcaataaattatctgaattctattccccttgttttctttaggaattacgggtataatttaatacatattttttataacagaaaggaattatgattatgagtcattatgatttggaaacaaaatgtcttcattctggttacactcctaagaaaggagaaccatgtgcacttcctatttatcagagtactactttcaaatatgatacaaccgatgaaatgggacagttatttgatctgaaagcagaaggatatttctatacgcgtcttcagaatcctacgaacgatgctgtagctgccaaaattgctgatcttgaaggaggtgttgcaggacttcttacttcttctggacaggctgcaaacttctatgcgatctttaatatctgtgaggctggagatcatgttgttgcagcttctacgatctatggtggaacatttaaccttctgggtgttacattaaagaaacttggaattgactgtacattcgttgatactgatgcaagtgctgaagaaatcgccgctgcattcaaaccgaataccaaagttttatttgcagagacgattgcaaaccctgcacttgtcattcttgatattgagaaatttgcaaaggttgcccatgaacatgaagttccattgatcgttgataatacttttgcaacaccgatcaactgtcgtccttttgaatggggtgctgacatcgtcacacattcaacaacaaaatatatggatggacacgccgttcaagttggcggtgcgatcattgacagcggaaactttgactgggacgcttatggacacaaatatcatggtcttactgaacctgatgaatcttaccatggtgtcgtttatacaaaacaatttggaaagaaagcttatatcacaaaagctacaacacagctgatgcgtgacctcggttccattccatcccctgaaaactgtttcttattaaatcttggattagaaacactgcctttacgtgtagaacgtcattgtgaaaatgctcagaaagttgctgaattcttagatgctcatgaaaaagtatctcatgttatttatgccggacttcctaatgataaatatcacgaattagcacaaaaatatatggataagggaagaacctgtggtgttatttcctttgaactgactggtggacgtgatgctgcagtacgctttatggatggcttaaaattagcaaatattgcgacacatgttgctgcatccaaaacgatggtacttcacccagctagccatacacaccgccagatgaatgatgaacagttaagagaagctggtgtttctcctggaatgatccgtttatctgttggaattgaaagtgcaaaagatattatcaatgatctgaaagaagcacttgagaatgcatagttttataggtgttcgaagattacttagtaacagtaataattgatattataaatttcaaatatcatagcaaaaaagaaccttaactcccagcatttattatatatgcattgagttaaggttcttattattttatattctataaaatctataacagattattcatcccagttagtatacacctcttgcacatcgtcatcctcatcaagaagatctaatgttttctgaatactcttaatatcttcttcacttgtaagttcgaccatagtaccagggatcattgtgacactggcatctgccataggaatttcttccttctctaaagcttctctgactgcactgaagtcttctggtgttgtcaatacttcaaagctgtcgtcttcttcgttgaagtcttctgctccggcatctaatgccatcatcataagatcgtctgcatccatttcacattcttctttagaaatgatgatctgtcctttcttctcgaacatataagatacacatcctggtgttcctacgttaccatttccttttgtgaaagcatttcttacattagatgctgtacggtttttgttatctgttaatgtatctacgatgatcgcaactccgcttggtccatatccttcatatgtaatctgctcataattaacagaatctgcatctccagcagcttttttgataccacgttcgatcgtgtcatttggcatattatttgcttttgcttttgcaatgacatcacgtaatctgctattgttgtctggatctggtccaccctctttaacagctactgcaatttctcttccaatgactgtgaaaatctttccttttttcgcatcatttttttcttttttgtgtttgatgttcgcaaatttactgtgtcctgacatcttcttcttccttccttttccttttttctacctttacctgtctaatcatgttgtcatgaatatcaacagatttaaaggaatatccttggtagataatttctatttcttcattgtcttctggtaaatgtcccagctgatcaattaaaaatccattgagtgtctcaatatcttcaacgtcaaattcgattcctaatgtatcctcaagttcttccagtctcgtacttccacgtacaagatagatatctgcccatccgatcttggtgatattacggtcttcgacatcatattcgtctaaaatattccctactatgacctctaacatatcttccatagatacaataccttctgtctggctatattcatcaataacgatcgccatatgaatcttcttggtctgcatctcctgaaaaagcaccgataaattcatcgtctgatgaacaaaaaacggctctcttgcaatatcagaaagtgttgcttctttctgattaagatatgcatcgatcacatcttttaaataaagcactcctacaatgttatcaatgtcatcttcatataatgggtatcttgaatatggctcatctaacatataatttaatgctttctctacggacatgtttacatcaatcgcatcaatcttctttcttgatgtcataacatctgtaacatctttatctccaaattcgaaaatattcgtgatcatgcgggcttccccttccatgatcgcaccttgctcatgtccttcgttaacaatgttcatgatctcttcttcatattcattgtcttcatcctcttcatgttcttgttctgatgtgtgcagttttttctttgcttctttgatcttctctctttgtttcatgaaaaaacacccaactgcaaatccgatgataactgctaaaatgatcatcataagcaccgagggagtaaatccttccatttctttttctttctccttttatcttctagaaattaagactatacaaacttaaatatatcatttctaagaaaaaaggtcaatatatccaagattcctgttatgtatcaagacttaaactgatctttagtgcatgatccacttgttttaggaatgtacaatttaaatggcataccttttctcttaaacgacttttatcgattgtccggatctgttctaacaagatcacagaatctttttctaattcacatctgtggcagtcgatcggtacatgagtcggcaactttgccttgttcatcttacttgtgatcgctgcacagatgatcgttggactatatttatttcccgcatcattttgcaatacgatcacaggacggataccgccttgttctgaaccaacaaccggtcttaaatctgcataaaatatatcgcctcgcttaattaccataagcataaacactctccatttctttttaaatattgtatgaagagtatttacgattctttcaaaagtattccttatttttcaaaatattctgtttctttcatctctccgtttcgaatgtatactcgtggaacacgtttcccaatcccacagacaaattcataattaaaagatcctgcttcatttgcaacttcttctacggtcaacattttattgccatcgtgtccgactaaagttacttcatccatcacagatacaccttcaatatctgtcacgtcaaccataaactgatccatacagattcttccaatgatcggtgcatactgcccacggatcaatacttttcctttggaagagagtgatcttgggtatccgtctgcatatcctactgggatagttgcgatctttgtcttcttatcagttacatatgtgtgattgtaactgattccttctcctgcttccacttctttgatatatacaatgtgtgtctttaattccattgctggtcttaaatccaatacatcttttgaaacttcttctgatggatataatccataagtaatgattcctgaacgtaccatatcttttctaaatccatccagatcaatgatcgatgcactgtttgatacgtgtttgatcggaatatagatatctctttcctcaagccaggtaataaactgatcatattttcgctcctgctcataagtttctgttttatccgcctcgtctgcacatgcaaaatgtgtaaagattccttgaatcttgatatttggtaatttggcgatcttctctatgctatctacagattctttggttggtttaaatccgatacggttcattcctgtatccagtttgatatgaatcttcgcatctttgcctagtgcctgcgcgatctttgataaggactctgccatctcatagcagaatacagttggctcgatctcatactgaatcaatgagctgtactgatattctgatgtgtatcctaaaatcaagattggctgtctgattccattgtttcgaagtgtgatcccttcttctaggattgcaacggcaaatgcatcaactccgatcttatttaattcttttgcaattggaactgctccgtgtccgtatccgtcagctttgatcactggcattactttcacaccttctccaactacacgttttacttctcttatattatgacagattgcatccagatcaataactgcatgcactctatagtactggttcataatttcctcctgtaacgtcctttatatgagcaataatatctgatgcgatcatgctgtaagcgcctagatcatgctttgcatgatctcctgcaagaccgtgaagataaactccgtgaactgctgcctcatgaacagataatccttcccccaaaaggcctgtgatcattcccgcaagaatatctccacttcctccagtcgccattccatcatttccgctttgattaatatacaccaaatcatcttctcgtgcaacgatagttgttgcatcttttaaaacagctgtacaatgatatttctcagcaagatcttgtgcactctgacatagatcttctttgatctgtgtgatatcacatgacatcaatcttgctgcctccatcaaatgtggagtcatgatcgtcccatatggataatcaattttcatgttaaatctactgattatatttaatccgtctgcatcaatgaccaatggttttttcccttttttcaaaaccatctctaacatttctttcatttcttcactgacaccaactcctgggccaaacaagatacaatcacaccattctaaagattcttctaaatcttttcgttctccaaataaaatttctggaagtcttgtctgtaaaatctgacgatttccagcatcagaaagcactttcacaagtcctgcacccatccgaagtgctgcttctgctgcaaaacatgcagctcctgacattgtttcatttccagcaatgatcaaaatcttcccatagcttcctttattggaatatgcttttctttctggcattaaatgatcactttcctctaatatatatcctgtcgcatactttttgatcgtctggttatgaaatcctatggataccagtttaatatctccacaatattctcgtcctggatataataaatgacctcttttatatccaccaaatgtaactgttgatgacgcatgcactgcacatccaaaaatctttccactatctccactgattccagatggaatatcaattgcgatcacaggcttaccacatgcattgatccgttcaatgacttctttataaacaccaccaacttctctagaaagtccaactccaaaaatcccttcgatcaaaagatcatattcatgaaaatttatatcttcacaatctatcggaaaatagcctagattcttaagtatctgaagctgtaatttcagatccgctgaagctttttctatattaccaacgatcatataatccactaaataatcctgctccaacaaaattctcgtacaagcaagtgcatctcctccattattgccaattcctgaaatgatcaatatcctctgtgaatgatctgctatctgtgcagccttatctgcaactgctttagatgctctttccatcaatacaagtcccggaattcctattccatgaatcgtctcatgatcgaccgtttgcatctcctgattctttaatacatatctcatacgcattctcctatcgcaaaagcttgtgcaaattctcttgtattcgtgatcgatacatgaattcttgaaacttgtttatcttttgctatctctttcgcctttccatataatttgacatatggcgcacctgattcatttctcaacacttcaatctcgtatggttccacaccgaaaaagccggttccaaatactttggaaacggcttcttttacagcaaaattgccagctaaagtcgtagcattgtcttttgcatatgctaattcagttgtcgtaaaaattcttgaaagatgtcttcctcgaagaatcatctcttctatccggtatatctctacgagatctgttcctattccagcaatcatcttcttacctgctattcgttctcactctcttcacggttgtggacattgtatgttaatgtcatcagactttctgctaaatgtacattctctactgtaacattatttggtaaatgaagatcgattggtgcaaaattccagaatcctttaattccccattctgccatcttctttgcgatcgcaggtgcctgatccttcggaattgtcagtgcagcgatcttaattccatgtgttttgataaagttctctagttcatctgtatcaagaactttcactccacggacagaaattccgatcagctttggattcacatcaaaaagtgccatgactttgtatccataatcttcattaaaagactgataattcgcaagggcctgtccaagatttccggctccaacaatgatcatgtcatttctcttatccagacctaagatcttaccaatctctgtatacagattatctacattatatccgtatccctgctgcccaaatccaccaaaattgttaaggtcctgacgaatctgagatgctgttaccatcatctgttcacttaattcttttgaagagattcttgtaatattcttcgcttttaacgctcctaaatatctgaaatacctaggaagtcgtttgataactgctgaggaaatattcttatctgagtttgccattttattcctccaaaatctttatttcgcctataattatataagattgtctaataactgtcaatctttccgtcatgaaaatatttcattttttcaaaaaatatggtattctgagaaataatgtctataataaaaaatttgaaaggggtatcttaatgatattatcatgccagaatatctgcaaaacatttgtcgaaaaaccagtcttgcagaatatctcatttcacttaaatgaaaacgaccggctggcgatcatcggatataacggtgccggaaaatcgacacttttaaaaatattgattggtgaaatctcttatgatgaaggtgaaatttctttaaagaaagacgcaagcattggctatcttgcccaacatcaagatcatacattccatcatacaatttttgatgaacttctttccgtcaaaaaagaagtcattgaattaaatgaacagatgcgtacctatgaacaggaaatgaaacatctgaccggtgatgcactagaacaaaaaatgaaccagtatacaaatgctactcatagatttgagcaattaaatggttttgcatacaaaagtgagatcacaggaatcttaaaaggacttggcttttctgaagaagatttcacaaaagagatcaacactttatctggaggtcaaagaactcgtgttgctcttggtaagttactgcttaaaaatcctgatattctgcttcttgacgaaccaacaaaccacttggatgttgattccataaggtggcttgaaaattatctgtctcattacaaaggagctgtgatcatcgtatctcatgatcgctattttcttgataagattgtcaataaggtcatggagatcgaccaaggacactccatgctgtttgatggaaattatacaacatttatcgaaaaacgtgatcagatcaaagcaatccgtttaaaagaatacaaaaatcagcaacaagagatcaaacatcaacaagaagttatcaaaaaattaaaacagttcaatcgtgaaaaatcaatcaaacgggcagaaagccgtgaaaaagctttaaataagattgatgtattggagaaacctacggaatataatgctgatatgcgtcttagcattgaaccagagatcatcagtgggaatgatgttctgactttaaaagatgtatccaaatcttttggaaacaaatcattattccatggattaagtgctgatatttttcgtgaagaacgcgttgccctgatcggaccaaacggaactggtaaaacaacactgttaaagatcatttgcaaaaaaatcagcaataatggcggtacgatcagccttggagctggagtttccattggatactatgaccaggcacaagataacttagatgattccaagacgatttttgatgaaatttcagatgcttatccagatcttaataacacaaagatccgcaatactttggctgcatttttattttatggagaagacgttttccgcccgatctcctctttaagcggtggagaaaaaggacgtgtttctcttgcaaaattaatgttgtctcatgcgaattttctgattcttgatgagcctacaaaccatttagatattcagtctaaggagattctggaatctgcaatgaatgcttatactggaacgatcctttatgtttcacatgatcgttattttatcaataaaactgcaacacgaatcttggaaatctctgatcatggattaacttcttatcctggaaattatcaggattatattgctcagaaggaaaaagaaaaggcatctcttacttcttctactgcttcctccgtttctgttgatacagaatccaaactcgattggaaacagcaaaaagaagaacaagccaaacagagaaaaaaagaaaatcgtcttaaaaaagtcgaagagcagatcacagagttggaaacgaaacaagaagaactttcagaagctatgtctttacctgaaaatgcttctgatcctgcgaaattaatggaacttagcaatgagcaggcttccatcgcttcttctttggaagaactttatgaagaatgggaaactctttgctaatttgtaaaaaaacatatataatagtaacgttaaccgtattgaaaaacaggaggtttttatgaaattaatatcctttgttgtaccttgctacaactctcaggaatatatgagacactgcattgacaccttattaccaggtggtgatcaggtagagattctgatcgttaatgacggatcttccgataacactgctgcgatcgcagatgaatatgaaaaaaaatatcctgacatctgccgtgcaattcaccaggaaaataaagggcatggtggtgcagtgaatacaggaatcaaaaatgccacgggtatttacctgaaagttgttgatagtgatgactgggtaaatgaatatgcttatggagaaatccttgatactcttgcgaatttctacaaacagggaactgtccttgatatgctgctttctaactatgtatatgaaaaacagggagccaagaaaaaaactgttattcattatcgtcatgcaatcccaaaagatcagatcttttgctgggatgatgttggacgttttcctgtcagccagtatattttaatgcactctgtcatttatcgtactgcactgcttcgtgaatgcgatctagagcttccagagcatacattctatgtggataatatttatgtattcaaacctcttccatatgtaaaaacaatgtattatctggatgttaacttctatcgttatttcattggacgtgatgatcagtctgtcaatgagacaaatatgatcaaacgtatcgaccagcagtttaaagttacttatatcatgattgattatatgactcagtttaatcttgtaagtaaaccattagaacgttatatgagacattatctttccattatcatgtgtatttcttccgtgatttctgtaaaatctgggcagaaagagcatttaaagatgcgaaaagaattatggaaatatttatatgacagtgacaaacgtctgtatcgtaagatccgtcataatattacaagctgtgcagtaaatctgcctggatatgttggaagaaaagctacgattgctatgtataaagcagctcgtagatttatcggatttaactaaatatttttacattaaaaggtcctgcagagggcctttttcttgttcccctcatcttttattctgcgtattctaataatataaagtatgaaaggcaactttccatgcagatttctgtttcaaaacaaatccatgctgatcttgcccatcagcatggttttcttggagaaggtatcggcattgcctatcttgat

SEQ ID NO: 795 - DNA, 453 bp, Unknown
  gut microbiota DNA sequence
actctctatgcatctcaaatacatatcttccactcggattttctcttccagatttaccaagatttttcttcttttctgtgcttgtgcatttataggttcctctataggaaaaatcgtatcgcacaacactgccagacagactgctgcttctgcccaaagttccaactggggactcagttttcaggaagaaggcaaacgtcctgttggaaatgcaacgatagaagaattggctcagtacaatgccttttttgctgaagataccgaagaaaagaaaatctatctcacctttgacgcaggctttgaaaatggaaatactcctgctattttggatgcactgaaaaaacatcaggcacctgctacattttttgtggttggaaatttcatttcggaaaacaaagatctgatcaaacgaatggaaacggaagggcatattgtcggcaatcatactatgac

SEQ ID NO: 796 - DNA, 11609 bp, Unknown
  gut microbiota DNA sequence
ctcataaacaaatcctccatataatatttataatttattctaccaataaaaattataaaatccaacatatgtttataattttttataagattattttaacagttaaacaccttcctttacttacaaatattttatgattccggcatgtattttttgcctgtttctgtctgggcaagacctgcctgactggtttcctttaaagaacatggcaagaggtctccgacttctgccattgcatcgatcacttcatccaatggaaccttgctttcaatgcctgccattgccatatctgaggctgtgatcgcattgacagatccaatgacatttctcttgatacatggtacttctaccaaaccacctaatggatcacataccaatcccaataatgatttcaaggcaaatgctcctgcatcaaagatctgctttgtgctaccgccacgaatgtacgtaatagctgttgctgccatacaggaggcagaaccgatctctgcctgacatcctccttgtgcccctgcgatacaggcacgttctgcgataacttgtccgactcctgccgcaatatacattccttctagcatctttgcttctggtactttatgaaattgttcatatgtgatcaatactgctggaagcaccccacatgctccggctgtcggtgctgctacgatacgtttcatacaggcatttgattcgcccatttttaaagcatttgccatgacggtcccgacaaattcaccggtcagattctgcatttttctaacttcttccatcatcttttcaccgtcgccgccagaaagaccgctttgtgactttaagtctttatcgtaactttcattggcatctttcattgcaagatacatactgctcattttcccgatagactctaggcggtctacctgtcgttctgtcatatcatcatgtaaaattgtttcccataattgacattcctgttcttttgctcttgtttctatctcttctacggatgcaaatcccatactctagtcctccttcatcttagcaagatatgtaactttctggattccttccagacgttccaaaaagttcagaccttcttctggtatttctttgtcacattcaatgaccatgactgcacttccacctctgtgatcacggtataattgcatcgttgcgatattaaccgatttatgagcaagcattgatgttacttctgctacatgtcctggctggtcatcattgtgtacgactaatgttgtatactccccgctaaagtttgcttccagtccatcaatcgtgcagatcttaattcgtccaccgcctaaggaacaggctacaatctcaagatttcttcctgattctccgacaagcaataattttacgctgtttggatgtgcattttttaattgaatctttccaatctcaaatttcactcctgattcttttgcaatgtcaaaactgtctggaatccgaatgtcatcggctgccatgccaagtaatcctgccactaatgctttgtctgtaccatgtccttttcctgttgcaagaaatgatccatgtaatagtattttagcttcttttaccgattctccgagcaggtgccttgatacctgtccgatccttacagcacctgctgtatgagagctcgacggtccgaccatcactggtcctacgatgtcaaataaattcatgtgatttctcctgtctataaatgcctttcgtcttttgaaatgctgttttgccgtgtatcattttgtttcttgtatataatttactcgtaatatatgaaaaaggcaagtatagaatttcctatacttgccctgctttggaacatctcatattgatctgttaatttttcttaaaaattaaatcctttgatcgttgcaaaataatcttctggtgtttctgcacgacggatcatttctgttgttccatcctcttttaataagatttctgcagattttaatttaccattatagttatatcccatcgcaaatccgtgtgctcctgtatcatgaatcactaacagatctcccatgtcgatttttggtaatttacggtcgatcgcaaatttatcgttattttcacaaagagatcctgtaatatcatatacatgatctgctggttcgttttctttacccataactgtgatgtgatggtacgccccatacattgcaggtctcattaagttgactgcacatgcatcaacaccaatgtattctttatgtgtatgtttttcatggattgcttttgttactaaatgtccatttggtgcaagcatgtaacgtccaagttcggtaaagatcttcacatctcccattccggctggtactaatacttcgtcatatactttgtgtacaccttcaccaatgacagcgatgtcattaccttcctgatctggaaggtaagggattccgactccaccagataagttgataaatccgatatgaactccaacttcttcttttaatttaactgctaattcaaataactgttttgcaagtgttggatagtattcatttgtaaccgtgttacttgcaaggaaagaatggattccgaattctttgacaccaagctcttttaactgtttgaaagcttcaaagatctgttctgttgtcattccgtattttgcatctcctggattatccataatatctgttcctaatgcgaaaactccacctggattataacggcaggaaatcttttctgggattccggcacattcttttaagaattcgatatgtgtaatgtcatctaagttgatcgttgcacctaactgttttgccagaataaattcttctgctggtgtatcgttagaagagaacatgatctcgcttccatcgaatccacaacgatctgacatcataagttctgttaaagatgagcagtctgttccgcatccttcttcttttaaaatctttaagattgttggatttggtgtagctttcactgcaaaatattctttaaatcctttattccatgaaaatgctttgtataatcctcttgctgtttcacggattcctttttcatcatataaatgaaatggtgttggatatttttttacgatctcatctaactgttcttttgttacaaatggtacttttgccatggtgtttggttcctttcttctatactttttgtatatttatttcatttttaatagttgtatttcattggccagtgcatctttaaatacttccaccagattattgttactggaatacaggctggttgcttcgtaacgatttgtgatcgcgcctgttaaaacgtctttggaatccgtgatcaatcggatctgttctttcttacattctgtcagataaacagttgctccttgtaaatcaaatggttcattcgttatgatcacgactttctttccttcacttaccatcttctctaagtattcccgaaacatctccagtcgttcattgtatacagagatatacgcacgctcttctgcacaaagcagcatatcaataatcttatcgcaaatatgttcttcgcctttgatcgtcagatatccgccttcgttcttgcgtttactcggaagttccgcgatcagctctgtcttcttctgttccagatgccggatcttattactgcagaattcttcgatcgctaccggtgtgtaacgaactgtatcttcctcttgtatataggctgcgcctttgtctaccaagcctgccagtgcattgtaagcgttcgatcttgagatcccgctttgtttggctgcctcgtatccgttaaggcttccttccagtgtcagtaaaatgtaaagactggcttcgtgtcttgtaagtccgaattccatcagacgctctacattatccatcactttcacctcgtgttcctatctaggactactatagtcgaattaaaaaagaatgtcaaggtttccttgacattctgagaatttttcttgagttttcctaccactcttcgtcttttcctagatattgtttcccaccaactgtcatgatatcaaattcgacatatgcgatatgatctttgctttctccataaatggtatattgttttttaacattttgagcatcttttcgaatctgctgcaatctggcatactgtttcgcttcttttgatgaaatcgtctttcgttcatttgttttggactctgtaagtttaaaattgtaattatcaaaatttgtataatacgcttccagcttctgtctgtcttttactttccaaaataccgtctgcatcatggctttatcacttggatcaagaaagaccatatcacagccactgtttgatgaaagtgcatagacaggttctgctgcagctttccaccaagaaatggttttgacaatctttttgtctgtctgattcatcgtttctttcagccaaaatgctggttttctgcctttcatagaagcttccagataaccaaaactcatggctccatctccaccgccatcagctgtctcataacggtctccgtgatatgtaaatgttgtaatatctaaaaatgaatccatttgatcatgattccattgataatatccgatctctttttcattctttggtccttttgtgatcttgaccatatgattccagccgatcaaaactgctgctatgaatgtacagattgttatgatacatccaatgatcatgactgtttttttattttgtttcattccactctccttatgatcttatgtaaaatctagctatatgcaattgctgtaagaacaaagaataccaacattagcacactgtgaaaatataattttcttcggtcttcttcttgtgcaatcagtccatatgtcataataaaccttaggataatattgatcatctgcaatgcattaaatgccttcgttgttactgtaatagatcctgaaccatgatccagtgcaaggataagtccaaagatcagcgtcatcaaatacatgacaatgcattgcacataaaagtaaaacttatcttcccaagcaagttttaagaatacatttctctcgtcatctgcaaaaattgcaataaacataaggttacataaacttacagatcctatctctggctgtataaagatgatcataactgcctgaatgatcattaggagtaatgtgaaccattgttttttgattgcttgcatattttccctcctctccctctttttcatatctttattcaaaagatatttttagtatatctggtacataattaattgtctatcttttaatttattttcttatctaacagtgcttgccactatctgtatttttttatacaatgaaaggagaaacttatgagtaaaaataaaaaatcgctgcaagatttaactttacttgaccgctttttatttgctgaagttatggaagatcctaagacatttgagaatatattatctattattcttggagaagatatctccatcaaaggccgtccacaatctgaacacgaaagtcggacttcgcctctaaaacgacaggtgcgacttgacgtatgggcagaggatgaaaccgatgctgtttataatgtagacgctcaaaaagaaaatacgaaaaatcttcctcatagaagtcgtttttatcaggctctgattgactccaaattattagatcctggagaagtagatttttcgaatatgaaagactgttattctattatcattgcacctttcgatctgtttggaagaggattatatcaatatacttttcaaatgacttgtgctgaaactggtcagccattagaagatggtgctacgcgaatttttctaaatacgcatggtaaaaattcagaagatattagtcctgaattaaaggagcttctttactatatggaacatactactgaagaaatatcttgctctacttcacgccttcaggaaattaagaatcacgtcaatattgtgaaatccagcgaagagattggagtgaaatatatgcaggaatgggaagaaaagattcttgagaagcgaaaagcacgtgcagaagggctagccgaaggacgtgctgaaggagaaaccttccgattaattcaactaataaaaaagaaaatccagaaatcaaaatctttcattcaaatttctgacgaactggaagaagaacctgacaacattcaatcactttacgaatgcatttcgcagaatattaatctaacaactgaagaaatctacaaaatctacatctcacctgataaaactgaagattaataaagaactccacagcatacgctgtggagttcttacattatcaatattcaatttcattaagaaatgataaatcttattcgtcagcttttccttcagatccgaataatttgatctttgtgattaccatatctttgatagcttcagcacctggtgctaataatttacgagggtcgaaaccttttccttcaaggtcttttcctgcttcgatatatttacgtgtagcgtcagcaaatgcaagctggcattctgtattaacattgatcttagctactccaagagagattgcttttttgatcatgtcatcaggaattcctgtaccaccgtgtaatactaatggcatatctcctgttaactgctggattgcatctaatgtatcgaagcttaatccttcccagttttctgggtattttccgtggatgtttccgattcctgctgcaagcattgttactccaagatctgcaactgctttacattcttctggatctgcacattcacctttaccgataactccgtcttcttctccaccgatagatccaacttcagcttcgatagacattccttttcctgttgcaacttttacaagttcttttgttttttcaacattttcttcgattggatagtgagatccatcaaacatgatagaagagaatccagcttcgatacatttgtagcatccttcgtaagaaccatggtctaagtgaagagctactggtacagaaatgtttaattcttctaacattccgttaaccattcctacaacagttttatatcctgtcatatattttcctgctccttcagaaacaccaaggatcactggagatcttgtttcttctgctgctaataaaatggattttgtccactctaagttgttgatgttgaactgtccaactgcgtaatgtccggcttttgccttgtttaacatttcttttgctgatactaacatagtttgtcctccatataattcgttaactttttcacatctagtttattatactctatttatacgtgggttgcaagctttcacttgttactaatatcttctgttttcctgcaaaaatttggtcattattttacttgcaaataatcgttatcctgttccacttgtaacagcagattcaaatgtttccggcaggaattttttaaaactcttgtcacatttttactgtcactgttttgataccatgccacagcttcttctcttgtgagacctcctttttcctttcttgagatcagacgttctttcaacatctcttcctcggccaggatcaagattttatagtctgcgtattgctgcatggatttccatggttcttgttttaatagtaaccagttcccttcgatcaaaatgatatctttggtaactttaatctgatcttccacaacgtcgtgaagatttctatcataaatcggccataaaatatcttctatttttatcttttcaagtttctgtcttaatttttctgtgtcatatgtttccggacatccttttacctgcttcattggaactttttctccaagcacgatcgcatcatgagaattaatgtaatcagagtgataatgaaatccatctaatcctaatgcttgaatgtctgtaaactcttgatcttgttttgataaatattccaaaaactcacataatgttgtctttccaacagccggcggtgctgccataaatacaatgatccgttcctttttttccttttgtaactgctgtaattgttttaataaaggaagaaaaactttctggatcgtgtcttcgttatagaccgctgtcatttcaaatccattgactttaaataaatattctttccattctttcatatggcacctctttctttatgtttattatacgatgtgttcttatacaagtacaagcaatagaccttttactttggcagcattaaaaagtgccatctttttctgttacaaaaaagatggcacttttgatctgtgacaaatatttaattaaattttgtgtaatgaatgaggtctcccaaataatcatatccaaactggtacaccagtatatttctgatcaccgcatatccaaagaaaatacacactcccaaaatcaacatccacaatctcggcttcatgctcttcatctctctgactgtcagtttctttaccatccatcctgcaatacaccatagaaacataaccccggtatatacaacggttggattacataaaaatgctctctcaatatccaaatgcagcagttcgattacacttcttgtcccgccgcatgccggacaatagaaatgtgttacttccttaaagaagcatggcatacttcttatgatcttatatagagtcatcattttcatcgatatatgtatcataatgtgtattaaactctttcatttcattctgaaaatccgaactaagcaaaatattcacaacaaaaactgtgatcaagatcacagaaccaatgatgcctataatcccacagatcaatcctgctttcgccttatttcctcttgttcctctgacttttggtgtcaccgcaaaacaaatgaccgctgcaatcccagtgataattgcgattggcgtgcagcaacaactgaccatgcatacaactgctatgattccaaggatcattgttgcgatcgcaattccacttgtctgctcctgctgtggttgttctatgtgatcatcttcgtaacgatatcgtctgtatggatcatcatcttgtgtatgatattcttgtgttggatcttcatctttaatctcgtatccagtatacggatcgtatctcttatcttccatattttttcctctactttctaatgtagcgaatcattccaggccctaatttgtccgttggacgagaaataaattcatgtttgtgataaaatggttctcttccgatcgcacacatcagatccaacatgatctcggttccttcttcacaaagattctctacatattcgatcagatcttctatgattgcacttccgattccataatgctgataatctggatgaatcattaaatcctgaatgtaacaaatgaccgccccgtcacctacaagtcgtcccattccaacgatcttggcatcaatgtatgcgcagacgatatacaaactgttgtctaaggctttcctcgcctgtgttcttgataatggtttaaagttaaccgcttttcttaattccagatacgtatcaactcctacattatttgatactagtgttactaatttcattctttccttgtcttctttcttctatataatatgtttctcttcctaatgtcaaaattatttctctgattggctatcatcttatcacgaattttatcacattacaagaaatgaatctttcttattatattttataattttatacacaataaaacaggtgatttttatttttttccacaaaaatcacctgtttcttctatataatagtagatattttaagaactaatcctgtaatgcatctacatcacgttctccggtacggatcttaactacattccttacttcataactgaagatcttcccgtcaccaacttctcctgtaaatgcagatttctgaatagcttcgatcgtttttctttcccattcttcagaagatacgacgatctcaaatttaatctttggacgcatcatcatatcaacttttgttccacggataacttctgtaaaacctttctgtgctccgcatcccataacctgtgatactgtgattccattaactccgattttatttaaagcttctttgacatcttcgaatttctcttctcgaacgattgcattaattttgatcaacatatattttcacctcttttaatctaaaccattaaaacttgggtaagcattctctccatgttctgatacatccaatccgactttctcggctctttcttcaactcttaatggagtaaagatacggacaatcgcgatacagatcaggcttccgactactgcaactgcgatagatacaagaatccctatgatctgtgctacaaacaatcttgtttctccaaacactaatccattccattttgcgactccattgatggatgtcattccaaataatcctgttgcgataccaccccagataccaccgattccgtgacatccaaatgcatccaatgcatcatcaatctttaattttcctttgatcagttttacaccgaaatagcagattgggcttactaataatccacagatcactgctgcccacattggaacaaatccagctccgggtgtgattgctaccagtccgataactaatcctgtggaagctccgactaaagttgtttttccttctgaaaatacttcgatcaacatccatgaaacaagagctgcggctgctgaaacagatgttgtcataaatgcatgtgctgcaagtccatttgctgcaagagcacttcctgcattgaatccgtaccatccaaaccataacagtgcagctcctaaaaatacaaatggtgtattatgtacgtggtaggctccctggtcatatccacgacgttttccaagtgttaaagctaataccagaccgctgacccctgatgtgatatgaacgacatttcctcctgcgaaatcgacagacccgatctctgctaagaatcctccttctccccataccatatgtgccattgggtagtacacgatcaatgaccataagataataaaaagaactaatgctttaaatttcattcttcctgcaacagatcctgtgatcagtgctggtgtgatcattgcaaacatcatctgaaatgctgcaaatgcaaggtttggaatcgtatctgcatatggtcctggtttcattccaactccgttaaaaccaaaccattttgctcctccaatgatccctgcatggtttccaccgaaagatagtgcatatccaacaagtacccacatgatcacggaaactcccatgataaatacacactgcatcatcgtgttcccaacgtttttccttcgtaccattcctccatagaaaaatgcaaggcctggtgtcataataaatacaaatgctgcacatagcagaataaatgctgtatctcctgcgttcatagtatattcctccattctcattttcaactatgcttctatgctcgtcagagtagctggttctgacattattgaaaatctctcgagagaatgtttttattaactaattctagctaataaaaaaggagccaaagcacacttttctttatgctttgactccttcgtcacgtttatagtaacaaaaggtgttttaaaatgcaagatttatttatgtatttttatcaagacaattctgatttgtggatagtgttgcatgtatgagtcaaaaagaagataagaaaaaacatttataagaatacagggtgacactccgcatttttgaaagcgttgtttacaaatcgctgattcgcgcctgttcctttgataactgatatgtaatgacctttgtcaatagtaaattaacagaaatcacaacaaatttttattttattg

SEQ ID NO: 797 - DNA, 179 bp, Unknown
  gut microbiota DNA sequence
taaatacagttattatctgaactaaatcttcaacaagttcttgttgctctgtcttttcagtatgatcgatagtttataccagaacctatatcactaattatttcaaatggtttgccctgtgcagtaagatacaatttcatattctctatttgtcgttccagatcatctttttgtttatt

SEQ ID NO: 798 - DNA, 404 bp, Unknown
  gut microbiota DNA sequence
gtgttacttcacattgacgtgaatggcggtttgcttcctacggggagttctagccccgattacatagatcatctcttgaaaaagagaaattcgacggaaaggggacttgaattatgctaacgattgaaagcttaattgctgtactatcattgtgtatcgcatgttatagtcttggctacaatcgcggaaagcatgatgccaagacagaaaaatgatcgccctaaacctgtcaatttaagcgatcattttttgattcattaaatatcaggtgaccgtcatatcggtagcacctttttctattattagaatatcatttcattttttttatgtcaagacttactccattaacaacataacatacttctttcattgttattgttcaacaattagctggacattaacta

SEQ ID NO: 799 - DNA, 295 bp, Unknown
  gut microbiota DNA sequence
cagctccaggatgcgatgagccgacatcgaggtgccaaaccactccgtcgatgtgaactcttgggagtgataagcctgttatccccagggtagcttttatccgttgagcgatggcaatcccactttataccaccggatcactaagtcctactttcgtacctgctccacccgtcggtgtcacagtcaagctcccttctgcctttgcactcttcgaatggtttccaaccattctgagggaacctttgagcgcctccgataccctttcggaggcgaccgccccagtcaaactccccac

SEQ ID NO: 800 - DNA, 279 bp, Unknown
  gut microbiota DNA sequence
gaatccatctacaattacttttagtaatacatttcctaaaaataaggaagatattatacttggtatcgatatgaatattaactcgaatataaattgcattataatttgtatcttagatgttccaatagataaaaatatacctatttcataaattctttctcttaaccatagaatcaagattaatgaaagaacaaccatcccacctaacataatagaataagtcattatttttattatatgttttattccactcactgactctaaagactcttcaaacgc

SEQ ID NO: 801 - DNA, 832 bp, Unknown
  gut microbiota DNA sequence
aagatgatggaacaacgacaacatcgtatacttataacggactggatcagttaaagacatccacgaaaaaaaaggaactgcggtagaagaagtccgtcagtatgattacgatgcgaatggaaatcagacagatgtaaagaacacaaagactggagaagatcagacttatgtgtatgatgcggaaaacagattaagtcaggtgtccgtgacgaaagacggaaagacagcggtgatccagcagaacatctacaatggagaaggacagcggatccagaaggtcgatggagatgagacgactaactattattatcagaatggagttgtggcttacacgacagatgcgaatggagagcaaaactcacagaatctgattggaaccgatggaaatgtcctcgcaacagaaagatttcaacagaatgcaacacaatattatctttacaacaaagatatccaggaaagtacaagcagtcttgtaaaagaagatggaagtgctgatgcaacataccagtatacggattttggagagacaacgatccagggtaatgatcaggcgaaaaatgaagtatgttatactggcggaatttatgattagagtatggggttgtactatctgaatgcacggtattataatccggaagatggtaggtttatgacagaggatagttatcgcggcgagataatgaaccctgagactggacatttgtatgtgtattgtgcgaataatccggtgaattatgtggatcctagtgggcattttgcggcagcaatgtatacagttataaaattagtacttgttggaggtgcggtagcttatgtgtcatattcatcatgg

SEQ ID NO: 802 - DNA, 368 bp, Unknown
  gut microbiota DNA sequence
aaacgaaaaggtggacgtagaatatgacggatccatgcaaagcctgtgcagagataatctgcatgggcatttgtgccgatcaggtactatacaagcaagagtatcaggcaatgacagatcggataaggcagcagataataaatcgtaacaggaggggagaacgtggacaagaacgtactgatccaatacacagacatgattgaagaagtaaaagatataagaaaaagaatcttgcaaacagagaagcagatcagcaggattgaggaagaaggaaccgtaaaagacacagtaagcggtggcatgggtggaatccagcattttgtagtggaaggtatgccagtaccagaacttagtagaaagaggctgct

SEQ ID NO: 803 - DNA, 227 bp, Unknown
  gut microbiota DNA sequence
taacaaggataaagaagctagtgcttcttgaacttggatcaacattgaacatgagagtttgatcctggctcaggatgaacgctggcggcgtgcttaacacatgcaagtcgaacgaaacaccttatttgattttcttcggaactgaagatttggtgattgagtggcggacgggtgagtaacgcgtgggtaacctgccctgtacagggggataacagtcagaaatgact

SEQ ID NO: 804 - DNA, 177 bp, Unknown
  gut microbiota DNA sequence
aaaaagatctttgacaactgaacaataagacaaccttgaaaattctaatgaatttttcagatgattttagtaaaaatcaacgaacgttctttatagagaacagtaattaacaaggataaagaagctagtgcttcttgaacttggatcaacattgaacatgagagtttgatcctggct

SEQ ID NO: 805 - DNA, 1301 bp, Unknown
  gut microbiota DNA sequence
ttgctatgaccgcaacgccggataaacgagacgattttggatacagtggtgaccgtgcgaagggattaatattctgtagccggattgatgagacaaaggaattgtcgaagaaattcaatgccaaaggctggcggacattggtgttgggtggtagttatgaggacggatatgacgatgcgtatgattattgggaagaagagatggactataaaatatagagaggaataagtggacattgaaaatgaaaaagaactcaaatttgaagtataaatttgagttcttttttagttcataagaataatatttgagttcttgcataaacttaaatatagtactagaatctaaaatataaatggaggaactaaaatgacaacagaagaattatatgacaaactaaaattaattcaaaaaatgaaatgcaaaacgcagaatttggaattgaaatcagcggagcaaggatgtccgaaacgattatatgattctttgtcaagcttttctaatcaggatgatggtggcattattgtttttggaattgatgagaaacaagattataaagaagttggtgtttatgatgctcaggacattcaaaagaaaattaatgagcaatgcttgcagatgaatccggttgtacggccgcttattacagttgtagagaaggaaaataaaaaatttgtttctgctgaaattcccggaatagatttggcagacagaccttgctattatcaaggacgtggaaggttgaaggggtcctatacccgtattggagatagtgatgaaccgatgacagaatacgaaatatatagttatgaagcatatagaagaaaatatcaagacgatatccgtgaggttccgagagtaacattaatgtcattggatcaggaagaactgaatcgttatgttgaactgttaaagagagggaaacaaagattagcaacacttgataatgaaagtatttatgaacttatgagcataaagcgaggagagaaagtaacgcttagtgcgactttgctttttagtccatatccacaggcatattttccacaattgtgtattacggcaattgtaattcctgggagaacaataggaagtcttggcgacatgggggaaagattctcggataatcagagaatagaaggaacaattccggaaatgttggatgaggcattattatttgtgaaacgcaatatgcggacaaagacaattataagtccgataaccggacgaagaactgacagaacagactatccaataacagcggttagagaagctattataaatgcattagtacatcgtgattatag

SEQ ID NO: 806 - DNA, 192 bp, Unknown
  gut microbiota DNA sequence
atactatggattaaaccacttcggatggtggaacaagatctatgattctgaaggaaatgacttaatgccacagatcaaagaacatatggcagcaaacggatatgcagatgcattatcagatactaaccagcatgtagacgaaagctgggtacatacattccagaaagcaagagatgtatatgcagttgatcc

SEQ ID NO: 807 - DNA, 31646 bp, Unknown
  gut microbiota DNA sequence
tattagatcttgatgcggttacaggtgggtttaaccttcagatcgcatggtcaacaggatatcttgcaggaatgaattaatatattaggaagcagatcaggaggaaaagataatgtatagtattgcgattgatggaccagcaggagcaggaaaaagcacgattgcaaaaacaattgcaaagaaattagaatttatttatgtggatacaggagcaatgtaccgtgcgatggctctttatttcatcagacatgagatcgatccaaaggatgaagaggcaatcaacaaagcatgtccagatattcatgtaagtatcaactatgaagatggagtgcagcaggtgttattaaacggggaaaatgtaaatggactgatccgtaccgaggaagttggaaatatggcttcgaagacatctgcatataaaatggtaagagcaacactattagatcttcagagagatcttgccaagacggctaatatcttaatggatggaagagatatcggaacaaacgtactgccaaatgccgatttaaagatttatttaactgcatcatctaaagtaagagccgagcgccgctacaaagaattggtagaaaaaggtgtagaggctgatttcgataagattgaggaagatatcattatccgtgaccgtcaggatatggaacgtgagatcgcaccgctaaaacaggcagaagatgcagtgctggttgattcttctgatatgacgatcgaagaagttgttgatgcgatcgttgcagaatttgaaaaagtaaaataataaaaagtttatttacaagcagtgaggataaagatggaagttattttagcaaaaacagcagggttttgttttggcgtgaagcgtgctgttgacactgtatataaagaagcaggaaagaaaaatgtatacacatacgggccgatcattcacaattcagaggttgttaatgatctgaagaaaaagggcgtggaagtgatcaattccagagaagaattagaagctttggaagaaggaacggttatcatacgttcccatggagttgcgagagaaatttatgatctgatccatgaaaaaagattggaattagttgatgcaacatgtccatttgtcagaaagatccataagatcgtagagaaagcgggcaacgatggtgatcaggtgatcatcgttggaagtgagcaccacccagaagttcagggaatcaaaggatggtgtactggagaagtgcatattatctcagatgcagagcagtttgaagggatcgatcttaacaagccgacgactcttgtatcacaaacgacatttaattacaagaaatttcaagatttagttgaaattctgaataaaaagggttatgatataggagtatgtaatacaatatgtaatgccacggaagagcgtcaactggaagcaaagtctatcgctaagggtgtagatgcaatggttgtgatcggagataagcaaagctccaacagccagaagttatatgagattagtaagaaagagtgtgagaacaccttttttgtgcagacacttagagacctggatttgaaactttttgaatcgactggtaaggtaggtattacagcgggggcctcaaccccacagaaaattatcaaggaggttcatgctagcatgacagaaaagagttttgaagaattattagaggaaagttttgtgacaattcacaacggagaggtagtgaaaggtacagttatcgatgtgaaaccagatgagatcatcttaaacatcggatacaaagcagatggtatcttaacaagaagtgaatactctaatgattcagccaacgtagatttaacaactgttgctaaagttggtgatactatggagactaaggtattaaaagtgaatgatggagaaggacaggttcttcttacttataagagattagcagctgaaaaaggaaacaaacgtttagaagaagctttcgagaataaagaagtcttaaaagcacctgtagctcaggttttagatggtggattaagcgtactgatcgaagaagcacgtgtattcatccctgcaagcttagtttctgattcttatgaaagagacttaaagaaatacgaaggacaggaaatcgaattcgttatcagcgagttcaatcctcgtaagagaagagtcatcggagaccgcaaacagttattagtagctgctaagaaagaaaaacagaaagaattattcgagaagatcgaagcaggaatgaaagtagaaggagttgttaagaatgtaacagacttcggtgcattcatcgatttaggtggagcagacggacttcttcacatttctgaaatgtcttggggacgtgttgaaaaccctaagaaggtcttcaatattggagataaagtaacagttctgatcaaggatattcagggagaaaagattgcattaagcttaaaattcccagaagagaatccatggttaaaagcagaagagaaatacaaagtaggaagtgttgtaacaggtaaagttgcacgtatgacagatttcggagcattcgttgagttagaatcaggaatcgatgcacttcttcacgtttctcagatcgcaaaagaacatattgacaaaccatctgacgtattaagtgttggacaggaaatcgaagctaaagtagttgacttcaagaaagacgataagaagatcagcttaagtatgaaagcattagctaacgaagaagaaaaaacagaagaataagatctttatcaaagaatcctgatttttataaatcagggttcttttttcgtacaagtattgtaaaaaaacaagttttgcgatataatcagttttaaaaatacatttttttaaaatgataaacctcgaaaaggagttatgaccatggaattaaagaagtttaaaaaagtattggttgcaaaccgtggtgagattgcgatccgagttttccgagctttaaatgaacttggaattacaacggttggtgtcttttcaaaagaagaccgttatgccttattccgttctaaagctgatgaatcttatcagttgaatccggacaaaggaccaatcgatgcctatcttgacatcaatacgatcattcgtattgcaaaagagaagaacgtagatgcaattcatccaggttatggatttttatcagagaatcctgactttgtagatgcctgtgagaagaatggaatcacatttatcggaccatcctcaagcttaatgcgtaagatgggagataagatttcttccaaacagatggcaattgaagctgatgttccaatcattcctggtgtagaccatgcggttcacggactggaagaagtgactaagattgcgaaccaagttggatatcctgtaatgttaaaggcttccaatggtggtggaggacgtggaatgcgtatcgttcattcagccgaagagatgccaaaagaatatgcagaagcaagagatgaatccaagaaagcatttggagacgatcagattttcgttgaaaaatacttaaagagtccaaaacatatcgaggttcagatcattggtgatcagtatggacatgttgttcatttatatgaccgtgactgctctgtacagagaagacatcagaaggttgtagaatatgcaccagcattcagcgtgccagaagaagtaagacagcagatttttgaagcatctatccgtcttgcaaaacatgtaggatataagaatgctgggacattagagtttctggtagatgcagataaaaatgcatactttatcgagatgaaccctcgtgtacaggtagaacatacgatcacagagatggtaacaggaatcgatatcgtacagacacaggttcttgtagcagaaggatattctttagattctgaagagatcggtattggatctcaggaggaagtgacatgtaatggatactctattcagacacgtatcacaacagaagatccaatgaataacttcctgccagacacaggtaagatcacggtatatcgttctggagctggtaacggtattcgattagatggtggtaacgcatatgcaggagcagagattacaccatactatgacagcttattggtaaaagcgatctctcatgatcgtacatttggaagagcggttgacaaatctatccgtgtattaaaagagatccgtattcgtggagttaagacaaatatcccattcttgatcaatgtattaaataatgagacattccgtgagggaagatgctatacaacatttattgaagaaacgccagaattattcttacttccagaaagtcaggacagagcaacaaagatccttgaatttttaggaaataagatggtgaatgtgcagaaagccgttcttgacaaaccagattttgaagcaagaactcttccaaagtatgatacggagaagaagatttatggttccagagacaagttcttagagatgggagctaaagacttcacacagagcctgttaaatgagaagagattactgatcacagatacaacaatgcgtgatgcacagcagtctttaatggcaacacgtatgagaacaaaagatttgatcggagcatctgatgcgacaaacgcatttatggagaatgcattctctgtagaggcatggggtggggctacttatgatacagcttatcgtttcttaaaagagtctccatggaagagattaaaattattaagacaacatatgccaaatacattgatccagatgttacttcgagcatctaatgctgtaggatacagcaactatccagataatgttgttaagaaattcatcgaagaagcatcacaaaaaggtgtagatgtgttccgtatttttgacagcttaaactgggttgagaatatgaagatgccgatcgagacagcattaaagacaggtaagatcgtagaaggaacgatctgctacacaggagatatcacagatccaaacgagacaaaatatacattagattactatgtaaagaaagccaaagaattagaaagcttaggtgttcatatctttacgatcaaagatatggcaggtcttgtaaaaccatatgcagcgaagaaacttattagtgcattaaaagaagaattaaatattccagttaatcttcatacacatgattctactggaaatggtgtcagcacattattaatggcatctgaagcaggactagatatcgctgactgtgcgatcggttctatgagttctatgacaagtaacccatgtatgaattcattagtagaagcattaaaaggaacagagcgagatacaggacttaatccagatgaattaacagaattaagtcagtactatgcaagaatccgcccaatctacaaacagtttgagagcggaatggatgcgccaaatacagagatttacaaatatgagattccaggtggacagtactctaatctgttagcacaggtaaaagaaatgggtgcagcggaagactttgaagagatcaaaggtttatataaagatgcgaaccagctgcttggaaatatcgttaaagtaacaccatcatctaaagttgttggagactttgcgatctttatgttcaagaatggattaacaaaagagaatatcttagaagttggtaaagatttatcttatccagattctgttgtagaatattttgaaggtatgatcggacagccagaaggtggattcccagaagaattacagaagatcgtattaaaagataagaaaccgattgatgtgcgtccaggaagtttattaccagatgaagattttgattatatcgcaaagggattaaaagaaaacttctatacagagaatatggaagatccagatgtcttaagtcagaagacattaagctatgcgttatatccaaaagtatatgaagattactgtagacattttgaggcttacaatgatgtaacaggacttgaaagtcacgtatatttctatggattaagaaaaggtgaagagacaacactgaaattagatgaaggtaaatatctgatcatcaaatttatcgatatgacagagcctgatgaagatggataccgactgttagactttgaagtaaatggatctatccgtgagattaaagttcttgataagaatttagaggttaagacagaccgaagagttaaagcagataaatctaatcctgcacatcttggatccacaattccaggaacagttggtaaagttcttgtcaatgaaggtgatgaggtcacagtgaatatgccgctgatgacagttgaagctatgaagatggagacaactgttgtttctacggttaatggtaaggttgataagatctatgtcaaagaaggagaacaggtaaatcaggaagatctgttaatctcttttgaaattgatgaatagaaattgaattagatttcatactaaagaaggaagtaagaagatgcttccttctttttttagtgcaaattgcagagcatcgttctaaataataaagataaaaaatatgatacaggaaggtaagattttggtatgaaagataatgagagacaagaaatagaaaaatttggacagttgcaggaaaatgggatttttacaatgactatcattggtgagatcgaagggcatcagttatctgcacaaaatgcaaagacaacaaaatatgaacatatgataccggctttagcaaaggttgagcaggatgaaagtataaaaggaatcttaattttgatcaatacgatcggtggagatgtagaatgtggacttgcgatcgcagagcttatcgcatctctaagcaaaccaaccgtatcgcttgttcttggaggaagtcattcgatcggagtaccgcttgctgtggcagcagatcattcttttattgtgaaaagtgcaacaatgatgattcatccagtgagaagttctggaacatttatcggagttattcaaagttatcgtaatattgaaaagattcaagatcggattacgacatttattagtgatcattgtaaaatgaaaaaggaaagagttgaagaattgatgcttcatattggacagcaggtaaaagatgttggtatgatcctttcagggaaggaggcagtaaaagaaggattgatcgatgagatgggtggaataaaagaagcaacagacagattgattgaaataattaatcagtctgaaaataaatagaaaatttgaataaaaaacagataatacctttataaaattcctgttttggtatatgataagaataacaagtatgttaaaaaaaacacaaactatcttaaggcatcattagaggagggaatatcatgagaggaatacagacaccagttcgaaatgtgagaagaagaattttcaaagagatcgcaaagtttggctacgaacaaaggaacctacaggatcttgaagatcttccatatgagatcatacctggagaagttgcaaaatatcgagatagcatttacagagaacgagcgatcgtaggtgagagattgaggcttgccatgggaatgtcattaaatccagcggataaaccaacaagaattacgaaagaaattgatgagagcaatatttcagagaaatattatgagccgccacttcttcaggtaattccatctgcatgcaatgaatgtaaggagaaggcatttattgtaggagagcagtgccagggatgcatggcacatccgtgtatggaagtttgtccgaagaaggcaattagttttaaggatggatattcttatatcgatcaggaaaaatgtatcaaatgtggacaatgtaaaaaggtttgtccatatggtgcgatttatgaaagaaaacgtccttgtgcaaatgcctgtggggttggagcgattgaaacagattatgcaggaagagctaagatcaatccagataaatgtgtttcttgtggtatgtgtatggtaaattgtccgtttggagcaattgcagataaatcccagatttaccagttgatcaaggcaatgaatgaaggtgcggaagtgatcgcgatcttagcacctgcatttgtcggacaatttggaccaaaagcaacgccaaataagattaaagctgcacttcttgatattgggtttgcagatgtgtgggaagttgcagttggagcagacgcaggggcactagaagaggcaaagcattatgttcaaagtgtagctacagggaaactaccattcttgctgacatcatgctgcccatcatggtctatgcttggaaagaaatattttccagaggtgatcgatgaaatttctaatgcactaacaccaatggtagcaacggcaagagcggcaaggattacatctccaaatgcaaaaattgtttttgtagggccatgtgttgccaaaaagttagaagcatccagacggacagtgcgaagtgaggtcgattttgtgatcacatttgaagaactggctggaatgtttgatgcgaaagaaattgattttaacacatatgaaaaagaagaagagttaaatgatgcctttggagcaggacgtgggtatgcagttgcaagtggagtagccggagcgatcaaggcatgtattgatgaatactatcctggaacagaagtaaagatcgatcatgtggaaggccttgcggagtgtaagaagatgcttctacaggcgaaatcaggaaagaaaaagggatatctgatcgaaggaatgggatgtccaggtggatgtgttgcaggagccggaaccaatataccagttgtgaaagcacaaattcaggttaagaaatttgtagaagaagcggaagattttgtacctccagaaactgcacaatattaagaggttaaaagaaaagggaaatgtactggagataaatacatttccctttttcacggtgggacttgcgtattttgataattaattgtaaaataagaaaatacgcagattatgtatacaaaatgtatacaaagagaggtaacaatttctatggcagcaaagaagacaagaaagaggaagacatcttctgcaaagaaacggacacgcacaagacaaaaagattttgcaccgttttataaagagattgcagtattagttgtttttgctcttttcatttttttatttttaagtaattttggaatatgcggatacataggaaacagcatcagtacatttttctttggagcgtttggaacgactcattacatcattccggcggtaagctttattctggcaattttattgatctccaatgattacagcagtcttgcagtgaagaagacatgttttgcgatcctactgttatgtatggtatccacaatttttcagatgatatataatatagaagtaagagatgcttattcagcctttgtatttagtggaagaacccacagaggaggcgggtatctgggtgcattgatctgttcaatcctttataaggaactgggaggggcaggaagtgttttggttgttttattgatttctgtaatctcattgatccttgtaacagagagatctttactttctttccttaagaaagcagttgatttctttacagtagaaggatatgaagaagatatagaagaacgactagcgaagaagaaacgaaaagcaaaagaggtgtccaaagaggataaagaaacagcaccgagaaagaaacgatcgatgcatattccggatttacgatctggaagaccgaaaccatcacaggcatctccaatgcctcctatggaaccagaagagaaaacaaaacaaacaccgatacagaaggattttgatgatctgatcgttcaagaagaaacagacaaagaaccaaaagaaatatttgaaccagtacagccgaatgcatcgaagagatctcttgtgaataaggataagaatacaccatcgaaatcagtggagattcttccgcaggttcggactaaagaaggagattataagtttccaccagtatctttattggagaaaggaaagaaaacagcgggaaataacaaagaagaacttcgtcagactgcacaaaaactgcaaaaaacattggaagatttcggagttcatgttacaattaccaatattagctgtggaccatccgttacacagtttgaattacatccagaacaaggtgtgaaagtcagcaagatcgtaaatcttgcggatgatattaagttaaaccttgcagcagcagatattcgaattgaagcaccgattccaggtaaatcagcaattggaatcgaagttccgaataagacaaaccagatggtaatgttcagggaactgatcgagaatcaggaatttgcacaggcaagatcaaagattgcatttgcagtaggaaagaaccttgctggacaggtgatcgtgtcagatatttccaagatgccgcatcttttgatcgcaggagcaacaggttctggtaagtcagtttgtattaatacattgatcatgagtattttatacaaggcaacgccagatgaagtgaaactgatcatgatcgatccaaaggtcgtagaattaagtgcatatcagggaattccacacttgctgattccggtcgttacagatccgaagcaggcatccagtgcgttaaactgggctgtgatggagatgggagagcgatataagaagtttgcagaagtgaatgtaagaaacttaactggatataatgagaaggttgaggaatcgatcaagaatggtatggaaggggaagattttaagaaacttccgcagatcgttatcattgtagatgagcttgcagaccttatgatggttgcaccgggtgaagtagaagatgcgatcgtgcgcctgtcacagcttgccagggcagcaggaattcatctggtgatcgcaacacagagaccatctgttaacgtcattacaggcctgatcaaagcgaatgtaccttcaagaattgcattttcagtatcatcaggagtcgattcaagaacaattatcgatatgaatggtgcagaaaagttattaggaaaaggtgatatgctgttctatccatctggatatcagaaaccaatccgtgtacaaggtgcatttgtcagtgatgaagaagtcagcaaggttgtagaattcttaaaggaagaaaataatgccgaagacagctatggtgcagatattcaggaaaagattcagacagctgcggtcaaagcagcaacatcgcaggaaagggatgaatattttgaaaaagcagctgagtttattattgacaaagacaaggcttcgatcgcaagtcttcaaagagtctttaagattggatttaaccgtgcagcaagactaatggatcagttatgcgaagcgggaatcgtcggagaagaagaaggaaccaagccaaggaaagttcttatgagcgaagaacaatttgaacaatacaaagaagattatctatagaaaggaaactattatgaaaacagatattgaaatcgcacaggaagccacattattaccgatcaaagaagttgcagcgaatatcgggatcaaagaagacgaccttgaattatatggaaaatacaaggccaaatttgattctcatttcatggatgaagttaagaataacgaagatgggaaacttgttcttgtgacagcgatcaacccaactccagcaggtgaaggaaagacaacaacaagtgtcggagtatcccaggcgttaaacaaacttggaaagaaaacaatctgtgctcttcgtgagccatctcttggaccatgctttggtatcaaaggtggagcagccggtggtggatatgcacaggttgtaccaatggaagatttaaaccttcattttacaggggattttcatgcgatcacatctgcaaacaacttattagcagcaatgcttgataatcacattcagcagggaaacaaattaaatatcgatacaagagatgttgtatggaagagatgtattgatatgaatgaccgtgcattaagaaatacagtcatcggacttggacgtcgtgtggatggtgttgtccgtgaggatcattttgtcatcacagtagcatctgagatcatggcaattctttgccttgcaaatgatatggcagatttaaaagaacgtttaggaaagatcatcgttgcatacaacatggaccgtgaaccagtcacagccaaagacttgaatgcagttggagctatggcggcattattgaaagatgctattaaaccaaatatgatccagacattagagcatacaccagcattcgtacatggtggaccatttgccaatatcgcacatggatgtaatagcgtacaggctacaaaattagcgttaaaattagcagatatcgcaattacagaagcaggattcggtgctgaccttggtgcagagaaatttatggatattaagtgtcagatggctgatcttcacccagatgcagttgtattagtagcaactgtacgtgctttaaaatacaatggtggagttccaaaagacaatctggcagaagaaaatatcgatgcgttaagcaaaggtatcgtaaatcttgaaaaacatatcgagaacttaaaattgtttggagttcctgttgttgtaacattaaaccagtttgcaacagatacagaggcagaacttacatttatcaagaatttctgcgaagaaagagattgtgattttgcattatctcaggtatgggaaaaaggtggagaaggtggaatcgaacttgccaaagcaatccttcgtacattagataataaagaaagcaattacaaaccattatatacatatgatgatacaacgatagaagaaaagatcgaaacgatcgcaactaagatttatggagcagataaagttgtatacacagcagctgcagcacgtcagaagaagagactgactgaacttggatatggaaatcttccaatctgtatggcgaagaaccagtattctttatctgatgatcctaagaagcttggacgcccagaaggatttgatattacgatccgtgagatctatgtcaatgcaggtgcaggattcttagtagccttgacaggtgatgtcatgacaatgcctggacttccaaagaaaccagcagcagaaggaatcgatgtaaatgacgatggagttatcacaggattattctaatcaacaaaaataaagccaatatatacttaaaagaaatgacgaggaaatacaatgcagattattgatggaaagaagatttctcaggaaatcaaagatgaagtaaaagaagaagtagcgcagctgaaagcagagggaaaagatattgcgcttgctgttattcaggtaggagcagatcctgcatcaagtgtttacgtacgcaataaaaaacgtgcttgcgagtatgtaggaatcgagtctgtaagctatgagcttccagaagagacaacacaggaagaattaatggcgatcgtggataaatgcaataaggatcctaagatcaacggaatcctagtacagcttccacttccaaaacatttggatgaagatgaagtattattagcgatcgatcctaagaaagatgttgacggattccatccagtcagtgttggaaatatggtgatcggagaaaaaggattcttaccatgcacaccagccggagtgatccagttattaaaacgttctggtgtcgaaattgatgggaaagaatgtgtggtagtcggaagaagtaacattgtaggaaaacctatggcaatgttattattacgtgagaacggaacagtgactgtctgccattctcatacaaaagacttaaaagaagtctgcaaacgtgcagatatcttggttgtagcaattggtaaaccaaaatttattgatgattcttatgtaaaagatggagcagttgtcattgatgttggaatccacagaaatgaaaataacaaactttgtggtgacgtagattatgacaaagttgcaccaaagacatctgcgatcacaccagttccaggtggagttggaccaatgacgatcgcaatgttaatgaaaaactgtgtagaatctaagaaattgtttggagagtaagagaaatgaagatattatttatttcgcttggatgtgataaaaacttagtagacagtgaagttatgcttggccttttgaccaagcatggctacactttgaccgacgatgagacacaggcagatgttattgtaattaatacatgctgtttcatccatgatgccaaagaagaaagtatcaatacgatcttagagatggcacagtacaaagaacagaatctgaaggcattggttgttgctggatgcctcgcagaacgttataaagacgagatcttaaaagagattccagagattgatgcagttcttggaacaacaagttatgattctatcgtagaagcagtgaataccgcattagaagaaaatacaggggaacattttgaacattacgaaagtattgattatcttccagataattctgaagtagaacgtgttgtaacaacaggaaatcacatggcatatttaaaaattgctgaaggttgtgacaagcgatgcagctattgtataattccaaagatccgcggacgtttcagaagtgttccaatgcaagaactgttgaatgaggcaaagcgtttagcatctgaaggagtgaaagaattagtactggtagctcaggaaacaacactgtatggcaaagacttgacaggagaaaaacagcttccgttattacttcatgaactttgcaagatcgaagggattgaatggatccgcctgttatactgctacccagaagagatcacagatgagctgatcaaagtgatcaagacagaagagaaagtctgcaattacattgacatgccgattcagcatagtgagaatcgtatcttacagagaatgggaagaagaacatcaagagaagatcttgtagcagtgatcaagaaacttcgtaaagagattcctgatatcacgatccgtacaacactgatcactggatttccaggagaaagccaagaagatcatgaaggattaatgaactttgtagaagaatgtcaatttgatcgtttaggagtctttacttattcaccggaagaagatacactggcagcaacatttgaggatcagatcgacgaagaagtcaaagaagaacgaagagatgaactgatgagtcttcagcaggagatttcctatgaacatacccagcagttagtcggtaaaacgattaaagttatggtagaaggatatttatttgaagatgatatctacgttggacgttcttatatggatgcaccaaaggtagatggatgtgtttttataaattctccagaagaattgatgacaggagactttgtttatgttaaaattacccagggtagagaatatgatgtgataggagaagtagattatgaatttaccaaataagttaacaattttaagaacacttatgatcccggtattcttatttttcttgctgacagattgtgcaggggattatagcaagtggatcgcagttgttgtatttattctagcgagtcttacagactttttagatggacatattgcaagaaaatacaatctggtaacaaacttcggaaaatttatggatccattggcagacaaattattagtttgttctgcaatgatcgcattagttggaatgcaccgtttatcatctatcgtagcgatcattattattgcaagagaatttatcattagtggattccgcttgatcgcctctgataatggaatcgttatcgcagccagctactggggaaaatttaagacaaactttcagatgtttatgatcattatgctgatcattgatcttggaacaagcacagctgtgatgatcgagaatattttgatcgtcattgcaacagccctgacaattatttctttagttgattatttggtgaagaataaacaggtattatctgaaggaaattagatccagaaaggaacaacaattatgacagcagaaattatttgcgtaggaacagagattttattaggaaacatcgtgaataccaatgctgcctacttatcagaacgcttagcctcattggggataagcgttttttttgagacgacagtaggcgacaatccagaaagattagaaaatgtgatcagacagggacttgaaagatctgatattttgatcttatctggtggacttggaccaacgaaagacgatcttacaaaggaaattgcaacgaaagcatgtggacaggggcttgtagaagatgaagaagcactaagacgcttgaaagaatattttgcgagaagtcatcgtaacatgacagagaataatttaaaacaggcattagtgccagaagattgtactgttttatataacgaaaatggaacagcaccgggaatggtcattcatgcaaaagaagggaagaaagtagttttactcccaggacctccaaatgaactgcttccaatgttccatgatcaagtagaaccgatcataaaagaattaagttcagaggtattatactccgatgttgtgaagattgattgtatgggagaaagccgcgttgcagcagagattgaagatttgatcgaaaagcagacgaatcctacagttgccccatatgccaaattaggagaagttcatcttcgagtgacagcaaaagcggtaagtgaagatgaagcaaagaagcttgttacaccaataacagaagaattatacagaagatttggtcataagatatttacgacaaaagaagatgaaacattagaagatgttgtggttgatatgttaagtaaacatcattatacgatcgcagcagcagaatcctgtacagcaggaatgtttacagcaaggttagttaatgttgcaggagcatcggatgtcttaaatgaaagtttcattacatatgcaaatgaagctaagatgaaatatcttggagtaaaagaagaaactctaaataccgttggagcagtttcagaagatacggccagacagatggcggaaggtgttgcacgacaggctggttcaaatgtcggtgttggaatcacaggtcttgctggaccgggcggtgaaacacctgagaagaaggcaggacttgtttacatcggtgtcagtgttaatggaaagacgaaagtaaacaaataccagttaaacggtaacagacagaaagtcagagaaacagctgtatgcagagcgttaactatggtaagacatgcattggttgaagagtttctatgagaatcatcataagaaaaaggatcacgaataaaaatcgaacaaatattcgctcgaacacttgttttttagtgtaaggatatgctatactctaaacaggaaattaaaagatagaagaatataagataaatatttgaaattaaaaggagtaaacatatatgaaacaggaagagaaattaaaggcattggatgccgcattggttaagatcgagaaagactatggtaagggatctgtcatgaaacttggagagtaccaggcagaccgtacgatcgaagtaacaccaacaggttctatcagtcttgacatcgcattaggagtaggtggagtacctaagggacgtatcatcgagatttatggacctgaatctagtggtaagacaacagtagcacttcatatggtagctgaagtccagaagagaggcgggattgcaggatttattgatgcagagcatgcccttgatccggtctatgcaaagaatatcggggttgacattgataacctttatatctctcagccagatacaggagagcagggacttgaaatcacagagacaatggtaagatctggagcgatcgacatcattatcgtcgattctgtagctgcattagtaccgaaggcagagattgatggagatatgggagattctcacgtaggtcttcaggcaagattgatgtcacaggcacttcgtaagttaacaggtgttgtaagtaagtttaactgcacagttatctttatcaatcagttgcgtgagaaagttggagtcatgtttggaaacccagagacaacaactggtggacgtgcacttaagttctattcatctatccgtttagatgtcagaagaacagagacattaaaacaggcaggagagatgatcggtaacagaacaaggattaaagtagtgaagaataaggtggctcctccgtttaaacaagcagaatttgatattatgtttggaaaaggaatttccaagtatggagatattttagatcttgcagcagatgcagatatcattcataagagtggtgcatggtatgcatacaacggagagaagattggacagggtagagagaacagcaagaagtacttagaagatcacccggatatcgcagagacagtggaacatgcaatccgtgtccactatggactgttagaggaagatgctgagaatgccaacaacgatcctaaggcagagactcaggtttctgaagaataatgatcattacgaaactagataaagtaggaacaaagcaggtcaggcttttcttcgatgaagaaaagtactgcctgctttactataatgagataagacgattgggattccatgaacaagacgagatcggacaggaagaatttgaagaattaaacaaattactgttgcatcgggcgaagttaaaagctatgtcattgttaaaatatcaggatcgtacaaaaaaggaattaaaagaacgtcttatgagagcagaatttccagaatttattacggaaggggcagttgcgtatgtggagtcatttggatatatcaatgatgaagaatatgtacgccgctacatggaatacaagtcaggaagtaagagtaagattcagattaagatggaccttcggaagaaaggaatcactgcggagacattagagagggtctttgaggaatatgaatacgaagaagatgatatcttggaagaacaggttaagaagaggatccggcaaaagggttccgtcactaaggagaattttcagaaatattacggatattttgcgagaaaaggatttaatagcggtaaaatattagatttattacggaaatacatggaagattaaataaattaaaggctaaatattaaaaaaatataaagaaatcatcatttggttgcatattgacagataaaattatataatttgagtcaaagggtgtaacaaagcagatgacgacgatatctggaaggaatatatgatccggatatggttccaattataaggagtatcatttatatgagaaagaaatcacatatttcattagcagggcagattatggattctatggaacttgacaatgtatttgattatagattaccgttttatgtaggaagtatctggccagactgcagaccatcatttgtgacgacacctcataagtttgatattacatttgatgatattgaacgtaagatttcaaaatttattgccaattacgataaagataagggaatgaatatgcgacgttgtgcaggtcttggtgtgatcattcattacattgcagattattttacattcccacataatgatcattatccaggcaatgtaaaggatcattgctattatgaacgtgatctgaagtttggaatgagagcatttcttgagacagaagaagcagcacagatcaaggagcatgttgcggcatatgattctgtggaagaattgacatcatatattagaagtattcataattcttatatgaagcttgcacatacagtagaagaagatatcagatatatcgtacatgcatgtacaaccgttgtgaagagtgtactgaatatggtaagttatgcagttggtacaagtgtgatgaatattcagtatgtataggacaaggaattgaagataaaataataaagaaaaagggcaaagacagacagagatgatttgtttttgctctttttattgaaatcagtttgtaaaaaatgataaaaatatgatgcaagtatgatgcaaagaattcgtaaaataaaaaaggttttgggcagcatacaaaaacaataaggaaaatcaataaaacaataaggagaacaattatggtgaacatcatggtcgtggaagatgaaaagccaatttcaaatctgattgcactaagtttaaagaaagccggctatcatagtgaatgtgcttatgatgggttagaagcaattgatatgctggaaaagaattatccagatttgatcttactagatatcatgctgcccggggctgatgggtttgaaattttagaatacgtaaaaccattagagataccagtcattttcctgacagcaaaaggagatcttaatgacagagtaaatggtctgcgatatggagcagaagactatattgtaaaaccatttgagattatggaattattggcaaggattgaggttgtattaagacgatatcacaaattagatcgtattatcaatatattaggtttagaaatcgacacagatgcaatgtgcgtaaaaaaagaagggaaagaaattaacttgaccaagaaggaatatgatacattattgctgtttgcaaggaatcctggaaatgtattattcagggaaataatttatgaacgtgtttggggtggagattacattgcgggaagcaggacggtagatcttcatgtgcagagagttcgaaagaaagttggctgggaagattttttgatcactgtgcccaagatgggataccgtctggaggtaccaagatgaaatttcgttggaaattaatgatcataacaatgttgatcgtttcattttcatttggatttggaggaatgttgctgattcaatattcatatcaagcatctatcaaacaagaaaaaagagcagcaaggaattcttacgaaatgatcttaagaatgttaaaagaaattaatgagatggatgatacgtatcagaatcaaacatttgcgagtgtattgaaacgattaaactggcagggcttgctaagagacagctcagttcgattattaaaggaacaacatggagaggttcaatggaagcagccactttattacaatcgtaaaaatgataattttaggagaagcaatggtttttcaacgaaacagggaaaagcggtagtattccaaaataaaaataaagtatattatcagattactagtaagatttcttatggaaaggaaactatggtttttcagggagcatatgatatttcagaagtatatgcgacaaggcatcagcagttggtaagttttcgtaagatttttgtattagtaataggaattgagattgtagtatcctattttctggcaatgatccttacaagaccattacagaaattgtcgcaggtttcgaagcagattgcagatggtgattattctgtcagggttccagtgcatacagaagatgaaattggagaactttcagtcagttttaattatatgacagaacaattgatagaaaagttaatgaaattggatcaattgttaaaaaaccaggaagaatttatgggaagttttgctcatgaaatgaagacaccacttacatcgatcatagggtatgcagatctgatgcggatggaagctctttcgaaagaagagcaaaaagaagcatgtgggtatatttattcagaaggaaaacgattacagaatttatcattaaaattaatgaaacttcttgttttgaaaaatcaacagtttcagatgaaaaaacaagatttagagccaatgattcaagaagcagttacatccatgcagtatcgtttaaaagaacaagatattcttgtgaatttaaatttaaaaaaagcaatttgtaagatagagccggatttattgaaatcattaatattaaatttgatcgataatgcattaaaatcaatgaattcgggtggaatattaacagttgaggatcgagcaacacaagaaggagccaagatttatatttcggatactggatgcggaatgccaaaggatgagataagtaagatcacggaagcgttttaccggatagataagtcaaggtcaagaaaacaaggtggagtaggtttagggcttgctatatgtaaagaaatcgtgaggatccatcaaggagagatgcgatttatcagtcagcaagggaaaggaacaactgtgatcataacaattggaggaggagcttatgaaaaaacaaattaggaatgctcttcttgttgtggcggctttattacttgtggtcttgttttactttttaccaaatattcaggcagctctggtggacaaaaaaacgtttgggcagagtgaggatctatccttaaatccagtagagatttcggtagaggctactcagacaactctggaaaaattaaagatcatcaataatcatattttgagtgtagcagtaagaccttcatcaagaactgtggatggaagagatgtagaaaaaactgcaaaaaaacagacgaatctattattaaaaaaaatgaaaatcgcttatcgggtagaggaagactggaagattacatataaaaaattatacacttatatcaagaaaaaggatgatatgatcgatgaaggttccgtatctaatatttcgaatgtcaaaaatcttctggtatggtatattacattatcaccagaatcgtcggaggatgaaatagtgaatcttattatggatgcgtatacggatcagattttagcgattgatgtgtactcttatgattacacaaaagattggaaagatatcgcagatcatttggaagatattccggctggatttttgtcttatctgaatctgaaacagtcagagtataatttgaagaagcgtttgatgggcaatgtcaatgtaacagaacaataccaaaaagcaaagtcagcaaagggatcttattctcagatttcgggcagaataggtatttatgcgatgcaaaataaaaaacagacatacattccaatcgaatggagtggttatggatttatgatcaacaatgtatacaacaactgatgcaaaataaagatttgctcttgtattttcaaagctttctctctataataaataaacggaaccctacaaatatagtaggatacgaaagaaaggttgaaagcatgagcaatattaatatttcatataaagaattaaaacagttagaaaaagggagttatcagcttcttgatatgagagatgaatcaaacacatcttatggaatgatccctggagctgttgtggcagcaggtgaagatgagcttggaacacaggcaaaggaatatattgatcagggtaagaaagttattttatattgtaccaagggaattttcagcaaggaggcagcagagaaattagcggaagaaggaatcgatgtccttagtttggaaggtggatacacaggatggttgttatccttgatgaaagaagaacaggaaaacgatcagaaaacagaacaaaataacaaagaagccgaaggaaaaggcaagaaaaaagaactgacaagaacacaggagattgaaaagagtatccgtaagaagtttcacaaacagatattctccaagtttgtaaaagcgatcaagacatatgatctagtgcaggagaatgataagatcgctatctgtatctctgggggaaaagattccatgttgatggcgaaattatttcaggaattaaaacgccataacaaattccattttgatcttgtatttttagtcatggatccaggatataatgaaatgaatcgacagatcatagagaataatgccaaattattagatattccgatcacagtctttgaatctgatatttttgatgctgtttatgagattgagaaatcgccatgttatctgtgtgcaagaatgcgtcgtggatatttatacagcaaggctaaagagcttggatgcaataagattgcgttgggacatcactatgatgatgtcattgagacgatccttatgggaatgctttatggagcacaggtacagacgatgatgccaaaacttcacagtacaaactttgaaggaatggaactaatccgtccaatgtatctgatccgagaggatgatatcaagcattggagagattacaatggattacattttatccagtgtgcatgtaagtttacagatacttgtacaacatgtaatccagacggtgttacgaaatccaagagaatggagacaaaacagttgatcgcgaagatgaaagagatcaatccgtatgtagagtccaatattttcaagagtgtagaaaatgtcaatttaaagacgatcattgcatataagaaagatggagtaaaacattcattcttagatacttacgatcaggaaaattaaataagaataaaaacacagagattggtgataaaatctctgtgtttttgtttagaactatgaaattattcgtcgtcttcttcaatctcaacaatctgacgttttctggcagcttcgtcattttccagatattcgtcgtaagtacattctttatcaatcagaccattcggagtgatttccatgatacgattagctgttgtctgtacaaactgatgatcctgagaagtaaacaataatgcaccagtgaaatcttttaatgcttcatttaaagcagtgatagattccatatctaagtggttggtaggctcatcaagaagtaagatgttggctccactgatcattaatttagatagcatacaacgaactttctctcctccagataaaacaccaactttctttaatgcgtcttctccagagaataacatacgtccaagaaatccacggacaaatgttgcatctttatcttcagaatactgagtcagccattcaacgatcgtttcatcctgactgaaatcttttgtattatcttttgggaaataagactgcgttgtagtcactccccatttgtaagaaccagaatcaggttccatttctccggataagatcttaaataatgttgtagcagccaatgtattaggacctacgaaagcaatcttatccgttggtttcattaagaaagaaatattatctaagacttttacgccatcgatcgtctttgtaagattttcaacaactaaagcatcatttccgatttcgcggtttggcttgaagttgatatatgggtatttacggctggatggttttaactcatctagctggatcttatctaaagctttctttcttgaagtagcctgtttggatttggaagcattggcactgaatcttgcgataaagtcctgtaattccttcatcttttcttcttttttcttgttggcttccttcatctgttttgtaagaagctggctggattcataccagaaatcatagtttccagagaataactgaattttcgcataatcgatatctgcgatatgagtacataccttatttaagaaataacggtcatgggatacaacgatgaccgtgttgtcaaagttgatcaggaattcttctaaccagtaaatagcgtctaagtctaagtggttggtaggctcgtcaagcagcaggatatctggatttccgaataaagcctgtgcaagtaagactttgactttctgagaaccgtttaagtcagccatctttgtataatggatatcgctaggaattccaagaccatttaataaggtagcagcatcagattctgcttcccatccattcatatcagcaaattcgccttctaattcactagcacggatgccgtcttcgtctgtgaagtcttccttcgcatataaagcttctttttctttcatgatctcgtataatctttgattacccatcataaccgtatcaaggacgatatgatcatcatactggtagtgatcctgtttcaaaacagaaagacgctgtccagaagtaatggatacatctccttttgaaggttcgatctctccggaaagaatttttaagaaagtggatttacctgctccattggcaccaatcagtccatagcagttaccttctgtgaatttaatatttacatcttcgaataaagcacgttttcctaaacgtaaagttacattatttgcctgaatcattgtataacctttctttttgatttataattaaatagaatgctcttttcattttacagaaaagccagagtttttcaagtaaaatttgcattgtgcaagtaaaaatacttgacaaaggcagtgaaattcgctaaactaacatctggtaaaggaaaattgctttacaggagtatcagatggaacgaatcgtagaacagaatttattatatgatttttacggcgaattgctgacagcacatcagaaggagatatatggtgaacatattttgaatgatatgacagccacagagatcgcagctgagtttggaattaccagacaggcggtgcatgatatgatccgaagatgtgataagatcttggcagattatgaagcaagacttcatctggtagcgaagtttttgacggccaaggagaagatcaaagagatccataccttatccagaaggcttcttaaagaagataaagagcagatggaagaagatatcagacaaatagaatctgtatgtaatcaggttttagaagatttataacttagatgaggtgaatcaatggcatttgaaagtttatccgagaaacttcagggtgtatttaagaacttaagaagtaagggccgtttaacagaagatgatgtaaaagcggcaatgagagaagttaaaagagctttacttgaagctgatgttaacttcaaagttgtaaagacatttatcaaatctgtacaggaaagagctgtaggacaagatgttctgaatggtttgaatccgggacagatggtgatcaagatcgtaaaagaagagatggaagcattaatgggatcaacgatgacagagattcagcttcgtccaggtaatgaaattacgattattttgatggcaggtcttcaaggtgctggtaagacaacaacatgtgcaaaacttgccggacagtataagaagaaaggaaaacgaccattattggtagcctgtgatgtatatcgcccagcggcgatcaaacagcttcaggtcaatggagagaaggtcggagtaccagtatttacaatgggagataagcagaatccagtggatattgcaaaggcttccgtagaacacgcacagaagaatggaaacaatatcgtgatcctagatacagcaggacgtcttcatattgatgagaatatgatgacagagctggttgagatcaaagagaatgtggatgtattccagagtattctcgtcgttgatgccatgacaggacaggatgctgtcaatgtggcgaaagaatttaatgagaaagtcggcgtcgatggaattatcatcacgaagatggatggtgacacccgaggtggtgcagcactttctattcgttctgtaacaggaaagccgattttatatgtaggtatgggagagaaactggaagatcttcagcagttctatccagaccgaatgacaagccgaatccttggtatgggagatgtattgtcactgatcgagaaagcagagcagacgatcaatgaggaagacgcacttcgtatgactgagaagatgaagaaggctgagtttgattttaacgattttcttgatcagatggatcagatgaagaagatgggtggattatccaatctgttatctatgatccctggtgtcggaaacaagatgcagggacttgatattgatgatagtatgatggataagacagcggcgatcatttattccatgactaaagaagaacgtgctaatcctaagatcatcaatgcttcaagaaagagaagaatcgcagcaggagcaggagttccaatcgcagaagttaaccgcttatgcaaacaggttcagaatcagaaacagatgatgaagcagatgtcaggtatgtttggtggcaaaggtggtaaaagaggtggatttaaattacctttttaggccttagttatagaaaataataattaatttaaattacaaagaaagatttttggaggtaaaaacaaaatggcagtaaaaatgagattaaaaagaatgggacagaagaaagcacctttttatagagtagtagtagcagatgctagatcccctagagatggtagatttattgaagaaatcggaacatatgatccaaatcaggatcctagcgtgatcaaatttgacgaagaagctgctaagaaatggttagcaacaggtgctcagcctacagatacagtagctaaattattaaaagctgcaggaatcgaaaaatagtcagatttaagacaggaggcagtgcatgaaacatttattagaagtgattgcaaaagccctcgttgatcagccagataaagtgacagttacagagaaagaaactgccgatgcagtcgtattagaacttcatgttgccgaaggtgatatggggaaagtaattggaaaacagggaaggattgcaaaggcgatcagaactgttgtcaaggcttcggttgacaaaggtgacaagaagattgtcgttgatattcaatagaagattaaaagctcacaggaaagtgtacagaagatgtataaaactgtgggctttttgttatgtataaattcgagaaagtaagaaagcccttgaaaccatttcatttcaagggcaatttttataaatattaatcttctggcagatcaagtttatcagatttctcaaataaggattgaatttcaacaagagattcttccagagaatcctcaatggactctaatttatctgcatcaacgttataatttaaaaacagctgttcaatattttctgtaatatgatgaccaagatgggaaattaaaaggaaagtattaaaattgtgactattctttgcattttcaaaacgctttaagtctgctgtaataaaatcgataatttcctgatcactggcgaatttaccatggaccattgcatatggctgcatacgctgtaaaaagtatttattatgtcgtgtaatattaaaaacataagaaacaattaatccatcaccaagatcgaattcagcaatgtgcatgatgctgttaaactccttgatagaagtagcgcctaactgacgcagattgatattaatataatctccggttacggtattttgattcataagatcacgctcctctcttaaatattataatccataattttttattaagcaaatcgaatcaaaagaaatacggaacatacgatgatcgataagatcatcattgggaatccaatcttaaaatattgaccgaatgtaattggatgtccgttatttttactgataccagacaaaacaacgtttgcagaagcaccgatcagtgttccatttccacctaaacaagcaccgagtgacagtgcccaccagattggagtgacatccattccctcggactgcatcgtaaggatcatagggattaatgttgcaacaaatgggatgttgtcgaggaaagaagatacaatagcggaaacccataagattaccatcattgtaaccaccatattaccatgagtgatagaaatcaatccatttgcaagcattgtgatgacacctacttttttcattccaccgacaacaataaataatccaataaagaaaagaatggtaggccattcaacgtctgcaatgatttcttcaggttcctgaccgccgatcaaaagcatgatacatgctgcagcaatagcaacagtacaagactgtacgcctaactggtcatggaaaataaagcataatgcgactaggatgataacgataacactttcatgcataagttttcggtccttgatcgctttgttttcatctaactgcataacctttacaattgattcgtctgtaacaaataactttcttccgtatataaaatacatacagatcagaccaacaatgataacaaatacagtggccacccctgtatttaaaataaaatctacgaaacttaatttggccgcactaccgatcataatgttaggtgggtcaccgatcagtgtagcggtaccaccgatattggaagccatgatctgtgtgatgatatatggtacgggatcaactttcaagatatttgtgattgccagagtcattggtcctactagcaagactgtggtaacgttatcaagcattccagaacatacggcggtgataaaaataaagatcaccatgattggccatggacgaccttttgcgatttttgcagctttgatcgctatgtattcgaaaataccagaattcttgataacagcaaccaaaagcatcattccgactagaatacagattgtttcaacatcgactgcgtcaacacaatcttcaatcgaaagaatgtgggtaaggaccagacaggcagcaccggttaatgaggcaactgtgttgtggacctttcctgtgatgatagcgcccatcgtacataaaaagatgatgatcgctatgatttgttgtaatgacataaacaatttcctcctaaaaataaactcattattataatagacctcttttcaaatattgcaagtataaaatgaaaaaagaagtcatagaaaacgacttcttttttagaaaattttcacatcttatataaatatgatataggtgtgattataaatttgtaacaatctgatcgtacagatcaagctgacagtgctgctcggacacagaaaagtgtttacagtttaaacagctaggtgtttttgtgtcatctccggtactgacgttctttacggaatggtcacagccacaaggacagtactgactgcattcttcagcaacttcctgatacactttattctggttttccataatataaaagcctccttataataagtactcacagaatcacttggaaagaattctgcgagtacgacaattgatacctttatattatgtacagatttactcgggataattcagatttttatcatctgcaacgtataaagcgttttttagatagtgatctgcaagataatttgccatcggaagattcatatcaagatagttaccacaatccttagcactggctccaggaacatcacctttaaaatcacgaataaattcaaaggtacttataataagaggtaatatatcctttgaagtaagatcgccagctaaaataagatagaatccagtacgacagcccattgggccaaaatagatgatcttatcctgccattctttgttatttcttaaataagtagcggcaagatgctcgatcgcatgcatctctgcggtattcataacaggctcacgatttggggctgtcatacgaagatcaaatgttgttaaagtctcagaaccaatggcatctttacgagaaacataaacaccgggtaacagttttaaatgattaattgtaaaacttgctattttttccatgatggatttcctttcttatataaaatgtgttatcactatagggatgattctgaaatcgttcactattatgcgatttagaatcatcttaaattttcatatcatattatagcgtgaaaatacaagaaaatctatggaataaaattagttttaataaaaatgaaaaaaagacaaaaagctgttgacatactgtatacagctatggtaagataatcaacatcgctgaaagagcggcaggaaaatataacatcggagctgatctggcttctgaaaagaataaaaaaacttcttgacacaagtgatcagatgtgatagtctataaaagttgctgacggagaacgatcagaacaatggagatcagatctgaaagaaaagttaaaaagttcttgacagatgagatcagaaatgatattatataaaagttgttgcagagcagaacagctcagaacagcaaaataaattaaaaaagttcttgacaaacaaaaagaactgtgataaaataacagagcttcttacacacaaggagcggatcacaaaaaagatctttgacaactgaacaataagacaaccttgaaaattctaatgaatttttcaaatgattttagtaaaaatcaacgaacgttctttataagaacagtaataacaaggataaagaagctagtgcttcttgaacttggatcaacattgaacatgagagtttgatcctggct

SEQ ID NO: 808 - DNA, 23639 bp, Unknown
  gut microbiota DNA sequence
aataaaaaatccattggcaaaaggcctggcacttggaacagcatctcatgcgatcggaacggcaagagcaattgagatgggaccagtcgaaggtgcaatgagcagtctggcagtagcagtagcaggacttttgactgttgtatttgtatcaggatttgctcaacttatttaaaaataggaggaagagatcatggtagatgagaaaatgatcatcacgatcggaagagaacatggaacaatgggagataaagtagcagaaaaaattcgaagacaatttgaactgccactttatgacaaggcgcatcttctaagagtagtagaaggaacggatgattatgatgaattaaatgcattttttaatgacagaaaagtaaacagtctgttatatgcgatcgcaatgagtgagaatgtaagttctaatgatgtgcctttcgggattatcaaaaagattattggtaatacgggaggcgtcgtgatggatagctgtggaaattatcttttcagggaacgtccgaatacggtaagaatttttatgcatgcagacaagaacattcgaattaaaaatcttatgaaatatcttggaataagcaaagaacaagctgaaaaagaaatagaaacagaagattcaaaacgttatgaatttcataaatattacacaaatgaaatatggggaatgtccaatggatatgaattatgtctggacgaaggaatccttggaattgatggatgtgtaaaaatgattttggactatctgaaaataagaaatttaatttaaaaaagttcttgacattacaaaaataatatgtataatagatagaggtggttgcaacagaccacctcgaatataaatctggctccatggtcaagcggttaagacgcgaccctctcaaggtcgaatcacgagttcgattctcgttggagtcataagctacaaacttcgtatttatgcggtttgtagcttttttattttgtttatatttgaattggttaaaggaaagggttaaagtttttgaaatattaaatctggaataaaaatataacgatcaagaaataaaaaatccccctggcatataaaatgccaaagaggattcaaacaaatgtcaaagtgctgattaaagcacaaagatattatatcacacaaaaaacaaaatgcaataatcacttgacaaaaaaatatcaatatgataatctacaacaagagtgaatctgaactatcgggtccatgaaggggcacaccacctcgggtgtgatgcttctttgtggaccctttttttgttccttttaaagataaaaggaaagtcagtcaaggaggaaagcagatgagattaaatggagagacaaaaacattaaaagaccctgtcgcattatctgatttcttaacacaggaaggattttcagataagagaatcgcagtggaaagaaatggagaaatcgttcctaaaggggaatatgcgaatgtgatcttaagtgacagtgacacattagagatcgtagcctttgtcggtggcggatgatctgaagataacaggtacaaagagataagaaaattatgcatatataaaggagaataacatgaaacaggacaagttaatcatcggtggacatgaatttgattcaagatttatcttaggatcaggaaaatattccttagatctgatcaatgcagcagtgcagaatgcaggagcacagatcattacattagcacttcgaagaacgaacacaaatgatacagctaatattcttgactatattccagaaggtgtcacacttcttccaaatacatctggagcaagaaatgcagaagaagcagttcgtattgcaagacttgcaagagaagtaggatgcggagatttcgttaagattgaagttattcatgattctaaatatctgcttccagataactatgaaacgatcaaggcaacagaaatccttgccaaagaaggatttgttgttatgccatatatgtatccagacttaaatgcagccagaaatcttgtaaatgctggggcagctgcagttatgcctcttgggtctccaattggatctaacaaaggaatctgtacgaaagactttatccagattttgatcgatgagatcgatcttccgattattgtagatgcaggaatcggaaaaccatctcaggcatgtgaagcaatggaaatgggtgcagctgcagtgatggcgaatacagcaatcgcaactgcaggtgatattccagccatggcagaagcatttaagaaagcaattgaggcaggaagaagcgcatatctggcaggacttggaagagtcattgaaaaaggttctagcgcatcatcaccattaacaggatttttggaggattaatcatgagtgtaagaattgatgagaatacagatcatatgaaatatacggatgatatggaagcgattgattcagatatcatggaccgtgtcatcgcagagatgaacagctatgatgcagacatttatacagcaaaagatgtcaaagaagcattggcagcagaaacttgttctgttgataatttcaaagctttattatcgccagcggcattgccgtttttggaagaaatcgcacagaaagcacagaaagagacaagaaaacattttggaaactctgtagcgatctttactccgttatatattgcaaactactgtgaaaattattgtgtttactgtggatttaattgccacaacaagatcaaacgtgcacagcttaatgcagaagagattgaaaaagaaatgcaggcgatcgcagagacaggattggaagaagttttgatcctgactggagaaagtccaaacaaatcaagtgttgagtatatcggggaagcatgtaagatcgcaaagaaatattttaaactgatcggtcttgaagtatatccaatggattctaaagattatgcatatctgcatgaatgtggggcagattttgttacagtcttccaggaaacatataattcagacaaatataagacactgcatttgggtggaagaaagagaatattcccataccgtctcaatgctcaggaacgagcgatcatgggtggaatgagaggtgtcggatttgctgctctcttaggattggatgattttagaaaagatgcactggcaacaggaatgcatgcatatcttttacagaaaaaatatccacatgcagaaatcgcattttcatgtcctagattacgtccgatcattaataacgataagatcaatccaaaagatgttcatgaaccacagcttctacagattatttgtgcatatcgaatctttatgccatttgcaagtattacgatctcaacacgtgaatgtgaaagattccgtgacaacatcattcagatcgcagcgacgaagatttcagcaggagtaaatgttggaatcggtggacacagtcaggaagaagaaaaaggtgatgaacagttcgagatcagtgatggaagatcagttgatgagatttatcaaatgatcgaggacaatggcatgcagccagttatgacagattatatttatgtataagaaaacaaaaaagtatatagtatacacaatctcggatcaaaataaaagatccgggattttttatcctaggaaaatccgatggaatcccctatgcaataaaaagctcaccgcttctaaaaagaagaatacagagaaagatcaaggatttttaacataatatagcttgtagatacttggctcagtagagccattgagcaagaagcccccacttcaaaatcagggatttaagtggtgggagcatgtcaccgagatctgggcggttgcaactaatacatatattgaaggaaccttcccgaatggtgtacaatatgatatggcaagtgcgatccagttaatgcacaatatgatggtggttcatgcaaaagctgttattgcatacaaagaagcaggctatgaaggaagataggtatcgttcattcgttagaaagtaaatatccttatgatgaaacgaaagacgaagatgttaaagcggcaaaaaatgaagatgtattaaataatcagttcttgttagatgcaacattccttggaaaatacagggatgaaacaatggagatcatcaatcgtttggtagagttaaacaacggaagctttcatgcaagcaaagatgatatggagatcttaaaagaagctgcatcttacaatgattatcttggaatcaactattaccagagccgttttatcagatattatgatggggcaaatgtaaaaggatattttgtatggtcgctgatggatatgttttcatggacgaatggatataacaagcactatggattgttttatgtagactatgagacacaaaaacgttatccaaagaaatctgcatattggtatcgcgaagtaagcaagacaaaagaactgtaaaattgcaatggaggaatgagaaatggaatatcagggaatcatttttgatttcaatggaacattattttttgacaatgataaacatgtgaaagcgtggaatgagatctctaagatcttacgaggaaaagaaatcacgttagaggaattacatacgaaactaaacggaacaccaaatatacaaaatattttatattttacagatgggaaggcaacaaaagaagaattagaaaaatattctcagaaaaaagaagaatattatcgtcaattctgtaaagaagatacggaaaaatttcatctggtagatggtgtatgtgagttttttgatcatttgaaagaaaaagatattccatttacgattgctagtgcatcaatcaaagaaaatattgatttctttattgagtcctttggactggaccgctggatcaagccagaagatatcgtttatgatgatggaacatatgagaataagatcgcaatgtttcataaagcagccgatgtgatcggcattgatatgaaagacattagaatttatgaagattccaattctggaatccgaaatgcatatgatgcaggatgtgaacagatcgttgtgatctgtgacaaggaaaatgaagaagaatttttaaaacgtccaggagttatagaagttatgcaggatttttcctttgcaaaagaattgtaatacaaatttaaaattgattttagggagtttcgtagacgaaactccctttttgtgataagataaattgaatataccttaatcaataaatgagaaagggtataatcttttgaaatataagaagaaagatataaaggagagttcgatgatcaatcagttagtaaacaatattaaaaaattagatgcccctattgttgttggattagatccaatgcttgattatgtaccagaatatattaagaaagcagcatttgctgaatatggtgagactttagaaggagcagcagaggcaatctggcagtataataaaggaatcattgatgcaacttatgatctgattccagcagttaaaccacagattgctatgtatgaacaatttggagttccaggacttgttgcatttaataagacatgtgaatatgcaaagagcaaaggtcttgtgatcatcggagatatcaaacgtggagatattggatcaacatctaaagcttatgcgatcggtcatgtaggaaaggttgcagtgggaagcaagacatacagcggattttgtgaagattttgtaacagttaatccatatcttggaagtgatggaatccgtccatttatggaagtatgtaaagaagagaagaagggaatgttcatcttagttaagacatcaaacccatccagcggagaattccaggatcaggagatcgatggaaaaccgttatatgagatggtagccgagaaagttgcttcctggggagaagaactgatgggagattcttacagctatatcggtgccgttgttggagcaacttatcctaagatgggagaagtattaagaaagatcatgccaaaatcatacatcttagttccaggatacggagcacagggtggtcaggcaaaggatcttgcgccattctttaacgaagatggattaggtgcgatcattaattcttccagaggaatcatctgtgcatataaacaggatgcttacagtcagtttggagaagaaaattacgcagatgcatcaagacaggctgttctcgatatgaaagaagatttaaaacaggcctgggtaaaataaaagaacacctattttgtgagtaaagaaaacagccagataaaggagaattgcaagatgagtaagaaacaggtaatggcagagatcattcgtcatacatctttatcagacggaatctttgatatgacattgaaagcagaagagattgcgaaagaagcaaaagcaggacagtttatttctgtttatctgaataacaagagtaagatccttccaagaccgatcagtatctgtgggatcgataaagaagcagggacattaaggatcgtctatcgtacggttggagatggaacgaaggaattatccgattacaaagaaggtgagatggtcaaaatcttaggacctttaggaaacggatttacacagaaagacaaaaaagcaattttaatcggtggcggaatcggaattcctccgatgttagaattaatgaagcagttagattgcgacaaaacagcagttttaggataccgtgacagtgatatgttcttaaaagacgaatttgaggcagttggagatgttgtgatctctacagaagacggatcttttggaacgaagggaaatgtcattgatgcgatcaaagagcagggcgtggaaggaagcatcatctatgcatgtggtccaacaccaatgcttcgaggaatcaaagcatatgcagaagagatggggatcgaagcacagatttccatggaagagagaatggcatgtggaatcggtgcatgcttagcctgtgtttgcaagtcaaaagacgtggattcccattcacatgttcataacaaacgtgtttgcaaagatggaccagtattcgacgccagggaggtggaactataatgaatttatcagttgatattgccggagtaacaatgaagaaccctgtgacaacaggatcaggaacatttggttccggagaagaattcagtgaatttgttgacctttccaaattaggagcagtgacaaccaaaggagttgctaatgttccatggccggggaattctgtgcctagagttgcagaggtatatggtggtatgttaaatgcgatcggattgcagaatcctgggatcgatgtgtttgttgaacgagatattccatatcttaagaaagccggagcaacgatcattgttaatgtttgtggaaaatccgaaaaggattatctcgaggttgtagaaagacttgctgaccagccagtagatttattagagatcaatgtatcttgtccgaatgtgaaagaaggcgggattgcttttggacaggatcccaaagcgttatatgatattacgaaggcagtgaaagcaaaagcaaaacagccgatcatcatgaagttaagcccgaatgtcacagatatcacagagatggcaaaagctgcagttgatgcaggaagtgatgctctttctttgattaatacattaacaggaatgaagatcgatattgaaagaagagattttgtgcttgccaataagacaggtgggatgtccggaccagcgatcaaaccagttgctgtccgtatggtatatcaggttgctaacgctgtggatgtgccaattatcggtatgggtggaatctcaacagctgaggatgcattagagtttatcatggctggtgcaacagcggtatcagtaggaacagcaaactttatcaatcctgcaacgacacttgaagtggttgatggaatcaaaacttacatggaaagacatcagatcaatgatattaacgaattgatcggatgtgtcaaatagataataaaaggaggatgagggtatgaatattttatttttcctgactccgaaaagtgaggttgcctatatccctgccgatgaaagtttaaggcaggcatttgaaaaactaaaatatcatggatattcagcagtgccgacattaactgatgatggtaaatacgcaggaacgatcacagaaggtgatgtattgcgtgccatggaatctatgtgccattggaatatatcagaagctgagaaagtcaaacttatggatgtaaagagaaagagaaacattcaggcagtgacgatcagcacagatatggatgatcttgtcgatgtgatcacagatcagaattttgttccggtcattgatgatcaggagaaatttatcgggatcgtgacaagaaaagatgtgattcgtttttatcatgacgaataccgcaaattagcaaagaatgaataagatggaggtttaaatagaagatggaacagtataagagagagtttatcgaatttatggtagaaagtgatgtattaaaatttggagaatttacattaaagagtggaagaaaatctccatttttcatgaatgcaggagcttatgtgacaggatctcagttaaagagacttggagaatattatgcaaaagcaatccatagtacttatggagatgattttgatgtgttattcggacctgcatacaaaggaattccattaggagttgtaacagcgatcgcatacagcgaattatatggaaaagaagttcgttattgttctgaccgtaaggaagcaaaagatcatggtgcagataaaggaaacttccttggaagcgaattaaaagacggtgaccgcgtgatcatgatcgaagatgttacaacatctggtaaatccatggaagagacagttccaaaagtaaaaggagcagcaaacgtagagatcgttggattaatggtatccttaaaccgtatggaaatcggtaaaggcggagaaaaatgtgcactggatgaagtgaaagaattatatggatttgatacagcagcgatcgttgatatggaagaagttgtagaatgtttatataacaaagaatgtaatggaaaagttgtgattgatgatacattaaaagcagcaattgatgcatactatgaacagtatggtgcaaaacattaaggatggttcttgtgacggttgagaaaaagaagttagccagacgaggaataaaagttatattttatctttatatcataggtatattttattttgtattattgagtgaacgatatgggagggatacaggatatgatacctcccatgtgaacttagttttattcaaagaaatcaacaggttctggacgtacagacatcttttgtccaccgaagcagtggtcacaaatctgtttggaaatatttttgcattcagtccatttggttttatgatcccgatcgtgatcaataagaaaaaggcattttttcgtgcagtgtttgcaacttccttttttagtttagtgatcgagacaagtcaattgatcatgaaagtaggggtatttgatgtagatgatcttctgatgaatacggttggtggattgatcgggtatatgatatacagggttgtagtagcagtatatgatttatataacagaaagaggacggcaaaatgaagagaaacaaaagaaaaacatttgcatatcgtccatctgacaagattatttcacgggaatcaattgtttctgtgattttaggagcagcagggatcattggatattacctgctgcttttcggttccataaagacaggaggaacaagcagtccattaagtggagctggaggatggatcttgctggtagtatcagctataggattatattttggaatacaaagtatgaaagataccgcagcagtgatgaaatggaagatcattggatgtacttgcaacggaattgtgctggcagtatctgtgatcatttttgtgattggaataattgcaatgatctaagtaaagaaaggaagagatgacttgaatacaatgttatcagaaagacatgaattaaataagatcgcactgttagaattaaaaaaagatgtagaagaaacaagagaattttcttcatatttttctaaaatggcagaccttttattatatgtaaatgagatttacgataccaaagagaggacattagaacagttaaaacagtggaatagaatatggtatgaagagatcagccaggaacaatatgcacatagttttgggaatccagaattttgtacagaaaagtttggaaaagagtatggtcagatcttcgcatttttatatgcagagatgcgcagtggatttatctatgcgatcgaaggaagactgtttgaccttgtgatcaacaatgaattgttcttggaaatcagcaatttatttttatcaggagaagaacatccgcagaagatcaagcatattgtttttgatcatatgagagattacagcgaggatgtttttgagtacagaatcagagaacagttagacccagaacttgattttgcaacaaagatcgtgatggaatctgatctcagtgatccagatattttgtatcaatatggagaatatatttccgaaaatgaaattgatactttaaagtttttaaataaattgccacaagaagagatcacagcaatggccaaaacatatgttgatggatttcatgaaggatttatcatcaataacattgatatgagtccaaaacgaagtgttaatatccgttatacgatcggatttgaaccagttgtcagagaggcagttcgtttattctcagaaattgggcttgcaccgatcatctatagaagtggcgtatctgttttaacacgaggacttcataagattggttatgtttcatcttctccaaacccacagtatgaatatgaccacagatatgatcaggcgatattctttgataatcgttttatgaaacacaaattagaatgttatcataatgcatatgaacattataaagatgaagcgtatgtgtttgctggaccagcttgcatggaaacatttggggaaataccttttttaccagagaataaagaagagaatttaaaattaagcaagaagcagcaggagctttctgtggaatttcagatgaaagcctcagagatcatgaatcaatatatcaaaccagagcagaggagctttacgatcatttcatatccaattcctgagattggggataactttgaagagatttttaaagaagtcgtgaaagttaatacattggataaagacaaatacagacagattcagcagcatttgatcgatgccctgaatcaggcagtggaagttcatatcaaaggaaaaggaaagaataagaccgacctatacgtagcgatgcatgagatggatgacccatccaaagaaacgaattttgaaaactgccttgcagatgtcaatattccagttggagaagtgtttacctcaccaaaattaacagggaccaatggagtactgcatgttggagaagtctatttaaatgatctgaaattcattgatcttgaaattacttttaaagatggaatgatttctgaatatacatgcaaaaactttaaaacagaggaagaaaataaggcatttatcaaagagaatctcttatataacagagatacgctcccaatgggcgagtttgcaatcggaacaaacacaacagcatatgtgatggcaaagacatatgatatcttatatcagcttccgatcctgattgttgagaagatgggacctcattttgcagtgggagatacttgctacagtcattgtgaagaaactgaagttcacaatccagatggcaaagaaatcgttgcaaaatataatgaatgctccaaagaaggcgagtatttccagtgtcacacagatattacgattccatatgaagaactggattctatttgtgcgatcacccttggcggagatgagattttactgatcaaagatggtaaatttgtactttctggtacagaaacattaaatgaaccattgacggaaatcggttaaatcagtacaatgataagaaagataaaatcctgaaagggaagtttttgttaatttcataagataaggagaaagaacatggcaaaagtagcaattgtaatgggcagcgattctgatatgcctatcatgaaaaaagcagcagagtttttagatcagatggggatcgattttgagatgacgatcatttccgcacacagagaaccagatattttctttgagtgggcaaaaggtgcgaaggaccgtggagtgaaagtgatcattgcaggtgctggaaaggcagcacatcttccaggtatgtgtgcagctttattcccaatgccagttatcggtattccgatgaagacttccgacctcggtggtgttgattctttatattctatcgtacagatgccatctggaataccagtagcgactgtagcgattaatggaggacttaatgcaggaatccttgcagcgaagatccttgcaacatcagacgagaaattacttgagaaattagaagcttacagcgaagagatgaaacagtcagttgtagagaaagcagagaaacttgacaaagttggatacaaagattatgaataagaagattcttgcagcgtttttatgcgtatgtatggttgtagttacaggaagttttccagtaagtgcagcaaaaacaaagaagacatacaagattgcaattgatgcaggacaccagggaaagggaaacagtaagacagaacctatcggaccgggcgcgaagatgcgtaaaccaaaagtagcatacggaacgcagggagtcaaaacgaaagtaccagaatccaaattaactctgcagattgcattaaagcttgagaaagagttaaagaaacgcggttatgatgtgtatatgataagaagaaaacagaatgtaaacattagcaataagcaaagagcgatccgtgcaaataaaagtggtgctgatatctgtatcagactacatgcggatgcagcatcagcgaatgttcgtggtgtttctgtgctatacccatcacagcagaatccttatgtagcaaaattaagcaagaagagtaaaaaactctcaaagaatatactggacagttattgtaagtcaaccaaattcaagaaacgtggtttatcaaaacgtgacgatcttacaggaacaaactggagtaagattccagtggcactgatagagatgggatttatgacaaataagaccgaagataaacagatgcagaagaagcagacacagaagaagatggtagacggcattgcaaatggtattgatcaatattttaaataatcaggaggagaagtaacaatggattacaagaaagcaggcgtggatattgaagcaggatacaaatctgtagaactgatgaaagaacacgtaaagagaaccatgagagaagaggtacttggtggattaggaggattttccggagcattttctttaaagaagatcaaagatatggatgatccagtcttactttcaggaactgatggatgtggaacaaaagtaaaacttgcaatgatccttgataaacatgatacgatcggtatcgatgcagttgctatgtgtgtaaatgatattgcatgtgcaggaggagaacctctgttcttcttagactatattgcctgcggtaaaaactatcctgaaaagatcgctgagatcgtaagcggtgtagcagaaggatgtgtacagtcagatgcagccttgatcggtggagagacagcagaacatccaggacttatgccagaagaagactatgaccttgcaggatttgcagttggtgtatgtgacagaaaagacctgatcacaggagaaaacttaaaagatggagatgtcttgatcggtatggcatctacaggagttcacagcaacggattctctttagtaagaaaagtatttgatatgagtaaagaatctttaaatacatattatgatgaattaggaaaaacattaggagaagcattacttgctccgacaagaatctacgtaaaagcattaaagagtgtgaaagatgcaggagttacagttaaagcatgcagtcatatcacaggtggtggattctatgagaatatcccacgtatgcttccagaaggaatgaaagcagttgtgaagaaagacagctatgaagtaccagcaatctttaaacttcttgccaaagaaggagatatcgcagaagagatgatgtacaacacattcaatatgggacttggaatggttgttgcggttgataaagaagatgttgacaaaacaatggaagcgatcaaagcagcaggagatacaccatatatcgtagggcatatggaagctggagaaaaaggagttactttatgctaaaggtggcagtacttgtttccggaggaggaacaaaccttcaggccattatcgatggaatcgagaatggaagcatcacaaatgcgaagattgatgttgtgatcagcaataataagaatgcatatgcacttgagcgtgcgaagaaacataatatcgaagcagttgcactttctcccaaagattttgagacaagagatttatttaacgaagcattgtataacgagcttgtagaccgtaagattgatctgatcgttcttgcgggatgcttggttgtgattccggagaagatcattcatgaatttgaaaacaggatcatcaatattcatccatcattgatcccatcattttgcggaacaggctattatggattgaaggttcatgagaaagccttggcaaggggagttaaagtttctggagcaaccgttcattttgtcgatgaaggaacggatacaggtccgatcattgcccagaaggcagtagagatcaaacagggagatactccagaagttcttcagcgaagaatcatggagcaggcagaatgggttattatgccgaaagccattgatgacattgctaatggaaggatcaaagtcgaagaaggaaaagtcatttatctataaatcattcagatcacgaaagaaaggaaatgaaagatgaaagttttaatcgtaggaagcggtggaagagaacacgcgatcgcatggtctgtcgctaaaagcccaaaagtagacaagatttattgtgcaccaggaaatgcaggaattgctgaatttgcggaatgtgtaaatatcaaagcaatggaattcgataaactggttgcatttgcgaaagaaaatgcaattgatcttacgatcattggaatggatgatccattagttggtggtgttgtcgatgcatttgaatcagaaggactgcgtgtttttggaccaagaaagaatgcagcgatcatcgaaggttccaaagcattttctaaagatctgatgaagaaatataagattccaacagctgcatatgagaattttacagatccagatgaagctatcaaatatttagaaacagctaagatgccaatcgtattaaaagcggatggattagcacttggaaaaggtgtattgatctgtaacacattagaagaagctaaagaaggtgttaagacattaatgcttgacaaacagtttggcgatgctggtaatgaaatcgttattgaagagtttatgacaggaagagaagtatctgttctggcattctgtgatggaaaaacgatcaaatgtatgacatccgcacaggaccataaacgtgctaaagatggagatcagggacttaacacaggaggaatgggaacattctctccaagtccattctacaatgatgaagtagaagcattctgtgaaaaatatgtctatcagtcaacgatcgatgcgatggcttctgagggaagaccatttacaggaatcttatttacaggattgatgatcacagaagacggaccaaaagtcttagaatacaatgcacgttttggagatccagaagcacaggttgttcttccaagaatgaagaatgatatcatcgacgtgatggaagcctgcattgatggaaaattatctgatgtagaattggaattcgaagataatgcagcagtatgcgttgttttagcatctgacggatatccagagaaatacgataaaggattcgaaatcaaaggattagatacattcaaagacaaagatggatattatgtattccacgctggaacaaagtttgatggtgataagatcgtgacaaatggaggacgtgtcttaggtgttgtagcaaaaggagaaaatctaaaggctgcaagagcaaatgcttacaaagcaacagaatggattgattttgcaaacaaatataagagaaatgacatcggaaaagcaattgatgaagcataatctttaaaggatgatcatataaaaaggatggctgagaaatcagccatcctttttgtagtagtacacatatatgaaattacattgtgataattccaaaagcatttgcaactgagctgatcaaaatgatcgctgcaaaaagcgggcacagatatttgatcataaaacagaaaatcttcttgcggcgaaatgcctgtccgtcttttgtgatctcttcttctattttatcaactccaacaacttttgacaccagaaggcaggttgcgatcgcggcaatcggcatcatcacagagtttgttatgaaatcgaagaaatcaagaaattgcattccaagaatcttaaaattcgcaagaggtccatacccaaggcaggaaagcgttccaagcagtaacataaccattcccatgaacacagttgattttttacggctccagtgtagttcatcttcgaacgtcgaaacagcactttctgtcagtgcgatcgaacttgtcacagctgcaaacagtactaataagaaaaatacaataccgatcgcagttccaaatcccatgtttgcaaaaactttcgggattgtgataaacattaaggcaggtccagactttaatgtttcggcattaccgccagagaaagcaaaaacagcaggaatgatcataagtccagccatgatcgcgatcgcagtatcaaaaatctcaacattctctgtagatttttcaatggaagtatctttcttcatataagaaccaaatgtgatcaatattcccattgcaatggataaagaataaaacatctgtcccattgcagatacaacggtcatccatgaaaaatgatcaaagtttggcacaagaaagtattttaccccttcaatagcacctggtctggttacagaatacacagcgatgatcagtgataaaacgatcaggatcggcatcataaatcttgatacacgctcaattccatttcgtacaccggcgtaaatgataccaagtgtaaataatgtaaaaatgataaaacagatttctgtagaccacccattggaaataaatgtcgtaaaataagcatcgccagctaaagttttactatgtccggcaaaatattcgatcaggtatttgatcacccatccaccgatcacagaataataaggaacgatgaggatcggaatgattgcattgatccaaccaccaatagatataaaatgtgagtttccaaagctttcaaatgctccaacagggctttttcttgtcatgcgtccaagagaagtctccgccatgatcaaggtgtaaccgaaggtcagtgcaagtatgatataaacaagtaaaaagattccaccgccatatttagcagcgagatatggaaatctccagatgtttccaagccctacggaagcaccagcagctgataatacaaagccaagctttccagagaaagtgcttcttttgtgtttcttcattataagttgtctcctttaactaatgtttccatacgcattgagcgtatctgaatcagtttaacacagcagcaggaaaaaagcaaagaaactgataaaaatattgtatggaaaatattacatatgtatgccatagaaagacaagtgtttttgtatagtgtgctgaaagtgactgattattaaaaaaaatacttgcaaatatcagaatcatcatataaagtaaatattgcggataagaaaaataaacataggcatttctttctgatgaacaaaaagaaatgaactctggagagtctcataagtgagcgccgaaggtgtacagtttctattaggaaactaatctctcaggcaaaaggacagagctttataagcaatgtattcgatactctttagagctgatttaatcagctcttttttgtatactcagatatgcaaaaatcaagctgttcaaggttacattcgcaaagatctatttttggaggaatgaaaaatgttaaacacgctaaacgatgtactaaacaacgtcgacaattttatttgggggatgcccctcatcatcttgatcctttttacaggaatcttattgacagtcaggcttcgaggactacagatcagacatcttggaaaggcactacattatgtatttcataatgaagatgatggagaaggagaagttacaagttttggtgcattatgtacggcactttcagcaacgatcggaactggtaatatcgtaggatgtgcgacagcaatcgttgcaggtggaccaggagcattattctggatgtggcttgcagccttttttggaatggcaacaaaatatgctgaaggaatgttagcggttaagtatagagtgatcgcagaagatggtcacgcacttggcggaccattctattacattgaaaaaggaatgggtaagaattttaaatggcttgcaaaattattctgtgtatttggaacaatggtaggtttgtttggaatcggaacatttacacaggtaaatggaatcacatcagcagttaataacttttttgacccatccaatgtacatacgatcagcttatttggaatgaattattctattagcgttgttgtagcaggaattatcgtaacaatctgtgcaggacttgttatcattggaggaatcaagagaatctctaaggtatcagaggttatcgtgccatttatggcagtgacatatattggtgtctgtctgatcattgtattcacacatttaccacaggtaccagcagcatttgctgagatcgtacagtcagcatttggactaaaagcagttgcaggtggagcaatcggagctatgacagttgcaatgcagaaaggtattgcaagaggaatcttctctaacgaagcaggacttggatcagcaccgatcgcagcggcagcagctcagacaaatgaaccagtacgtcagggacttgtatctatgacaggaacatttattgatacgatcatcgtatgtacaatgacaggacttgcaatcgttatgacaggtgcatgggatatgggacttgaaggagttgcagtcacaacaaaggcatttgcattaggacttccattccctgcaaaagcatcagcatttgtattaatgatgtgtctggtattctttgcatttacaacaattcttggatgggcatattatagtgaaagatgtctggaatacctggtaaatggaaagaaattcgttatcacagcgttcaaatggttttatattttagcagtatttattggaccatttatgacagttagtgctgtatggactattgcggatatctgtaatggattaatggcattcccgaaccttgtagcactgcttgcgttgaacggagatgttgtatctgagacaagaggatatcttgaaagagttggtattgtgaaaacaacagtaggagaagcataaagaaaatattgctttactttaacactctgatatagtatagtggaactataagatcagaaagggagtaaatgctaatgagcaagaaaatcaagacagaagcggcaaaaagattatttcaggcagtactgacattagagacagaagaagaatgttttacattttttgaagatctttgtacagtaaatgaattagaatcgttagctcagagatttgaggtggcttcgatgttatatgataagcatacatacttagaagttgcagataagacaggtgcttccacggcaaccatcagccgagtgaatcgttcattgaattatggaagtgatggctatgatatggtatttaaacgaatgaagaaataggcagatgcctatttcttctttttcttttctgctttattgtttgactctggttgatagagttcatcgatcattttctcaatcacctgtttccttagatagatatcatatccaagaagtgtaataaaagcaaattgctgcagctgttctttcttcttcgactcctttaattcagcaaaagtagcctcagatttatgaaatacatctgcgatcgaatctcggatcgccgtattatgatcatgctccagcttgaaaatctcattataaatcgtataaaaagaattctttgagtcctgatcatcaaaatgttcatttaaaggatctaacagattcttaatatctgaaattgataaaaaattcttcagataataaatataaattaaaagaatcatgtgattcctggaatatttcttcttattagaaggtggaagaagatggtttttggtatagttgttgatcatggtttttgtaaatatcttatcttcttcgaaacgcttcgtattctttagctgttcttctaaaaaagtagtgacctgatccatatacaattcgatgtttggaaggtcttctggaagcacataatcgagtttcatccattcttcgagttgtttttcaaattccataatgatttctccttatcttatgactatattatacggttattcaaaccatatgacaagagaaaaaacatcaggtgcaacggactggactcgcttcgctcgataaggtataatagcagttaagctttgagaaaggaatttatctatgggaatttatgatacattaaatgaacagcagcaggaagccgttttttgtacggagggaccgcttttgcttcttgctggtgcagggtctggaaagactcgtgtgttgacgcacaggattgcttatctgatggatcagggtgtgaatccttatcatattatggcgatcacatttacaaataaagcagcgaaggaaatgagagagagggtcgatgatctggtcggatttggagcagagcatatctgggtcagtactttccattcaacttgtgtgagaatcttaagaaggcatattgataagcttggttatggaaacagtttcacgatctatgatgcagatgatcagaaatccctgatcaaacagatctgcaagcagtataagattgatacaaagatgatgccagagagaaggatcatcaatgagatttcttctgccaaagatgaatttatgacaccttccgagtacgaaacaagacatcagtatgattttaagaagaaaaagatcgcacagatctataaagaatatcagaagcagttaaagacaaataatgcactggattttgatgatctgatctttaagaccgtggaattatttcagttccatccagaagtgcttgattattatcaggagagatttcgttatatcatggttgacgagtatcaggatacaaatacgatccagttccagttagtcagtatgcttgcaagaaaatatcagaatctctgcgttgtaggtgatgatgaccagtctatttacaaattcagaggtgcgaatgtaaagaacatcttaaactttgaaaatgtatttccagaagcagttacgatcaaactcgagcagaattatcgttccacgaagaatatcttaaatgcagcgaatgaggtgatcaaacacaataagggaagaaaaacgaagaaactttggactgagaacgaagaaggagatctgatcgaattccatcagtatggaacagaatatgaagaagcaagaaagatcattcatgagattgaagatctatccaaagaaggctatgattataaaaatatggcaatcctttatcgtactaatgcgcagtctcgtgtatttgaagaaagttttatgatcaaaaatattccataccgtattgtgggaggcacaaacttctatcagagaaaagaagtgaaagatattttgagttacttaaaagttgttgataatgggctggatgatctggcagtgcgaaggatcatcaatgttccaagacgagggatcggtgcagcaacaatcgagaagatcaatgtgtatgcagttgagcataatattagttttttagatgcatgcttttctgcggatagcattgatacattgggaaatgcaaagaaaaagatcaatggatttgctgatctgatccgtgaattcagacgcaagatgcaggaaggatcgctggaagaattatttaagtatattacagatgaaacaggatatattgcgaatctgaaagctgaagaaacggaagaagctgaaggaagaattgaaaatatcaatgagcttttaaataaagttgtaacatatgaacaggaagcagaagaagcgagtctgtcagaattattagaagaaatcgcattggttgcagatattgataatctagaagattcagataacagggttgtattaatgacactgcatagtgcaaaaggtctggaatttccatacgtatttatttgtggtatggaagatggaatcttcccaagttatatgacggtgatgtctgaagatgatgacgatatggaagaagaaagacgtctttgctatgtaggaatcacaagagcaaagaaaaagctttatttaagtgcggcaaaacgaagaatgatgcaaggaagaactcagtttaataaagtttcacggtttatcgatgagattccggaacagctattacagttagacacaggggtcaacttcaaagaaaaacgtccagataaagcattgttttcatcaaatcgcagtaatcgatttagaaaaccatatcaagcaaaatcatttacttcaacgaaaatggatactttaccatatgatgttggagatatggtgaaacatataaaatttggaaaaggaaaagtgcttgaaattgtctctggaggccgtgattacgaggtaacagtagactttgagaaagcaggagtgaaaaaaatgttcgcatcctttgcaaaactaaaaaaagtcgaataaaatgaacgaaaaagttagtaaaatatagttagaagtgatataataaagaaaacgcataagaaaggaatgagcggcatggaaaaattaagtgatcttttagaaatggcaaaagtttcagacatcattgcaacaaaaaaagaaaaagaagataacaaaatcgtttgggcgttagcgatcatcggagcgatcgcagcagttgcaggaatcgcatttgcggtatataaatatctgacaccagattatatggatgattttgatgaagactttgatgatgattttgacgatgatttcttcgatgaagaagatgatacggatgtgaaagaagaagacatcgaggaagtggaataagaaagcttcatataggaaactgaaacgaagaaagaacacctgtttttggtgttctttttttgatacaattagtggctttttcctatgattttgttagaaggtctaagaaaaataaaaaaggataatgaaaaaatataagatcagaaaccgcataaacaggggatttgcgacaaagtgttcaagaaaaataaaaaaagttgaaaaaagttgttgacatttaaaggacgattctatataataaatcttgctgttgaggaaatagagaaacagcaaagcacttacggggtgtggctcagcttggctagagcgcttgatttgggatcaagaggtcgcaggttcgaatcctgtcaccccgactataagcgggtgtagttcaatggtagaactccagccttccaagctgatcacgtgggttcgattcccatcacccgctttcatgagtctgtagctcagttggatagagcaacggccttctaagccgtgggtcgggggttcgaatcccttcag

SEQ ID NO: 809 - DNA, 59433 bp, Unknown
  gut microbiota DNA sequence
attattttgcctaatagatatgtggtgaagtaatttaattatataagggtgtgtagctcaggtggtagagcacttgacttttaatcaagttgtccggggttcgaatccccgcacgctcactatgcggatgtggcggaattggcagacgcgctagatttaggttctagtgtctacgacgtgcaggttcaactcctgtcatccgcagttcttttaaggattgacaagcataacaagatatgataaaatatttttgttatgagttacaaaatcatataacacttacggggtgtggctcagcttggctagagcgcttgatttgggatcaagaggtcgcaggttcgaatcctgtcaccccgactataagcgggtgtagttcaatggtagaactccagccttccaagctgatcacgtgggttcgattcccatcacccgctttttaattttataggtaacctataaaatttgagtctgtagctcagttggatagagcaacggccttctaagccgtgggtcgggggttcgaatcccttcaggctcgtttttctatatctgtatatattatatagaagtaacacatatggtgggtatagcgcagctggttagcgcgccagattgtggctctggaggccgtgggttcgaatcccattacccaccctgatcattaaattttaatgatgatgggctatcgccaagtggtaaggcacagcactttgactgctgcattcgctggttcgagtccagctagcccagttcttgataattatataagggtgtgtagctcaggtggtagagcacttgacttttaatcaagttgtccggggttcgaatccccgcacgctcattgttgtaagagatatgattttagagagatttaggatcatgtctcttttttgatgtatggaaatatgctatcattaaattaacaaagcaaagaagaaatattatgtacgcattcgtacctataagaaagttggattcaaaaatgtctattcaaaatggctgaatgtaaaatcggcaaaaacaaagtaagaaccagtactaaaaacacaaaaatggctgtatctgcgggaattaagtagacacagctatttttgtataaaaatacttgacaggaataccaatacttgatatactattcaagcagtcgacaagaaaacaaatgcttgttgttttgcaatatgcggatgtggcggaattggcagacgcgctagatttaggttctagtgtctacgacgtgcaggttcaactcctgtcatccgcagtatttttttgtctaacaaagaaaaataaaataaaatgaaaaaagttcttgacaatcataacagaacgtagtaacatatatcttgttgtgaacgacaaaaacacataacacttacggggtgtggctcagcttggctagagcgcttgatttgggatcaagaggtcgcaggttcgaatcctgtcaccccgactataagcgggtgtagttcaatggtagaactccagccttccaagctgatcacgtgggttcgattcccatcacccgctttttaattttataggtaacctataaaatttgagtctgtagctcagttggatagagcaacggccttctaagccgtgggtcgggggttcgaatcccttcaggctcgtttttctatgtttaaacatattttgatagatagaagcaatacattacggtgggtatagcgcagttggttagcgcgccagattgtggctctggaggccgtgggttcgaatcccattacccaccctgttattttgcttattttagctaaaagacaataatatatgggtgtgtagctcaggtggtagagcacttgacttttaatcaagttgtccggggttcgaatccccgcacgctcactattagataagaagagacagagttttagatcatttagaactctgtctttttttattttcataggaaatttcgatgaaatcccctatgatataaaaagacatcaatggaaataaaaacaaaatttgccaaaaaagtaaaaaacatattgaatatacaaaaagaaacgaatatactaaacatatcacataggatcaattgaagggaggaaacacgtatgaaaaaattactcacaaggctgttcattgcaatgctgatattgacatttactccaacaatgaacactcaggcaaaggcaaagatcaaattgaacaaaacaaagatttctttacaaagagggaaaacttacaccctgaaagtaaaaggaacaaagaaaaaagtgaagtggtcaagcaacaagaaaacgatcgcaactgtaacaagaaaaggaaaagttacagccaaaaagcaaggaacagcagtgatcacagccaagatcggaaagaagaaatacaaatgtaaagtaaaagtatggcagaaaacaacaaagaaaccgacaaagactaatacagagccgaatccgatagggacaagagtcaatccggctgatccaagaacaggaatcacattagatacaacaggaggaaccgtttacttcaaactgacagaaactttaaagggacaagaagcagaaaaccgattattacagatgaatcaatcattagaagaaatcaaacaaggagaatatgaacatacaggaacaaccttagtactgtttgtttatgatgtgcaggccgtgaatgggtttgcagcttatccattaaatggtctggatatcatcaattcttatacactatatgatggaacatgctcgaaaaatataaagaatatagaaagtttctatttatcagaaggttatgaagcaatgataccaacaaatctgaacttatatacaggagcaagcagtaaaatgtacgaagccctttggataccaaatgaaatgacctcatttagtaaccagatatatacaaaaaatcttacaccatattgggtgagatatcagttttaaaagaaagctgcatcattcatatataaacaatctgttatagccaaaaactatatcaaactaaaagaaatacatattttacaaaatcctaatatactgttatactaaacacaatcagttgaaacaatacaatataaataacaaaaaaatagaaagagtatgaggtgaaaagtatgagaaaaggaacattgaaaaaagcattagcattagcactgacaggagcagttttagtcggagcattcgcaggatgcggagcaaagaaagatagcggtgataaaaaagaaacaaagaagatcgttattggagcaagtccatctccacatgctgatatcttaaaagtagcgaagaaagaattaaagaaagaaggatacgaattagaaattaaagaatactctgattacgtacagccaaatacagcactcgaatctggagatttagatgcaaactatttccagcacaaaccatatttagatgacttcaacaaacaaaagaagacacatttagtatccgctggaacaatccattatgaaccatttggaatcttcccaggaaagacaaagacattaaaagcattaaagaacggtgcaacagttgcagttcctaacgatacaacaaatgaagcaagagcgttattattgttacaggatcagggacttatcaaattaaaagacggagcaggattaacagcaacaaagaaagatatcgtagagaacaaaaaagatttagcaatcaaagaaatcgaagcggctcagattccaagatcattaaaagatgttgatatcgcagttgtgaatggaaactatgctttagaagcaggattaaaagtcaacaaagatgcattagcaacagaagatgctgattctatcggagctaaaacatatggaaatgttgtagcagtgaaaaagggaaatgaaaaaacagatgcaacaaaagcactgatcaaagctctaaagagtgatacagtgaaaaaatatatcaatgacaaatatgatggagctgttgtacctctgttctaagagcagaagattgctataaaccataaataatttatggaagtaacaagaaattattgaaaaaatcaactgaaattgttatgattaagctattgtctgtcaggaaaactgataggcgatagcttatctgattttacaggataagaagaaagtctgatgaagtgatcaaaggacaatgaaaaataagaaaggataaagtcatgattgaattaaaaaatatagatgttaccttccaaaatggcagtcatgaattcaaagcagttgataatgtaagcttaaagatcaacaaaggagagatttttggaatcgtaggaccaagtggtgctggaaagagtactctggtacgtgtgatcaatttgttacagagaccaacgaatggagaagtgatcattgaaggatcagatattacgaagtttaaccgaaagcaattaagaaaaacaagattgaatattggaatgatcttccagcattttaatctgatcagtggatcaacgatcgctgaaaatgttgcattttcattgtatgccaataactatccaaaggataagatcaaagacagagtgaaagaactcttagagatcgtacatcttccagaaaaagcagatgcatatccagcaaacttaagtggaggacagaaacaaagagttgcgattgcaagagcattggcgaacaatccagatatcttgttatgcgatgaagcaacctccgcattggatattgagaatacagaagaaattgtggaattattacgagagatcaatgaaaaaacacatattacgatcgtatttatcacacatgagatggatgtagcaaagaaattatttgatcgtattgcatttatggaagatggaaagctgaaagaagttacagatatctattctgcctttgcaaatcctaaatcagatattgcaaagagtctggtacaacgcgtattaaatgtagaggttccagagggattaaaagcaaaaacaaatgaagagatccttcgtttaagttatacaggagatgattcttatgatcctgtgatcagtgttgcttctaagaactatgatattacaatggatatcatcaatgggaaagtcgattacatcaggaataaaccatttggtatgttgatcgtaatccttagaggagaagatgcagaacgtaagaaagcattagaatacattagtaagaatgtatataaattagagaggttaggaggaagataatatgaatgaaacattagagatcatccagtcagaatttgcccaggcatcttttgagacctttgagatggtattgatttccatgatcgcagcagcaatccttggaacgatcttaggactagtattacatctggcatcgaatccgattttttataaaaacagggtagttaatggcattacaggaacgatcatcaatgtgatcaggtctttgccatttatcattttgatcattgtattacagccgttggcaagactggttgtaggaacaagtatcggaccaatcgcagcatctgtatctttggcaatcgcagcaatcgcattctatgcaagacttgtggaaggtgcatttagtgaggttgataagggtgtgattgaagcagcggttgcaacaggagcaagtatgcctcttattattcgtaaggttttatttgtagaagcaacaccagcactggttcgtgctttaactgtaacttttgttagtgtgattggatattcagcaatggctggagctgttggaggcggtggaattggtaatcttgcgatcatgtatggatataaccgctatcagacaggagtattattagtaacagttgttgcacttgtcatcattgttcaggttggacaatggatcggagataagatcgcactgaagcttacaagaaaataagatcagccaaaatataaaacaaaaataagaatttttcatatcaaaataaatattttcttttcttctggacagaatataagtatcaagatgttaaagagaaaaggagatacaagatgaaaaagacgttaaaacttacgagtcttttgtttacactgatccttgcagtatccgttgtatttactggatgtggcaacggcagaaaggattctacgacaaaaggaacaacagaaaataataatgcatcagctacaacggaagataatctggtagacgatgttgaggatgccgttgatgatgtggcagatggagttggagatgcggtagatgatatcgcaaatggttttgataactatgacgatgcacatgattatttattaaaccgtctgcaaaatgacgataaagatggtaagtatgaagttcgaaatgagacaaaagacgaacaggaatacagggatggagccagtggatatcattttgaaatctatgatacatccgatgattctgggaagaaatacggagatttctatgtagataaagatacaggaaagatctacaaacgaaatacaaaaacagagaaattagaagaatataagaaataaaaagaaggcacaggggtgttaatcctgtgccttctttaatgcatttttgatcgcttgttttaataatgtatacgtatactggctttgcccgtcaaatttgatatcatcaatattttgaacttttggaagttgtttattgatctcatttagagaaggttcgatcagaggatacattgttttgatcgatttatttaaatgttttaaagaaaccgatcttgctttgccgtcctttaccgtgaccgaaagttctaattcgttttctccaagttttaatggagaagaatagacaccttgtgtgtaaccggaagtttcttttgttttctttgatttatgggaaggaacaaacataaagattaaaagtaagatcaaaagtattccaagtaagataaagattccggtgtaaataagttcccgtgcttttaatacgacaattttcgtttttgatgacatagttatcctcctaaaagattctatctatagtttatgaatggaatgagatatttagaacatctttacggaaaataaaggataagatataatgatagaaaatggaggaaatgatatggcattacagtttatactagggtctgcgagatccggaaaaacagattttatttatgatcagatgatcaaagactccatggaacacgaagatgaggagttcttttttattgtgccggaccagtcaacgctaaatgcacaaaaacaactggtcacaagacatccacgtcatggaacgtttaacattgatgtggtgggatttttcagattaacttatcgtgtattcgaagaattatcatatattccgaaagaccttttggaagatgaaggaaaatctatggtgatccgaaagattatggagcagcataaagaagaattaaaagtatttgcgtccagcatgaaaaaacagggatttattgatgaattaaaatctttttttgcagaggtctatcagtatgacgtgtccatggaagatttaaagaagattacagatgggatgaaagaagaaggattacgctcaaagatggaagatattcttcttgtgatggagaattttgaagattatatcaaggaacggtacttgatctctgaacaattgttagatgttctggcacagaaagtggaacgatcagagaaattaaagaatgcaacattttatcttgatggatttacaggatttacaccgatccagagaaaagttctggaaaagttattaaagatcgggaaaaatgtatatgttggattgactttagatggacgttatgtgagaagtcagtaccatgaatacgaactattcgccatgtcaaagaaagaaaaatatgaactgatcaaacttgcgcaggatgcaggaactccggtgatgccagatatcatctgttggccggatgagagagattctaaggaattacgccatctggagcagaatatcgagcgttatccatatgagatatacaaggatgaaccagaagatattaaaatccgttgttttatgaatccaaggcaggaaagtagaacagtggcaaatgagattgaacgatttgtgagggaagaaggatatcgatataaagatattgttgtattaacagcggatcttgacagctatcaaaatgaattggaaaaaagttttaatgatctgcatattccatatttcgtagatgtgaatcgaaaactgttaaataatccatgtatagaaacactcctttctgttctgaagatgatccagaaagatttttcatatgatatggtatttcgttatttaaaatcaggtttctcgaattttacaatggaagaagcagattttctggaaaattatgtgctggcttgtggaattcgtggatttgccagatggaaccgcccatttgcatctaagttattttctgatgaagatgttggaagagcggaagccttaaggattcgttttattgaggaagttggaacattaaaaactggattaaagcgaagaggcagtacggtcaagagaaagcttatctatctatatgaatttctggaaacattagatgttgaaggaaagatggtaaagaaacaggagatgtttgaggcgtcaggagatctcattgcggcagcaacctatgcaaaggtttatgaacaggtcattgacctgttagaacagatggcagagattttgggagaagaaaagctttcttatgatgactttttaagtgttttggaaagtggactggaagagatgcagattggtgtgatcccgccaagtcttgatcaggtcatgatcggtgatatgaaacgaacgagaaccgaagaagtaaaaatcttatttttcctaggtatcaatgaaggtgtgattcctgcagccaatggcggtggaggggttgtcaatgaccatcaaagagaagtgcttgaaacctatggaataaatctggcgcctggcatcaaacagtctgcctatatggaacagttttatttgtatcttacggtgtcaaaaccaaccgatcgtttgtatttatcctatcgcatgatggatgcagcaggaaataataaccgtccgtcctattttattgaaaggattcaacgcatttttccaaaattaaaggttacgatgcaggaagaagaagtgcagacgggctatacaagggaagaagcgttagatcagatgattctttgtctgcaggagatggaatttgatgaaagagacgatgatccggagaaaatgaaatggatgcagacgttatatcatgctttaaaagagttggaacctgtgggtgattatgtagatgcaagattttacaccaatcaggcattgccattgagcaaggaactgatccatgatctgtatggggatacgatttcaggaagtgtaacaagaatggagaaatttgccggttgtgcattttctcattttatgcagtatggattaaggcttcgaaaacgtctggtgcatgaaatcctgccgaccgatatgggaaaagtttttcataagacgatggaattagttggaaagcggagtgattggaagtttgcggatgatacatcaagagatgaatttgtagaactgatggtcgagcaggcagttacggatatccaaaaagaattgtttgagagcagccacagaaatgaatatgtcctggagcggatgaaacgaatctctaaacgagcggtatgggcgatggaacaacatatcaagaggggtgattttacaccagaagaatatgagattgcctttggagaggaaaatcatttagattccatgacgtttgctttagaagatggagagaaaatgttcttttctggagtggttgaccgtatggatagtatagaagatgatgaaaataaatatttaaagatcatcgattacaaatcaggtaaacagaagtttgattttgccaagatttttcatggattgcagatgcagctgatcatttatatgaatgcaatgatggaattatacgaaaagaaaacaggaaagcgggtatatccggcaggaatgttttattttcatttggatgatccgatcgtcaatgtagaacacgagaatgaggcggaagataagattttaaaagatcttaagatgagtggcgtcgtcaatgaagattttcagttgatcgatcatatggaacatacgggatcagaaggatatctgacactgccggttcgtgcaacgaagaatggatatgacaagagatcttctgttttaaatacaacacagttgttcaatctgggaagaattgtggaaaagaaaatgacagagcttggaaattcattgatgcatggagatatttctataaagccatatgaatatgaaggaagaaaaccttgtgagtattgtgagtttaagaatatctgcgcctatgaagatggtgttgatcaggtagagaagattaagaaagtatcactagaggagggaaaacatgccttggaccaaacaacagcagaaagtcattgatcaaagagatgccgacatcttagtatctgctgcggcaggttctggaaagacggcggtactggtagaacgtattatacaaaagatcacggacgaaaaacatccgatcgatgtggatcatctgcttgtcgtgacatttacgaaagcagcagcaggggagatgaaagaaaggattatggcggcacttgatgaaaaggtgcgggaatttccaggaaatcagcattttgttaagcagctgtcattgatccacaaggcacagatcacaacgatccatagtttttgtatgaatctgatccgtgattatttttatgtgcttggtattgatccgaatacagcaccgggggatgaaggaagattatctgcaataagaaaagaaatattggatgatctgttggaagaagcttatgaaaaaaaagaagaagattttatcaatctgatcgaatcttattctccaggaaaaaatgataatatcatcagtgaatatattttaaagttatatgaaaatgcaagaagccacagagaaccagaaaaatggcttgatcaggcagaagaaaatatttcagtagagacaaaagaacagtttgatcaggcaccatttatgaagatcatcttaagagatgcaagattttcgatagatggtgcatatgatacgattcaggaagcattagaactggcactttctcctggtggaccatatttttatgaaaaaacactgcgaaaagatttagagatcatcataaagatcaaagaagcacagacattttctgaattatgtgaaagctttgtaaagatggagaaaccacgactttctggacgtaagaaaaaaacagatgagattgatgaaatgcttcaggatcagtgtaagtatgaaagaaatcaggcgtacaatctgcttgatgatctgaaagcagcatatttttatgaaaatgagtcagaaatttttcatgaattaagaaagatcaaaagtccattaaaaggattgatcggtctgacgagagaatttatgatccgttatgatgagaaaaagaagaatgaaaatatcatggatttcgatgatatggaacattttgcgctggaacttttgatcgatcattatgatgaggaaggcaatccagtgccaagtaagatcgcaagagaaaagtccgatggatacgaagaaatctatatcgatgaatatcaagacagtaactatattcaggatgcgatcttaaggagtgtatccaaagaatccgaaggcggtcataatatgtttatggtaggggatgttaagcagagtatttatagtttccgactggcaaggccggagctgtttcttgaaaaatatcatggataccagcaaaagggagatgaatatcagctcattgagcttcgcaataatttccgaagccgcagagaggtccttacatttgtcaatgacgtgttctaccagatcatgcatgaagatcttggaaatatcgaatatactcaaaatgttgctcttgttccaacgatggaatttgaacagggatgtgatgcacagacagaactgttactgttagaatctaatgaagtcaaagactcggaagaagacgcagttgttttggaagccagaatgatcgcaacaaagattcatgagatgattgatggagaagatccaatgatggtcactggaaaagatgaagaaggcaatatgattttaagaaaagccaaatacagtgatatcgttattttgcttcgttctatgaagacaaatgcggaagtgatccagaaagaattgatgaatgcgggaatcccagcatttgcaaataatcagaaagggtattttgatacggtggagatccgcacgttattaagtttattgtctgtagttgataatatatatatggatattgatcttgcagctgtcttaaggtctccaatgatcgggatgtcagaggaagaactaggacgattaaaggtagacggagaaaaagattctctttatgaatgtctttgtgagacgaaagaaacgatggaaaaatcaaagaaggcattggaattgcttgagttgttacgggatgccaagacatatctgccattaacacagttaatctggcttgctctggaaaaaagtggatattatcattatgcaggagccatgccacaaggaaagaaacgtcaaggaaatatcctgatgctcattgaacaggcaaaagcttttgaaagcagccagatcaagggattgtttcattttgtgcggtttatcgaacagtgcagggaatatgatatggattatggagaggcaaatacgatgagcgaagatcaggatctggtccgtatttctagtatccataaaagtaagggattggaatatccgattgtttttgtatcaaagatccatcagaaatttaatttaagggatgggaatggaagtatgatcttccacggagattattttatcggagcagatcatattgatcccatttatcgtacaagaaagaagacaatcttaaagaatctgatcaaaaatcagatgacacgagagtctttaggagaagaattaagagttctttatgttgcgatgacaagggcaaaagaaaaactgatcttgactggaatcaagaaagatgatattgactggaatgcaaaaggagaaatcacagcgatcgatcgtttgagcggaaggagttattttgactggatcaaaaaggcacttccgatggttccaaaacaggattatcgattgaaaatctatactctggaagatcttttgtggcagcaggaaggaaatgaactttttcatgagatgaaccgccagatcttctatgaacgtctaaatgatcagattccaaaagaaaatgtaaaagtgttgaaagagagctttgcatatcattaccgtaatgaggcagagacaaaaggtcgtttaaaatattctgtatcagagatcaaacgtatgagtcaggcagcagatactgaggaagtgatgtattcatctgtttttatggagaaagaaaaaaggataccatcatttgtcaagaaaactgaaaagatttcagcagcatccaaaggtacgatcattcacaaagtttttgaattactagatttttccaaagactatacaatgaaaagtttaaacgaagatatcgaaagatggatctctcttggaaaattaaaaaaagaatatgaaaaagtaatctatcgaaaagaaatcctcgctctgacgagatcagaacttgggaagaggatgaaagaggcagcacagaagaaactgctttataaagaacggcagtttgtgacgggaattccattttctgacatgaacaaagatgcaaaaacggatgattttgttgttgttcagggaattattgatgtatattttgaggaagaagataaaattattttggtagattataaaacagaccgggtcagagaaggggaagaggatattttgatcagacgttatcgtgcacagatggaatcttaccaacaagcattggaaaagatcacaggaaagtgtgtaaaagaaatttacatttattctgtaaccctgcaaaaaacaattcccgtgcatgtatgaaatttctgatttgtcatattctaagaatagaaaatgacaaatcagaaaggaagaagatcatgccaaaggaaaaggattttatagaaaagacattcgaagaaatgaatgagatggaacggttaaaatatgaaactgctgcagaacttggtctgcttgatcaactaaagaagagtggatggaagtcattatcagccagtgaaacaggaagattaggcgggatcatgaaccgtaagataagaaagcagaaggaaagtcaggaaaatacgaaaggaagttaaaatgaacaaaccatgttttatcgcagtgacaaatagaaatctatgtaaacgaccattttttgatgtgatcgaggatctgtcaaagaaagatgtgaaaacgatcgtattaagagaaaaggatctgtcagaagaagagtactatgagatcgcagagaaatgtaaggaaatctgtgacagaaacggtgcttccttaaccattcataattttatcgatgtggcaagaagacttgggatcaagaagattcatcttccgtatccggtatttttaaaagaagcagggaatctgtctgattttgaatgtgtcagcacatcgatccataagccagaagaggcgataaaagcacagaaactgggggcggattttgtgtttgcaggacatgtctttgtgacagattgtaaaaaaggtctgccgccaaggggacttgaatttttgacggatgtggtaaatgcggtcaagattccggtgtatggaattggtggaattgatgaagaaaatattacaaagatcatggaatgcggggcagcgggcggctgcatgatgtcaggattcatgaaataaaaattgaaattgagtggtatctatgttaagatgaaaagaagtagcttttgaagaaggtaaggacgtaagatgaagatagcagaacatttaacaaaaccaatttcaaaaattcttaaacttttacttcgaagactggtattcgtgaccgttgcgatcattttacagatgatctggatgacctatatggttgtggtgatcggagaatattctaaagtgatcgaatgggtatttcgcatattcagtattgctgttgtgatctatattgcgaataaagatgataatccggcgtataaacttgcatggacgataccgatccttttatttccgatttttggcggattcttgtatctggtcctgggagataagcagccagcgaagaagctccgtatagaacttgaacagtcgatcaaggatacagaatttctgcttggacaggattatggagtgatggaacgactggaacaggaagattatcaggtcgcaggacaggcaaagtatatagatcagtatggtggatatccgatttacgagaattccgatgcgaagtattatccatcgggagaggcaatgtttgaagaactgatcgaggatcttaagaaggcaaagcattatatctttatggaattttttattgtttcaagaggatatatgtgggatacgatcttggaagttctgaaagacagagtcaatgatggtgtcgaagtacgttttatgtacgatgatgtaggatgtgtggatctgctcccttataaatattacaaagagcttgagcgttttgggatcatggcgatggcatttaatccgatcaaaccatttgtttcaacggcatggaataacagagatcatagaaaagtagttgtgatcgatgggcatacagcatataccggtggattgaatttatctgatgaatatattaataaggttgaacgttttggatattggaaagatgctggacttaaggtgacgggagatgcagtgtggaatttcactgttatgtttttgcaggtatggaatgcgatccgtaagacagatgaaggatatggagccttccttccacataagcattatgaagatgcctttaaaggaaagggatttatacaaccttatgcggataatccattggatcatgagatcgttggagagaacgtatatttaaatatcattaatactgcaaatcattatgtttatatttacaccccatatctgatcattgacaacgagatgacaacagctctttgccttgctgccaaaagaggggttgatataaagatcgtaactcctggaattccagataagaagttagtattcttattgacacaatcttattataagcagttggtggaagctggaattcatatttatgaatatactcctgggttcattcatgcaaagtgttttgcaagtgatgataaggtggcaacagttggaacgatcaacatggattatcgaagcctttatctgcattttgaaaatggtgtttttatgtataagaatgatgcagttatgcagttaaaacatgatatggagaaaacatttgagatcagccagaggatcacaaaagagatgtgtcaaggaaatttaagaaaaacattgacacagagtgtcttacgattactggcaccattactataagaggataagatggaaagttacagagattttgcaagggtgtatgatgaatttatggatcagaccccatatgatgaatggcttttaaatattttaaatatattcaaagaatataagattgataaagatgcacaggtattagatcttggatgtgggacaggaaagatggcacgaaagcttgcaagagaaggttatcaggttacggctgttgataattctatggatatgctggagatcgcggctagtgaagaggatgatcatattttatatgtattgcaggatatggtgtcattagaacttccacagcaagtagatgcagcagttagtatctgcgattgtatgaattatattcttgaggaagaggatttaaaagaagcattcagaagagtcagagaatttttaaaagaagatggtgtgtttgtatttgatatgaacagtcattataagtataaagagatccttgcatgcaatacatttgcagaagaccgtgaggatgcgagttttatctgggataatttttatgatgaagaagaacgcatcaatgaatatcagttgagcctgtttattcagaatgagcaaggtacatataacaagtacgaagaattacatttacagaaagcttacgaacaagaagaggttgtaagctttctttatgaagcgggattttcatccgtgcgtgttctggatgcagagacaatggatgaagttaaagaagatacacaaagattatattatattgcaaattgaaaggaaaaaagatgaacgattatattatcagaggaacagcagcaaatgaccaggttcgtttttttgctgcatatacaaaagatgtcgtggagacagcaagacagaaacataatacaagtccggtagcaacggcagcacttggaagattattaacagccggagctatgatgggaagtatgtgtaagaatgacagtgatgtgatcacattacagattcagtgcagtggaccgatcggtgggttgacagtaacagctgattctaaggcaaatgtgaaagggtatgtaaataatccagatgtgatgcttcctccaagtaaagaagggaaattagatgttgggaaagcattagatctaggtgttttgacagtgatcaaggatattggattaaaagagccttattcaggacagacacatttagtatctggagagatcgcagaagatttaacatattattttgcggcaagtgagcagattccaacatctgtagcacttggagttttaatgaacaaagataacacggttcgtcaggcaggtggatttatcattcagatgatgccatatgcagaggaagagacgatcagtaagttagagaagaagatcgcagaattcaaatccgtaacttatgcattagagcatgaacatacaccagagaagatgatggaggatcttttaggtgatatggatatgaagatctatgagaaagttccaacacaatttcattgtaactgttccaaagagagagtagaaaaagcagtgatttctgttggaaaaaaagagattcagaacatgattgatgatggagagccaattgaagtaaactgccatttctgtaatacacattatcattacagtgtggatgatcttaagagaatgttaaatgaggcaacaagataagccgttttaaatgtggagaatcctgctttgcaggattctttttgaataatggaggaaaactgatgagaacagcgaagaatatacttttgtttgtcttcatactgatcataagtttgaatgtaacagtatatgcacaggagaatggagagaagacagaaaatctggtcaaggtaacacaggaatctgagaatgataaagatgtgccgtttacgaatagtaaaggagagacagtatatacattgtctgcaactacaagggaccgagaaggtgcgatcatgatgccgaaagaccgtattttatgtcttacttcggagacggttgatctaagtgacatcgaagttttgatcgatgattcaaatgaacaggcaaaaaaggatcttgaggttgagcttatatctgcgtctaagaataccgcaaagatttgtgtgaatttttcaaatcggtatgtttccacggatttaaactgggatgggaagattcttgtaaaaaaaggcaatgacgtgatcagggagattgcgatcgcttatatgacaccatacataagagatgtgcatgatacaggatttcaaacattaagttcatggtctggtacatggggtgttttagatggagagcaatatcgctcctctggtgttgttgatgtgtatcaagataatgcacagatttcttttacctatcagtcacaaggcaatcagggagtgaaagcatttcatttagatcataatggaaattatacgttttcggatggatcgtatgatatcaaggctcagaatcaaagtcccaaggcctataacacagtaaatatcagtctgaaaccatcttatattaagcagttaaaagaagaactggtcaatgacctgtatcaatacagtttagatacaaagcagtgtgtgttcgatgatctgatgattgaatatgaagacggatgtatcatcggagaagtcacagattttgtgagactaggacatcaggcaacgatcaagccgttagataagatgacattaaaggcaaatataaaatctacatcaaagatttttcttcagtggaagaaacttgatcgtgtcagtggttatgcgatctatcgttatgattctgggaaacagcaatataaaaagataaaaacagtttcaacacaggagacttcctatacagattctaagttaaaatctgggaagacgtattgttataagattgtgccatatcgttctattacgtacacagatgctgggaatttatgcaaggttgtgaatggttcatcttccaatatcgcaaaatgtatcacaaaaccggggaaaccagtgataaaggcaaagagatcaggaagaagaataaaagtaaaaatcaaaaaagtaagcagagccagtggatataaagtgtatttaaagaagggaaagaaaggccagtataaagttgttaaaacatataaaggtaatcggacccgtacgtataagagtcgaaaattaaaaagaaaaaagacgtattatgtgaaagtacgtgcatataaaacatatcaatccaagaaatactttggaaaatattcaaaagcgaaaaaagtcaaaattccaaagaagtgatgatataagaaaaaaagacagatgaggtgattcttctcatctgtcttttttcgatttacgaattattctttttcgtcagattcttcggatggagtttctgtttcttgtgattcttcttcaactacggatggatcatcatcatcagtatctgtgatgttgatagaaacataatccctgtcgtcttttgatggttcagggaaaatctcatcatcatcaaaagagtcatcatcaaaagattcgtcatcgaaatcatcgtcaaaatcatcatcggatacttctttgatctttgcaatgatcgctttgatctgatcacgagcaacatataaaataccagcaacggtagcgatggcagtgatcagtttaaaaaggtcttttatggttttcttcataacgaaaaactcctttctttttttattattattttataatgaatcaaaaaaaaatgcaatgtaggattgacaaaataaaacttcatgataaaataaaagcataaaataaaactttgcaaaaacaaaggaggaataaagtgaaacgtttatgtgcaaaagcggcacttgatcttgtgccagatcatgggattatcggacttggtggtggagagacgatcagttatcttgcagaagatatcaaagaagcagggaaagatgtcaaagttgtgacaccatcagatcatacagcacaagtatgtaaaaagcttggattagaaattgttgataccaaagaagtaaaagagatcgaaattgcatttgacggttgtgatcaggttgattctgatcttaatgcatataaaagtggaggcggaattcatacattagagaagattattgcaaagatggcaaaagaatatgtattactggtcgatgaaacgaaagtaacagataagttaaataataaagtaccagttgtattagacattattccagaagcagtgaaccatgtgacaagtcaggtggaagcaatgggtgcaacagtgaagaaacgtgatgaacatttactggaagtttattatgacacgttaccagaactagaagagattgacaaaaacttaaagatgatcactggggtgattgagatatcattattttatcagattgcaacaaaagcattggttgcaagtgaagcaggaatcagagtgatcaagtaagaaagaaggaaagataagatgagtacatggggaattttaggttgtggaacaattgcgaatgagatggcagtaacatttcagaagatgggacatgaaatttacggagtagccaatcgtacaccagagaaagcagaagagtttgcagacaaatatggagtaaaacatgtttttaaaacatacgaagagatgctggcagatgaaaatatcgatatcatttatgttgcaacaccacatagtatgcattatgaaaatatgaagcaggcagtcaatgcaggaaagcatatcttatgtgaaaaagcgatcacagtgaatgcagcacagttagaagaagtgctggaacttgctgaagaaaaaggtgtggtagtcagagaagcaatgacaatttcacatatgcctttgtataagaaattaaaagaacgaatcaaagaaggtgcgatcggtaatacaaagatggtacaggtaaattttggaagtaataaaggttatgattctacacagagattttttgcattagaagcagctggcggagctttattggatattggagtatatgcaacagcatttgcgagaacatttttaagtgagatgccaaatacgattcttacgactgtagaatatttagagacaggtgcagatgaacaatctgggatcattatgaagaatacaaaaggggagatggttgttatgtgtctgacacttcgtgcaaaacagccaaaacgaggagttgtgacaggtgataagggatatattgaagtatatgaatatccaagagcatgcaaagcaacgatcaccaatacggcaactggagaagttgagacagttgaagcaggaaagacagaagatgctttaaaatatgaggtagaagcaatggaagcagcgatcgaaggaaacttggaggatgattgccagatcattacaaaagatacgatgcgaattttaacgagtattaagacacagtggggaatgaaatacccatttgaataaggatctgagatgatcatataagaatttatcaaaaagaaatgtgccaaacacacatttctttttttactggacgaagcttttgctatcagttatacttaataagaatgaagcaggaaggagcggtaagatgatccagatttataagaattatgaaggacataaagagttagaagaattagatcatatcgaattggaatcatgggtgatgatcacagatccaacaatggaggaactcatgaatatttcgagagattataagattgatatggatgatcttaaggcagcactggatacggaagaacgttcccgactggagaatgaagatgattatacaatgatccttgtgaatattccggttgtagaggaagaggaaggaaagaaatggtatgagacgataccgcttggaatttttattaccaataagatcgtctttactgtttgtctggagcagacgaatatcttaaaacaatttgttgacggactggtatcgaatttttatacatttatgaagacaagatttgtatatcagattctttacaataatgcagcattgttcctgtattatctgcgtgtgatcgaccagagagcaaatcaagtggaagatctgttacatgagacttatgagaacaaagacttgatccaattgtatgacttagaaaaatgcctggtttattttacaacagcattaaaatcaaatgaagtagtgttggaaaaattaagaaaacatattggccttagacattacgaagaagatgaagaattgttggaagatgttatcattgagaataaacaggcaatggagatgacggatatttatcataatatcctgcgaagtacgatgtctttgtttggatcgatcattgataataacctgaatcaggttatgaaattcttggcagcgatcacgatcattttggaattgccaacgatgatctcgggattgtatggtatgaacgtcaatggtgttggaatgccgtttgcgacgaaagcatatgggtttgcagcaatctcgattttttctttgatcgtctgtttgattgcggtgtatattttgaagaagaaacatatactataagatattgaagaatcacactaagtggttcttcatgtgttttagggcgtttttttccagacggctgacttgtgcctgggaaatggcgatttcgtctgcaacttctgtttgtgtttttccttcaaagaatcgcattttgataatatcatattctcgatctggaagatgttccattgcttcttttaaggcaatagattccacccagctatcttctttgttttttttatcttttacctgatccataaggtaaagagtatcacctccatcctgataaacaggttcataaagagaaagaggggttgcgatcgcatcaagtgcaaataagacatcttcttttttcatatcgatttcttttgcaatgacgtcgatcgtaggctcatgatttaattttttggtaagaacttctcttgcattgatcgctttatatgcggtatcacgaagagaacgacttacacgcatactatgattatcacgaagatagcgtttgacttcaccaatgatcatgggaacagcataagtagagaatttcacatttagattccggtcaaaattatcaatggctttcataagaccgatgcagccaacttgaaaaagatcatctgcattttcactacttcctgaaaatcgttggatgatactgagaacaagtcgtagatttcctttgatataatgttctctggcaagaagatcaccttgttcgatccgctcaaataaatcttctttttcttcttcggaaagtaaagggagagaagaagtgttaacgccacagatttctactttttttcgtgccataataagttcctccatttgtgattcgtataataaaatcatgcacagatctggtggaatttatacgttgaaaaaaatggaagaggaaattgacttatattttttcagatgctatgatgagaataaatacgatcaaaggagagtaaagatgaagaagatattagcatcgcttatgatggttgggcttattttttgtcttggtggatgcaatgttccatggacgaaacaaaagacagagaaaacgaaggctgcgaaagttattcaggcagataaagttgaaggaacaatgaaaggaatgaaattaaaggttggtgtatcgaatgatatggcaccattttcatattatgacagtgagcagaagaagatcacagggtttgatattgatcttcttgataagctcagtgaatatctgggctttgaatatgaattatatccaatgaatatgaaggaattagagcaaaagatcaagaacaaagaattagatcttgcgattgcagggatttcaatcacagatgaaagacagagagagttttcatttacagacacttattatgaaacatatcttcagatcgtggtcagaaaagacagccagatcacagatcgtaaggagattacagagaagaagatcggtgttgtagaaggaacatccagtgcacaatatgcggaggattatctgtcagaggataacaagatcacatattataaaaacattacaaaagtatggaacgatcttgaaaaaggaacgatcaatgcaacgatctatgatacagcaggaatccagaattatatgaaagaacatacagataatacgaatcttagtgtgttgaatgaacaacttaattctgaggaaagtaattatgggattatgtttgcgaagggatacaaatatctggatcagtttaatgtagcgcttcaggttctcaataatgatgggacgtatcagaagcttaaggagcagtggatcaagacaaaagaataaaagataagaaaatggcaggaactatatgtaagatgaaaagttcctgccattttgtttgttaagaaaggctcttgtaagattcaaagtgtgagtgtatgaagccatgcagattcttcctcgttaaggtgtggagaaagtgtatcatatacgaactgttggtaatcagttaacaattgtttttctttttcgttaaataaagaaaggtcaacaccgtcaagatcgatcggtacaagtgtcaggggttcgaaatgaaggaaagcaccgtattcattttgctgccattttttacagatcagcatattttctgtacggattccgtattttccgggaacatagacacctggttcgtctgtgatgaccatacccggctgtagtactgcgtcaagattttcgggattcgatctccaacgaaaagcgtttggaccttcatgaacaccaagaaaatatccaacaccatgtccggttccacaacgataatcaacgctatcttcccagagaggttctcttgctagaatatcaagattacttcctctacatccaaacaggaattttgcattggcaagagtcagcatagattttaataccagtgtaaagtattttctttcttcctctgaaattggaccaagaataaaagttcttgtgacatcggttgtaccaccataatattgtccaccggaatcaatgagaagcataccttcagctttgacatcgacatcggattcttcagtggattgataatgcatcattgcagcatgatctttataagcacagatcgtctcgaaactagggcccatgtaatcgggtagtttttttctttcttcctcgagatggtcagagatcatacgttctgtcatagggatttttccgacgtttttcttaagccagtacataaattttgtcatagcgatcccatcattgatatggcatgctttcaaatgatcgatctgaatgtcattttttatagctttcattagttctgttggattcttatcttcaatgatcttgcatttgaataagagattataatgcagatagtttgtaagatctggatttaacaaaacagtttcatgttggtcttttaagaaagcactaacttctgtgtaatcgaggatggaaatgccgtgttccttaaaccgttgaaaagcaactgctgaaatacaatcttttcgaagaaaaagaaaacatttgtctatcgtgatccatgcataactataaaataatggagtgcatgcaatgtcatctccacgcaagttaaaaagccatgcaatatcaggaagagaggataagaaaaatgcattggcatcaagttctttcattttttctctgacacgtgccagttttgaatcagtatgttctccactatatttgatatcatgacggtaaattgtggattttgtgatcgcggggcgatcatctttggcccagagttcttctacaaaacgaagatcaaaacgaaaagatgcaccatgctgcttcactagttttgcgattttttttccgtaagaagctgagatcgtaaagccgtttaccccaagtgtatcaccttcctgcaggtgttctttcaaaaattcaagaatcgtaggaacactagaaaccccttgtttcatcaatgtgatatcagaagaaatctgtccttcggcctgcgtaaaataacgtccatcagtccaaagccatccttcttcgcatccagctagaaaggtaccagcagaaccagtaaaaccagaaatgtattgtctgcatttaaagtaatcatctacgtattcggattgatgtggatcttcacttggaacaagataataagaaaccttttggtttttcatttgttcgcgaagtttcataaaatttagattcatgtccaaaaacctccattttgtcgtattaaaatcctgaaaatatatgttttatataggatttcaggatcggtttatgttaattatagtagatgaatagggattcgtaaagaaaaagcaaatgtaaaaatatatggtattttgtcaaaaaagttgaaaaaaataaaagaaatacggtataatcgggattgaacaaatataaaagtataaaggagaaacttatgaagaatttactagttgctcagtcaggaggaccatctgcagcaatcaatgcgacgatcacaggagtgatcgatgctggaattgagagtggacgtgtgggtcatgtttatggtgctctgaatggaattaaaggtgtgctgaacgagaattttgtaaatctcgatgaagtatgtgacacaaaagaaaaaagagatctattagcgatcacaccggcagcggcacttggttcctgtcgatggaaactggggaatcccaaagaaaatgcagaagaatttgaagagatcatccgtattttaagaaagaatgacataggatattttatatatactggtggaaatgattctatggacaccgtatataaactgtctgtttactgtgaagaacataatattgatgacattaaggtaatgggagctccaaagacgatcgataatgatcttggagagactgaccattgccctggatttggttctgcagccaaatttatcgcgactgcgtttaccgagattgcgtgtgattgctttgtttatgatgtcccatccgtaacgatcgtagaagttatgggaagaaatgcaggatggttgactgccgcatctgcacttgcaaggatcgaagggcgaaaagttcctcagttgatctatctttgtgagaaagcattcgatgaagatcgatttattgaagatgtaaatgaagcattaaaaaaagaaaataacatcatcattgcagtaagtgaaggtgtaaaaactgctgacggaaattacgttggagaagaaacaaaatcaggaaaagaagatgtatttggacataaatatctttctggtgtcggtaaatatctggaaggactggtaggagagaagatcggatgtaaagtcagatctgtagaattaaacatccttcagagatgtgctggatatatgttaagtgagactgatatcatggaatcaagaaatcttggagcatttgcagctgtcagtgcgattcgcggaaagagtggaaaaatgtctgcagtgcgaagaatttcagatgatccatatcaggtagaaatcgtactttctgatctgtcaaagattgcgaattatgaaaagaaagttccgatggaatggatcaatgaagaagggaatgatattaaagacgaattactgacatatttaaaaccgttgatccaaggtgaagtacagattccatatgaaaatggaattccaaaacgatttattttataaaagacaagaaagaatcctgcggtgcaggattctttctatttaagttcatatggaatgtcaggtcttttgtttcttggttttacaggcttttttgacgattgtgagatgaaataatgattgatctctgcaccgataaaaagcatcatcatacaaaaatacaaccagaacaaagttaacaagatactggtcaatcctccgtacatagtactaaagaaagaaaaattatcaaaatacattgaaaagaaaaatgataatacaaaccatgcagcagaactaaaaaatgctccaggaaggatctgctttgttttgaaattttcactcggtaaaaaacgatacataatgataaaaacgaccataaatgtaaaaaatgcaaggaaaaaacggatcgttgcaaaaaatacatgtttattctcgaggactggttcaaagcgatataactgaatgagcagggaattaccaaataataaaagaatcagaccgaataatactgcgatcgcgaaaagtccaatataaatacttgagataaaacgcaaaacaaaatagtttctcttttcaggaatttcatgaatcgtattaagtccagtcatcaaggataagatccctttggatgcagaccacaataatgtaagaatggtgatcgacatatacgtagtagtaagttttccgtttaaagatcggatgatcgggactaccataccactgtactttggtggaagataggtgcgtaccagttcgatcatatcattcggtgtgataggaaaatatcttgtaagactaagcaatacgatcataaatggaaaaaatgataggatcgtaaagaatgcagcctgcgcagaaaacgctgtaacgtggtctttctgagctttatcgatgacggatccaatcatagaaattaattttaacataatatcatacctcttaattgatacctcataatatcataatttgattgattatacaagcattctaaaagcaaaggaattgcgccaaaagagaaaaaatatctaaaacagacaaaaagacctattgcatagtaaagaaaattgtgatatagttcctaacggagtcaaaaaagaattataattatttaaaaaaaataaataaattataaaataattcttaaatattctattgacaaagtgaagataccttgttaaaatgtagacataagttaacaggagattacgaggaggattgttactggtagtgcaggctaaaccaacttattgaatttcacagaagggaagtttataagtgaggtttatttttttgtgaatgcgcaacaggaagtcttttcgttagagaagtatgaggtaaagttgtgcagattacaaaaattgtaaataataacattgtaatttcagaggacaagaatcataaagaagttgtactgatgggaaagggccttggctttcaaaagcacaagggagatgagattaagttgagtcagattgagaagacttatgtcatgaaagatcatggtatgacacagcgttttcaggagatgttaactgatattccgatcgagagagtgaagatttgtaataagatcattcagtatgcgaaggatacattacagaagaatattaatgataatatatatgtttcacttacagaccacatcaattttgcgattgagagagttgagatgggagtaccattccagaatccatttttatgggagatcaagaagttttattatcaggaatatctgatcgggaaagtagcgatcggtatgatagagaaagaactgaaggttacgcttccacaggatgaagcagcgttcattgcattgcatattgtgaatgcggaacttgatctggacatgacagagatggtttctatgacgaagcttgtgaatgatattttgaagatcgtggataaacattttggagagcagattgataaggagtctgttttctatgagagatttatcacgcatctgaagttctttgcacaaagagtttatattggcaaagaagtgaaaagtgatgatacagaattccaggagatcataaggaataagtatcacgaatgtattgaatgcgtagatgagattaaagactacgtgaagaagacttgcaatcatgatattacagatgaagaacttatgtatttaaccgtacatatcaagcgagttacgacaagataaaagtttatattgttgatcaggattgttactggtaatgcaggctaaacttgatttgaatcatggattttccagagagtccaggtttctttgtgaaagtatttttgcaggggaatttggatggtggagatttacaggtttgaatcaggtttttttatttataagaattttcttataatatatataattaattagcttatgaaaatatagaaaaggaggaataaaaaatggtaggaattattcttgctacacatggtgatttcgccaagggtatcttacagtccgggtccatgatttttggtgaccagccaaatgttgcggcttgtacattacagccaagtatgggaccagaagacatcaaaaaacagatggaagatgccattgccggattcgaaaaccaggatgaagtgctgattatggttgatttatggggtggaactccatttaatcaggctaacggattaattgccggacatgaggataaatgggcaatcgttgctggattaaatcttccaatgttgatcgatgcatacgcatctcgtatgatgatggacacagcacatgaagttgcagctcagatttccggaagtggaaaagaaggtgtgagaatctatccagaatctctagaacctaagaaagaagaagctgcaccagctgctgtggcagcacctcagggagcaatcccagaaggaacagtacttggagacggtcacatcaagatcggtcttactcgtatcgacacacgtttattacatggacaggtggctacaacatggacaaagatggtaaatccagaccgtatcattgttgtatctgatgccgtatcaaaagatgatcttcgtaagagaatgatcattgaggcagcacctccaggagtaaaagcacacgttatcccaatctggaagatgatcgaagtatcaaaagatccaagatttggtgagacaaaagcaatgcttctgtttgaaacacctcaggatgtattaaaagcaatcgaaggtggagttgacatcaaagaggttaacttaggatcacttgcacattcaacaggtaaagtagtagtaacaaaagctgttgcgatgggtaaagaagatgtagaaactttcgagaaactgatcgacaaaggtgttacatttaatgtacgtaaagtaccaagcgattctccagaaaacatgggtgaaatgcttaagaaagcgaaagcagaacttaaataatcaatttagaaaaatatataggaggaattatcatgtcagttatttcaatggtattagttgttatcgttgcattcctggctggtatggaaggtgttttggatgaattccagttccatcagccattagtagcttgtacattaatcggacttgtaaccggacagcttgttccttgcatcatccttggaggtagtcttcagatgatcgctttaggatgggctaacatcggtgcagccgttgccccagatgctgcattagcagccgttgcatctgcaatcattcttgttcagggtggacagggaagagctggtgttgatactgccatcgcagtagcaatcccattagcagtagcaggattattcttaacaatgatcgttcgtacactttccgttatctgtgttcatcagatggatgcagctgctgcaaaaggtagcttcaaaggtgtagaagcatggcatatcattgcagtttgtttacagggtatccgtatcgcgatcccagcagcagcattacttgcaattccatcatctgccgtagctgcagcattaaatagtatgccagcatggttaacagatggtatgtccatcggtggtggtatggtcgtagccgtaggttacgcaatggttatcaacatgatggctacaaaagaagtatggcctttcttcgcaattggtttctgtctggctgctgtttcagacttaacactgatcgcattaggtgttatcgctgtatctatggcactgatctacctgaaactgtctgagaatgcaggatctggtaacggtggaagcaatactggtgacccattaggcgatattttaaatgattattgattaagaaggaggtaagaaaaatggcagagaaaaaagttcaattaagtaaaaaagatagattgtctgtagcattacgttctactttccttcagggttcttggaactatgaacgtatgcagaatggtggttggtgtttcgcaatgatcccagctatcaagaaattatatacaacaaaagaagatcagatcgcagcattaaaacgtcatctggaattcttcaatacacatccatatgttgcatctccagttatcggtgttacactggctctggaagaagataaagcaaatggtgcacctgtagaagacagtgcgatccaaggtgttaaagtcggaatgatgggacctttagctggtgttggtgatccagtattctggttcacagcaagacctatccttggagctttaggagcttcccttgcaatgggtggaagtatccttggaccaatcttattcttcgtattatggaatgtaattcgttgggcattcatgtggtatacacaggaatttggttacaatgtaggaacaaagatcacagaagacttatcaggtggattacttcagaaagtaacaaaaggagcatctatccttggtatgttcgtccttggtgccttgatcgaacgttgggtaagtatcaactttacacctgtagtatctaaggttacattaagtaaaggagcttacatcgattgggctaaacttccagcaggagcagaaggaatcaaaacagcattaacacagcaggcatccggtatggcacttgatccaacaaaagttacaactcttcaggataacttaaactcattgattcctggatttgtaccattactgctaacactgttatgcatgtggttattaaagaaaaacgtttctccaatcatcatcatcatcgcattatttattattggtattggtggacacgttatcggattattataagagatgatctagcacatatacaaaaggcccggaagtccgggctttttgcttatataagaagaatataaaaaatatatcggtaagaatgaacgaaaagtcatcttgtataagcaaagaaaattgtatagaataaataaagaagaacctacagaatcggaggaaagcttatggcacaatcaattaatacaagagttgatgttgttgtggaagcaacatcgtatcagggacttacaaactatggaaagatcatggttggagacaaaggatttgaattctttaatacaagaaatgtcaatgattatattcagattccatgggaagaagttgattatgtgatcgcatctgtgatgtttaaaggaaagaaaatcccacgttatgcgatccagacaaagaaaaatggaacattttcattttcatcaaaagaacctaagaaagtgttgcgtgcgatcaaccagtatataccatccgaacgtctggtgcgttctttaagcttttttgatgtgttgaaacgtaattttatgccatcaaagaagaatgcgaagattaaaaaataaatgtaatttttggagttacaaggtaaagaaggagaagatggctatgggacatattttaagaatgaatccagtttttaaagaaatgatctggggtggaacaaaattaaaagatatttatggatatgagattccgagtgatcacacaggagagtgttgggcaatttctgcacataagaatggagattgtacgatcgcagatggagaatataaaggaaaaacattatcctggttatttgaaaaccatagagaattatttggaaatatcgaaggagaccagttcccattacttgtaaagatcattgacgcgaaaaatgacctgtctgtacaggtgcatccagacgatgtgtatgcgaaggaacatgagaattctttaggaaagacagaatgttggtttgttcttcaagcggatgaagaaacaaagatggtcatgggacaccatgcaaagacaaaagatgaattcgtcaaagcgatcgagaatgatgattatgacaatctgttaaattcattcaagatcaaagcaggagatttcttctatattccatctggaacattacatgcgatctgcagcggatcgctgatctatgaagcacaacagtcttctgatattacatatcgtgtttatgattatcatagaaaagatgcggatggaaatgaaaggcagcttcatgtacagcaatctattgatgtgacaaatgtaccagcagatattgatcagaacaaagaatttccgcagacaattcttgagaatggtacaaagacaagatatgttgacagtgaattctttaaagtggatcgttatcagttgaatggaaaaaatgtgatcaagaatgacgaaccatttatgatggtaagcatcatagagggaacaggaatttttgaaggaaatgaagtaaagaaaggtgatcattttgtaatctgttccgatcagaaagaagttacttttgatggagatatggaagtcatgatttccacattatgatcatgaccataatagataaagaaggattataagaatatatagaataaggaagttttatatgaaggaaacaggaaaggtatttggcgtcttgcaaagagtcggacgtgcatttatgcttccgatcgctgttttgccagttgcaggtcttttgcttggaattggacgatctttgacaaatgaaacaatgcttcgggcctatcatctgatgaagatcatgggtccggggactattttgtatggagtaattaaagttggaagcgattgtggaagtattatatttgacaatcttccgttgatatttgcaatgggagtttcaattgggatggcaaaggcagagaaagcggtagcagcattatcaggggcattgtcttttttcgttatgcacgaagctatttcatcgatgttatcattgtatggtgatacatatacaatgcatgcgggagcaacggatcagattcttggaataacatcactgcagttaggtgtatttggaggaattcttgtcggacttggtgtcgggtatcttcataaccgtttttataaaataaaacttccagaagttttatcgttttttggcgggacaagggcagtgccggttatttgtaccattgtatatgttggagttggaatattaatgttctttatctggcctccgatccagaatctgatgtattccattggaggaattgtgagagcttcaggctatttagggacgtttatttatggagtgatggaacgtgcattgatcccatttggacttcatcatgtattttatctcccgttctggcagacatcgctaggtggaacgatggaagttgctgggaaaatgatcgatggggcacaaaatatcttttttgctcaattagcagatccagcaacaacacattttaatgtggaagcaacaagatttatggcagggaagttcccattgatgatctttggattgccaggagcggcatttgcaatttaccgttgtgccagacctgaacatagaaaagttgtcggtggacttatgatttcagcagcattaacatcaatgctcacaggaattacggaaccgttggaatttacatttttatttattgcacctggattatatggaatacattgtgtttttgcaggacttgcatatatgatgatgcatgtattgaagattacagttggattaacattttctggaggacttatcgatctgttcttttttggaatcatgcaaggacaagaaaaaacaaactggatgatggtcattccactgggaattgtttatttcatagtgtattattccttattccattttctgatcttgaaatttgatatcaaaacaccaggaagggaagaagaaccagcacaagaatatgaagaagagccagaatatgaatacagagaagatttttcagaagaattattagcaaagatcgcagcgggacttggaggcaaaaagaatatcggtgatattgactgttgtgttacaagacttcgatgtggactgaaagatataagtctggtggatgatgccatgatcaaagaaacaggatcaaggggaattttgaaacgaggaaacagcattcagatcatttatggtccatatgtaacggtgctaaaatcagaactggaagattatttaaggacaagacgagcaaagaaagaaatcaaacaattactaaaagaaaatacacattccaaagataaaatgcaacaggaaagtatcgcctgtccgatcaaaggatgtgtgatcgaactagaagaagttggagatgaggcattttctggtggaatgttaggggaaggctttgcagttaaaccagaagaaggaaaactatatgcaccagtagatgggatcatcgcagcagtgtttaggacaaaacatgcccttgctatggaatccaaagatggagcagaagttttgatacatcttgggcttgatacagtaaagcgaggtggaaaaggcttctatatgaaagtagaagctggtcagaaagtaaaaaaaggagagctcatctgtgagttcgacttagaagatatgagagtagatggatatgttatgacgactccggtagttatcagtaataatgcggaatacgcaagtatttcattgaaacatattggagagtgtaacgtaggggaagaaatactgaccctttataaataggtaactataaaattaaatatagatacaattcttaaacttaaaaagaaagaatgtatttatgatcgatatcagatcataagatgcattctttctttttacttgcagacaaaaaactaccgtagtaaaataaattcaatatgctaacgaaagagaaggtttgaaaagtatgaaaaaagaacagatcaaaggatcattatcattatttttagctgcgatcatatggggcgctgcatttgttgcacaaagtgttggaatggattatgttggaccatttacatttaattgtgttcgtacattgatcggaggcattgtattgattccgtgtattgcgtttctaaacagaggaaaagtaaggaagaaaacaaacttcacggagaaaaagagattgctattaggcggaatctgttgcggagtcgcattagctacaggaagcaccttgcagcaatttggaatcatgtatacaactgtaggaaaagcaggatttattacagcattttatattatcattgttccaattttgggattatttttaggaaaaaagtgcggattatccgtctggatcagcgttgtgatcgcacttgcaggactttattttttatgtattacggacggattttcgattggaaaaggggatatctatgtatttttaggtgcaattgcattttcgattcatattttagtgatcgattattttacacaatttaatgatggagtgaaaatgtcatgtattcagttttttgtctgtgggattctttgttttgttccaatgatgctttttgaacatccagagatcagcatgatcttacttgcatggaaaccaatcttatatgcaggagtgatgtcatgtggagttgcttatacattacagatcgtggggcagaagaatatgaatcctacggtagcatcgttgatccttagtctggaatctgtgacctctgtgatcgctggatttttggttctgcatcagaatttgagccagagagaattgatagggtgtgggttaatgtttatagcgatcgtattggcacaacttccacagaaaatttaattgacaaatgccataagaatgttatagaataataacgttaaaggcattgatggtgcacagtaagaaaccaagtgtttccgaatttcacaccgtagctgtatctctgaatgcgatgcaacaatcattttcatatcatgtatcagtaggagataacggagtctgcccgttacgcagagacttaagtgcttatggtaattaagaagaagtttaacgataccataggaattagggtggtaccgcgagtatatattaagaactcgtccctttgcggacgggttctttttcttttgcctgaatacagaagaaaaagtaacctgatccgagaatatagaaaagatcaataaaggagaactaagcagatgaaagagagattagaggcaatcaagaaagctgccttggagaaaatcgagcaagcagatgcaatggatagtttaaatgatatccgtgtatctgtactgggtaaaaaaggtgaattaactcaggtattaaaaggaatgaaggacgtagccaaagaagaacgtccgatcgttggacagatggtcaatgataccagagcagtcatcgaagaagcattagaaaaagagatgacattattaaagaaaaaagttcgtgaagaaaagatgaaacgtgaagtcatcgacgttacattacctggaaaaactcatgaaaaaggacatcgtcatccaaaccagatcgcgctggaagatttagaaagagtatttatcggtatgggatacgaagttgtagaaggaccagaagtagaatacgataaatacaactttgagatgttaaatatccctgcaaaccatcctgcaaaagatgaacaggatacattctatatcaacaaagatatcgtgttaagaacacagacatctcctgtacaggctcgtatcatggaaacaggacagatgccaatccgtatgatcgcacctggacgagtattccgttctgacgaagtagatgcaacacattctccatctttccatcaggtagaaggattagttgtagataaaggaatcacatttgcagacttaaaaggaactttagaacagttcgcaaaagaattcttcggaccagatacaaaagtaaaattccgtccacatcatttcccatttacagagccaagtgcggaagtagacgtgacatgtttcaaatgtggtggaaaaggatgtcgtatgtgtaaaggaagcggatggatcgagatcttaggatgtggaatggttcacccacacgtgcttgaaatgtgcggaatcgacccagaagtatattcaggatttgcatttggaatcggtttagagcgtgttgcattattaaaatacgagatcgacgatatgcgtctgttatacgaaaacgataagagattcttatcacagttctaagagaaacgataagaatatttcgaatagagaagatagaataaaggagaataaaagtaatggatacaccaatttcatggatcaaagcttatgtgcctgatcttgattgcacaccacaggaatatgcagataaaatgacattatctggttccaacatggaaagtgtcacatatttagataaaaacttagaaaagatcgtagtcggaaagatcgagaagatcgaaaaacatccagacgcagacaaactgatcatctgtcaggtgaatgttggagatgaaacagttcagatcgtaacaggagcaccaaacgtatcagaaggagacttagtaccagttgtcttagacggtggacgagttgccggaggacatgacggtggaaagaacccagaagacggaattaagatcaaaaaaggaaaacttcgtggagtagaatcttttggtatgatgtgttctattgaagaacttggaagttccagagacatgtacccagaagcaccggaatatggaatctacattttcaataaagacgtaaaaccaggagatgatgcagttgaagctttaggacttcgcgatgcagttgtcgaattcgagatcacatcaaaccgtgtagactgtttcagcatgatcggtatggcaagagaagcagccgctacatttaagaaagacttcttcccaccagttgtcacaaagactggaaatgatgaagatgtcaatgattatatcaaagtaagagtcgaagacgaggatctttgcccaagatacacagcaagagttgtaaaaaatatcaaattagcaccatcaccagaatggatgcagagaagattagctgcgatgggaatccgtccgatcaataacctggttgacatcacaaactacgtgatggaagaattcggacagccaatgcacgcatacgatcttgatacgatcgcaaacaaagagatcgtcgtacgccgtgcaaaagcgggagataaattcactacattagatggtgaagaaagaacaatggatgaaaatgtcttaatgatctgtgatggagaaaaagaaataggcatcgcaggtatcatgggtggagaaaactccatggtaacagacgatatcaagacattattatttgaagcagcatgctttgatggaacaaatatccgactttcttctaagagaatcggtttaagaaccgatgcatctggtaaattcgaaaaaggattagacccagaaaatgcaatggcagcgatggatcgtgcatgccagctgatcgaagaattaggagcaggagaagttgttggaggagccgttgatgtttatccaaatccagtcaaacagattcgccttccattagaagtagacaagatgaatgcccttcttggaacaaatgtatccaaagaagaagtcttagaatatttcggaagaatcgaccttggatatgatgaagcaacaaatgaagtcatcgtaccatccttccgtcaggatcttcaccgtatggcagaccttgcagaagaagttgcaagattttacggatatgataacatcccagttacattaccaaacggagaatccacagccggtaagaaaccattcaagatccgtgttgaagatgtctgcagaaatgtagcagaacagaacggattctgtggtggaatgacatattccttcgaaagtccaaaagtattcgataaattattattagctgaagatgcaaaagaacgtcaggcaatcgagatttcaaacccattaggagaagacttcagtatcatgagaacagtttccttaaacggaatgttaacatctctgtctacaaacttagcacacagaaataaaaatgtaagattatatgaatttggaaatatctacattccaaaatcattaccattaacagaattaccagatgaaagaatgcagatgacacttggaatgtatggagaatgtgatttcttcacattaaaaggtgttgtagaagatatgcttgattccttaggattaggtggaagatctgaatatgcaccaacaggtgaacatccatttttacacccaggaagagcagcagatgtgacgatcaatggagaaaaaatcgcctacatcggacagattcatccagaagttatggataactataacatgaaaggtgaagtctatgtagcggtcattgacatgccaacattagtaccaaaagcaacattcgaccgcaaatacgaaggagtagccaaattcccagcaatgaaacgtgacttaagtatggttatgaagaaagacatcttcgttggacagcttgagaagatcttcaaagataaaggtggaaaacttctcgaatcctacgaattattcgatgtctacgaaggagatcagatcgaaaaaggatataaatccgtagcatactccttaacattcagagcaaaagaccgtacattagaagacgcagaagtatctaagatcgttgagaagattcttgatgaactgaagaaattaggcgttgaattacgtgcttaattgtgatcgaaaacaaaataaagtgagaattaaaatcctctggcagataatagtgtcaggggattttttgttcaccagaaagaagtttatattccaaaggaaactttttctaaaaaattattgtttttcaataatttttatgctacaataatcttgaaattatcgaaaaacaataattggaggtagataggatgaaatcaaacataaataaactaatcctgatcgaagtcatcgcaggaatcctttttgcatttatagcaagcaaaatcctacatatgacagcagcactacagatcatgtacttaccatttgaactcataggaaaagggctaagatttctatccctaagttcagcaataggaaatgtcatcgcgatcatcatatacgcagtcatttcaatgataccagcaatctatatcatctatcagagaaaaagaggaagaacacagaaagaagacatattacttgttgcattcacagggctattattttattccatgtatatgttcatcaatccaggactcatgtatcagaaaatgccagacattttttcaatggaccagaatagtctgattgtaatgaaaattatttacgcattcatcatttacagcgtcctgattatgtggttgatcatgaaagcaatccgttttcttggagatgacagccagaagaattggaaaagccgcttatattttgggatgaaaggactcattgctgcgctagtcagttattatacgcttttgatcacatatgcaaagacattcgaactgcttcataagagcgaaaataaactgcaaaatgtatcttcaatagaatggcttaaatcagtattacagttattaccaatcattatgacaatcctgctatttatcaacatcattcatgtagtaaaagcaatcgaagatcataaggaagagcagcagatgatgacagtggcaagactcgcaagtgttgcaaaggttaccgcagtggttacagtcatatcagattttatcctgaatttttatcagtttttattaggagcaaccttacagaatgtaaatgttacatttgcaccagatgtatccatggaaccattgatcatagcatttggagcattgatcttctatgaatacttcaagcggaccaaacaactaaaagaagaaaatgaccagtttatatagaaggaatgatagttatggcaattaaaatacatttggatgacatcttaaaagagcgaaatatgacatccaaagaattatgtaaaaaagtccatattacagaagcaaacctgtcaatcttaagaagcggcaaggcaaaaggagtgcgtttctcaacgatcaataagatctgctattatcttgagtgcgatgttggagatatcttgaaatttgacgggagattggaggaagaagatgagtaggggaatcagaaaaacaggaatatttatagcggttatgcttacggtagtagtcttaacaggatgccagattgcaaagaaggacgaaagtggacaggcgaaggaagaattatatggagcttatgcagttgtaggggacaggataccagacggtaagatagctggagtgaaagataagaaaggatttgtgcattttaagaaaataaaaggatattttctatataaatatatgccagaaaaagatactgtcagtatggatggagatccacagttgacacattttaatttcgtatcaaacgttgatggacaaatggatgataaaaataatatcacatcgaaggaaaaagaacaaaaagtaaaggcaacaatgtatgttcaagaaacaaaaggcatagtaacaacaagtctgggaatgatttgtaaaagatcagatggaacagtttatttaaagaatgcagatggatttatgggatgtgcatcagtgcaggattttggaaaaggtcagtcaatgacactaaacttttcatcggatgtgggagataaaaaaatcagttatgaagtggaatttaaagcagaccatgcagtaagaaagattcagattatcgaaatgaacaaagatgatgtcaagatcaaaaaaacagcctatatttcacctaaaataaaacaataccagatgcaaaaagatacagcatatgttattataaatgaacagctgatcggtatgaaaggtcaaacgatcaacagacagaagatacattcagcaaagaagaatttcacatataaatggaagcagcttggagatgatggagtattgacaccgacagacttgaagtttaaaaagtaaaatcaggaggataaaattgaaagatgaaagataaaagagaatcatttaacagcaggtggggatttatcctcgcctgcattggttcggcagttggcatgggaaatatatggatgtttccgacaagggtatctttgtatgggggaggttcttttttgatcccgtattttatctttgtcgttgtgatcgcatctactggtgtgatcggagagatgagttttggacgtgcggcaaggtctggaccgattgatgcatttgggatggtctgtgagaagaaaggaaagagaaaagttggggaagggttaggaatgatcccagttcttggttctcttgcgatggcgatcggatatacagttgtgatggggtggatcttaaaatatgctgttggaactttcacaggggcaacacttgcaccaaagacgatcgaagaatttggcggacgttttggaacaatggcatctgcatttggaaataacatctggcagattttagctttgatcttatgcatgtgtattttaatctttggtgtaggagcagggatcgagaaagccaataagattttaatgccaattttctttacactgtttgtgatccttggaatctacgtggcattccaaccaggggcagcagcgggatatcaatatattttcagagtcgataaggcggccatcttagatccaaagacatggatctttgcactaggacaggccttcttttccttatccgtcgcaggaaatggaacattgatctatggatcgtatttatccgatgaagaagacatcccatcatctgcggcaagagttgcattttttgatacggttgctgcgatgcttgcagcactcgtgatcatcccagctatggcaacaactggagcaacactggatcaaggaggaccggggctgttatttatctatcttccaaacctgatcagctccatgccaggaagtacgatcatcgcgatcatctttttcgttgcagtgctttttgcgggaatgacatcactgatcaatctctacgaagcaccgatcgcaaccgtacaggaaaagcttcacgtaggaagaaagaccgcctgcgtgattatcgcagtgattggcgtgatcgtctccttattgatccagggcatcgtatctgactggatggatatcctatctatttacatctgcccactaggagcaggactcgcaggaatcatgttcttctggatcgccggaaagaaatatgtagaaacacaggtaaacaaaggaagagaaacaaaatttacaaagatgtattatccaatctgcaaatatatttatgtaccaatttgtattttggtattggtgcttgggattgcgttaggcggaattgggtgaggaatgaagaatcgtagttaaggtatatcttggctgcgattttttcttatatgaaagtaaacaaattaagttccaagaaatcatacgaaattgcaaggaaaggatatttacatttaagaagatttttgttatgatataactatcaaagtagaagtattattgaatgcgatatgactataaatatagaataaataacaaagataaaggggatttagctatggaattaaaagaattaacaagtgcagaacaggttgtgatgaaatgtatctgggattatggaaaggatatgccattacagcagttgattgaaaatctaaagcaagattacggaaaagattataaaagaacaacgatccgtacatttgtccttcatttagaagagaaaggatatgtgacaacatatcagattgggaaatattcttatattaattatctgatcgaagagcaggattataaagaacaggaattggaaaagacaaagaatttctggtacaaagaatctggatttgatctggtgaagacattatataaaggaaaattaaatgaggggaaactaaagaaactcaaaaagttgttagaagaaatcgatgattgacaggagaagatatgatagacataagagagatattggttaggatatttagtgcgatatttttatccatgtgcactggaagctgtatgtttgttttctggatggcactaagaaagttttttgcagataagattcgtccaaaagtctatgatttgatattaaagatcattctaattgcttactatgttccggcaggatatctgttggtaaatattttttttgataatgggtatgtatttgattttacaggtactatcatcaaggctttttatgctatatcgttgttctggctggctggagcaattgcaacagttctgaagtttggagaacgaacttttcgaattagaagagaaaaagaaagatgctttccatgcaagatgtatgtgcaaaagatctttgaagattgtaaaagagagcttggaattcgcagatcaatagaagtattacaaggatatcgcattcagattccaatgacagcaggaatattaaaaccatgtgtgtttttacctgtggaagatatggaagaagaacaattaaaaacgtgtatttaccatgaactcacacattataagaagcacgatatattttggaattatatagcatgtctgatggtatgtattcactggtattgcccatggatcagaactgtatttcgtaagaacgatgaatggagcgaggtgatctgtgatctatcagcgattggttatgtaggatcagcgaagcgttattttacaacgatttttgagatgagtcagaaaagtcagggaatcaaagcatatcgggcagcatgtctgtttgaaagccgagatagtttagaacaaagaatctactatgcaatgatgtatcgaaaacaaaagaagataaaatatgctgcggtgattgcaatgaccgtgatattttgtggaatgagtgtaaccagtattttggctgcaagtaagggatatcaaaaggcgtatacaaaatgggtacaagaaacggaagtagaaatagaagaaccagatgatgaggaagaggagagaatatcgtatgaagaaaaaacgggagttttgggaaatgataagagtgaaacgataaagaagataaattttaaaaagatggatgcgatgacattggagacttatgtaaaggcaggaaaaaggcttcgatataaaggattaactccgaaacgaaatgaaaatatagaaatttttataacaagtcaaaaaaattttaaggggataaaagttgggattattgattcacagaataggattagatacatacaggacagagggagagatttagttgaacatagatttaagatagaaaaagaggggaaatatgatgtgtttattgaaatggaggataagaaagatgtaaaaattgttggaatgattaatattgatgatgattaaagagatggaggaataggaggagaaaacgatgataaaatatataaaaataatggtaacagtatttacacttttaattagttgttcagtgacaaatatatttgcaagtgatacgaatgatgttatagaagaaaagatagatatatcagaaaatattattgatgaagttggagaggaagactttgaactgttgtctaattcgataacagttaattggacagtgaaaaatggagttagaaagaaaactaaagaattttataaaaagaaaggaagtagtatcaatattaggttacagatagctccaaaaacaaaaagtgtcaaagtaggatatttagatgcagataaagtaaaacattataaaactgttaaagcagaaatcaatcacaattttataatacaaaaaacaggatatatagaggtgtttgttgaaaatagtagtggaaaaactgtaacggcaagtggaacttatactaagtaatattttatttataaatgtattttataagaggtgatgcaatatgaacaattaaaaaatccatgtaatacgaatggctgccacctacctatctgtaatatatacagatagctgtatcacatggatacaataatgatagcagaaaatgagggaaaataaaagaatgaaaggaaaaagtttatgaaattaaaacaatttgtatgtaaagcagcaagtattgcaatgtgtgctatgattattggaacaactgtagtttcagtgaatgttaaggcagatacgaaagcaacagaaagtacagtagcactagatacacatgatgacgatggtgttgcgggtattttggaacaagatgattttgatacactagaagaatatcagaaatatttagagacacacccaaaagtacagacacggcaaagtcgtgtatcagcgaataaaaatgtaaaagcagcagctactttaagatataaaattaaaggattaacaaatacagctgcaattcaaaaaacatatattggatctacatatatttatgtgattcagagaattggctcagactcacgtttatcaagatgtttgattaatgggtcaacagctacatatcaagatcatatgacattaaaaaactttggtcatggacagactttggaatggtttgaacataattctaaagcatatttctgggttacatgtaaagcaaatgaagcgtataaatttaaatggggaactcaaattggaagaatacaatataaagctaaaggaagtgtagattatacagaaatcccaagattttctcatatgagttatgcaaataaaagtgggacatcgattggagaagtgaaacgtgtagatgcagcattgtctagtgataggaaaaaagtatttttctgggtaatggataatacaggagaaattcaatatagtttttataatgcggaaaaattaaatgctgaattggataaaaaagaatctgaagaatctaaatttgttccatgtacatcaagtgcagtaaaatcagcttgttatggatcgtttagacaatctggaagtaatcgtgtattaccgaatgattcatgtcagggattagaattttctgatggagattctatttatattattggaggtgctgccggacaaaaaccgggaatagcaaagttaacaggaagtggatcaagttataaatattcttgccttgttacagctacacataataattttggaggtaatgcggaatctgaaggaattcaattaaagggagattacgtatatttcgggattagtgataaacaaagtagcgataaagcctgtatttattctattccaaaaagtgcgttttaatttaagtctggctatgttaaaatatataatataaacattaataaattaaaattataaggaggtagcaagatggtaagaaaacgtatggtatcaacagtcatgagcttaatgatggcagcagcagtactgacgacagttccagtgactaacaatgtaaaggcagcagataaagagataacaagtggggattatacttatgtgaaagaaagcaatggaaagacttcctatgcagtgcttacaagctatagaggaagtgagacaaatcttgtcattccagaagaactggatggattacaggtaaaagcaatttcacagggatttgaaaaaaatctgaaaataaaaagtattatattatcaaaaaatattgcaccagcaaaagaaacacacagagatttggaagtgctaaatgaaattgaaacattggaagagattcgtgtagcaaaagataatctgtcttatcaggcacaagatggagttttatatagcaaagataagaaacaattgtttagctatccaaaatctaaaaagtccgaaacatataacatgcctgcttctgtaaaaaaagtagaagaattcaatgccctaataaatcttaaatatttaaagaatcttacattatcaaagaatttatcagtaacaccaagctgtaatgacagtagtattgaatctgtaacaattccgggccagataggcggtattgatgaaagcagttttgaaaattgcaacaaattaaataaagttacaattacaaaaggtctgagatttattaatgattatgcattttttgaatgtaaagcattaaaagaaatcaaactgccagaaggacttcaaagtattggagtaggagtattttatagaacaggaattaaacagctgacaatccctggatctgttgtaaaaattgatgtaattgacaagagtataaaattaagtaaaccatcttatttgaagaaattcaaaagagactcaggtgctatttattacgaagcaagagccacaatcaaagcatctggcaaaaaagctgtcacatacaaagcatccagaattacaaagattaaagcaaaaacaagcaaagtaacgatccaaaaaggaaagacaacaaaactacagactagagtatacatttccaagaaactgaaaaaaggatacttagatccagagatcttaaaattcacaacatccaataaaaaagtagtgaaagtatcctcaaaaggaacgatcaaaggcttgaagaaaggaaaagcaacggtcacagtaaaacttcgtacaacaggaaagacatataaagtgaacgtgaaagtaaaataggaaacaataaagtaaagatacatggtagaacaggacattccagcgaaagcagggatgtcctgtgttttcttatgcagcatttccttgttatttgcaatatcaaatggtagaattaggaatattcaaagtgaatcaatctgtaatatggaatggaaaacaaaccgatacaacaaaggagaaacgaaacaatcatgccaggatacattttacatttaactgctgcccagatgtttctaaagacacaaaaaggacagaaatttttaaagacaaaacaagataaaaataattttctgatcggaaatcttctgccagatacaacaaagatcaaagcaagatcccatttcagagatccaaaatatcacgatcgcatgatagaatacccggaaacaagctggtttatcaagaaatataagcatcttctatcaaacagcagtgtggtcggatatctctttcatctctacatcgatcgaagatttttcaaatactatatgccaaggatcgtagagtttcgaaatgcacaagatgagagagaagaaagaagagatatggtaaaagatgtcttattaaaacggacaggacaaagattatcaaagcaggattttttctcagagaaatactactatggggactacacaaagatgaatatgtaccttgtaaatcgttatcagattccgacaacacttgatcccaatatatcaaatcctgggatcaaagaagttgattatgaggatgtaaagcaggtgttaaaagaattaaaaacatatatgaaagtaccaaaagatgcagtaaagaacgtgagagtttttgacgtggaagatcttcttttctttttggaaaacgcagtaggtgtatttaaaatctaagtttggataacatacaaatacaggaaattttttcattatataacaaaaaagttgcaaatattacaaaaatatgacataataccatagaaataactttaaggaggacaacatgatgaaaactgtaaaggaaattgtaaagagggaacgtcaaaagagaagaagacgtgtggggattatgatcgtattgatcgctttatgtgcaacagcaattttctttggaaccaaagcttatcacaattacaaggaagaggaattcttcaagagtgtgaaagaaaaagaaatcaaagtaactccaaaaagcataacgcacaaacagacagatatctttacacaaagttatcaaaaagaaacggatgatcagttgaaagcattaaagaaagacaaaaattatactttcaataagcccttgatcgtttggaatgcatatggaacatacacaacatctttgtactattatgcaaaaaatgatcgtgcatcttatgcagtatgtattgtagaagccagcgaagcaggtgcgagtccatacaaacgtacattgaaatctgtatctggaaagaaatatgtgacaacacatgaatatcagatcaaaggacttgttccaggagcgaagaataagatcacaatgcaattctttaatgaagatggaagagctgtcgggaaaacacatttctacgtgacagcaccgaaagatgatgtcattcctgcaattcttaagaagaatacagggacaagcaaagcaaagatgagcgatggcctgttttgcctgtttggacatgataaagcggatgtgtcaaacatctatctgtatgataataatggagtgagcaggggaagaatgcctttaaacaaatatcgcacagaccgttttttatttatcaaaggacagctggtatattcttatgactataataaaattgcatttacgaattgtataggaaaagtgacaaggaccattgatattgggaattatcaatttcatcacgatttccgttatgacaagaaacacgataagatcatttgtctggtaaataatctggacaaagatacgattgaagatacgatcgtacaggtggatataaagacaggaaagacaagtatgctctttgactgtgaaaaaattctgccgttaatgagaaaactggcgatccagagaaaaggcggtagaaatacctatggaggaactgaactagactggatacacattaattcttttgattttcttgatgatggtaatagtttggtcttaagtagcagagaacaaagttcaatccttaagattaaaaatatttacacaaaaccagaattagactatgtgatccatcgtggaacaatctataatggaacagatattgccaaatatcagttaaagcgagaaggagacttcgttgcaaatgcaggacagcatatgatcactgtagaatatgacgattcccttccagaaggacaatattatttatatatgtttaataacaactatggaaaggcaacatctattccaacttttgactggagtatgtatccgaatgtgggaaactttaaaagtggaacttcttattactcaaaatttcttgtagatgagaagacaaggacttataaacttgcacagcaatttagtttgccttattcggcaatcgtaagcagtgtgcagcatttaggggggaatattccgtttagtagtggaatgagtaagacatttggagagtatgataaagatggaaaactgatcaagtcctttgaatatgaagcagataaatattcatatcgcgtgatgaagtatgaattttaagttgtaagttggccaactatagtctttcagtatatgataaaaattaaataagcaaccgaaaacgcagcggtggaattttgctcacattttgaacaaatcgcttatccgcccaatttcctacgagaactcgctctgaagttttgttttagacaaaagtctttgaagctcagacactcgtccaattgggctgcgaatttgttcaaaatatggcaaaattccaatgctgcgttttcggttgcttatttaatttttatcatatacctgaagtctggagtgtggacaattacaagattggacaatttaagtgagtgtgtatgttgaatgttatcggttctgtcggagtataagtatcaagaaaaaacaatcctcgacataatattacaaaaatagactaaatattacaaaaatattacaaaataataatcgaaagtattgacatactacatataagtgctataatacacacatactcgagttaacaaaattgtaacatttacaggagggacattatgataacgaggaaaatgagactgtcgatggcgatgcttacgattgccgcgagtgtgttgacgacaggaaatataaaagcagatgagaaagatacaacaaatgaaacaaatacagcaacggaaagtaaatatgcgagtaaagcagttgcagatatttattctacaacaacattaaatatccgaaaaaagggtagtataaatgtaaagatcgtaggaaaaatgaaaaaaggtaatattgcaactgtgctgaagaaaggatctgaatggtcaaaagtaagatcaggaaatgttacaggatatgtaaaaaatcagtatcttgtatttggcgatgagattgaaaactttgcgaaacaaaatgtgaaaaaggtggcgaaagttcagacggaaacattaagagttcgtaagaaagcatctacggattcaaagattgttacattggtatctgaagatgataaattaaaagtgaagaaacagaccaatgactgggcaaaagtcaaggttgatggccagacaggatatgtgtcaaaagattatgcaaaagtaacatactcttttggaaaagcgaaatccatgaagcagattcaggcagagcaagaagcgaaagaggcgaagaaaagagcagaagaagcagccagaagtaagtctgaaaatgaatcagtatccacaacatcaagcggtcatacttctgatgatggaacaacatctggaagtacaacaggttccacacagacaacaaagaaagcttccgtatccgtatcatctagtggctcatcagcaacaggaagcaggatcgcaagttatgcgcagcagtttgttggaaatccataccgatatggtggaaacagtttaaccaacggaattgattgttctggatttacgcagcagattatggcgaagtttggatacagtatcagtcgtacgagcagttcccagtctggtgatggaagagcagtatctacgagcaatttaagagccggtgatctggtattctatggagatggtggaagcattgatcatgtggcactttatatcggcggtggtcaggtagtacatgcaagtaattccgcaccatatccgcgaggaggaattaagatttcaaacgtaaattatagaacaccaatctgtgcaagacgtatcataggatagctagaaaaattaccaatacagtatttatataggaagagcgtaaaaggaagattcatgcagaatcattcttgtgcgctcttccttttttgatataccagacatgaaaataaaaaattatatttcctatattgacagaagaacatcatgtttatagaatgtaaaaaggtatattttggttaggaaaataaagatagaaaagagatgtaaaaagaaaaagatgaaacaaagacgatttacaaacaaaaagctgatcgccctcatgttaccactggcagttgatcagcttttaaattcgtttatgggtacggtagatacccttgtagtcagcaatttaggatcagcagcgatttctgctgtcagtctggtagattccattaatattctggtagttcaggcattttttgcactggcttcaggtggtacggttgtttgctctcattatcttggatgtgagaagaaagagagagcaacgaatgcagccaggcagttagtgtttattacattcgcaatgtcactggtcattgcaatcgcgtgtcatttattcagcaaccagcttcttggagtgatctttggacaggtggaaccagcggttatggacaatgcgaagaagtacttcttcttttcggccatgtcttatccatttatcgcattgtacgatgacggagcctgcattttaagagcacaggagaacagcaaacttccgatgcagatttcttttgttgcaaatggcattaatgttgcattgaatctgatatttgtatgggtattgcatttgggtgtagcaggttcttctgcagcgacgatgatcgccagagcatttgcaatggttgcggtgctttataaattgagaaatccgaagatgaagatacagcttagagactatttttcgattcgtccagaatgggaagagatcaaacgaatcttacatatcggagttccatcaggaattgaaaatggaatgttccaatttggaaagcttgcgatccagtcaacggtatctttgatgggaacggcggcgatcgcggcacagggaatgaccaatatcatcgagaatttgaatggtatcatgtcgatcggaatgggaatcggattgatgacagtcgttggagaatgtcttggagcaggagaaaaagaagaagcagtctattatataaagaagatttccattgcagcagaagttgtattgatcgctacatgtcttttgatgtttgggcttacttatccgatcacatattttggaggcatggaaccagagagtgcaaaactttgtatattcatggtaacatgtatcacgatcgtaaaaccgatcgtgtggatcatggcatttattccaccatatggattcagggcagcaggagatgttagatttacaatgacgacctccatgctgtgcatgtggctttgcagagttgtgcttgctatggtacttgcgagagtttttcatatgggaccgatcgcagtgtggatcggaatgtttacagactggacgatccgtggaattatttatacaatacgatttaaaaatagaaaatggcttgctcatcaggtgatctgatgttcgttgcggatgatgacggttcgtgttatactgaaatgtatttgaatgatcaagaaataatatagaagggatacaaataaaatgaaagtatcagattttacatttgatttaccagaagaattgatcgctcaggatccacttgaggacagatcaagttccagattattaacattagataaaaatacaggagagatcggacatgatgtcttccataatattgtaaattatttaaaaccgggagactgtcttgtgttgaataacacaaaagtaattcctgcaagactgatcggagccaaagaagagactggcggtaaagttgaagttttacttctcaagagaaaacaggacaatgtatgggaaactcttgtaaagccagggaaaaaagcacgtccgggagcaaggatttcttttggagatggaaaattagttggagaagtcattgatgttgttgatgaaggaaatcgtttggtgaagtttgaatatgaaggcatttttgaggaagtgttagatgaacttggacagatgccattaccaccatatatcacacatcaattaaaagacaagaatcgttatcagacagtttacgcaaaatacgatggttcagctgcagcaccaactgctggacttcattttacaaaggaattattacaacagatcaaagacatgggagttaatatcgcatatgtaacacttcatgttggacttggaacattccgtccagtaaaagttgatgatgttttagagcatcatatgcattctgaattttatagaattgaagaggaagatgcagaacttatcaatgagacaaagaagaacggtggaagagttatttctgttggaacaacaagtacaagaactttggaatctgttgcagaagaagatggaactctgcatgcaaagagcggatggacagatatcttcatttatccaggatacaaatttaaagtgatcgatggactgatcacaaacttccatctgccagaatctacattattaatgttagtttctgcactcgcaggaagagaacatattttaaatgcttataatatcgcagtaaaagaaagatacagattcttctctttcggggatgcgatgttcattcatccataagaagaattcacgataaaaggatatcttagaaaggaggtacaatggtaaatttgatcgaaataggaaaaagtggaataaaagtaccattcttaggaatgggaacatgggcgatcggtggtggaagctggtggggagacaatgatgacgaactctctgtcaaaacgattcaaagggcgatcgatcttggaatcaaatggatcgatacagcgccaatttatggattatatcacagtgaagatgtggtgggaaaagcaatcaaaggaaaaagagagcagattatattatccacaaagtgtgcactggagtggagacatgaaacatcagtctttcataaagaagtcgatggaacgaaagtctatcgtgacctttcaaagaaaagtatcattgaggatttagatcatagtcttttaacacttggaacagactatattgatgtgttgtatacacactggcagacaacagataagaaactttatccgatcgaagagacaatggatgcattgatgacacttaaaaaacagggcaagatcagagctattggtgcgtcaaatgttacagaagaagatatcagggaatattgtcaatatggccagcttgatgtgatccaggaaaaatacagtattgtgacaagaaaagtggagaaagaattgttgccagtatgcaaggaacttggtgtgttaatacaggcgtattctccattggaacaaggtctgcttacaggtaagtttacaatggatacaacatttccaaatggagatgtaagaaataataatccatcttttcagccagagacaagaaaaaagatattggatatcttaaagaactggaaaaaatacctcgaaaaatatgagtgctcatacagtaatctagtaatcgcattgacttctcagatgatggatggtctacatattcttggtggagcaaggaaaccagagcaaattgaagacaataccaaggcattgggcgtatgtttggaagaggcagatattgttcaaatgaaaaaagatatagaaacattattataagatatgaaatggaggaaaccttatgaagcttgcacttattggaacaggaaagattgttgaagatgcattgtttgcaatggaaccagtagaatcaattgagagaacagcgatttttgcgagaccacatagcagagataaggcagaaaaatttgcaaaacagtatgcgatcaaagaagtttacacagactatgaagaattactcgaaaagacagaagcagatactgtttacataggactgatcaacagtgctcattatccatatgcaaaacaggcattattggcaggaaagaatgtcatcctcgagaagccatttactggattttatgaagaaacaaaggatttagagcagattgcaaatgacaagaaattatttatctttgaagcgatcacagtacttcacaacgaagtgttttatgagatgaaaaagaacctgaataaactgggaaatatccgtatggcactttgtaattattctcagtactccagccgttacgatgcatatttagaaggagatatcacacattcttttgatcctgcatattatggaggttcattatatgatatcaacgtctataatattcattattgtgtaggattatttggagaaccaaaggatgcgacatattatccaaatatcggaccaaatggaattgatacatcaggaacacttgtgatggaatatgatggatttagtgcggtttgtacaggaagtaaagattcagacagtccaggatacgtctgtgttcagggtgaaaaaggttttatgaaagtagattctaaaccaaacattgcttctgaattaaagacggtttatgcagatgaaaatatcaaagaaaaagtaaaagatgcagcaggagcgatggttcgtgcaacgatcacagaagattataaggctccagagcatcaccaccgtatgacacaggaatttacagattttgcaagagtcattgatgaaaaagattatgagacggcaaaagaatttttggatgagacagttgcggttgtgaaagtacttgagacagcacgaaagaaagctggaattgaattttagaattatatgatgtaagtgtcaataagtataaattgcgtttgtgcttgcacaaataagcaatttatacttattgacacgccgaacaacgagaacggaataaaatggtgtgaacacaccattttatggaggatttgtttatgagtaaatattattctatcaataaattttcaaaaatattaggtgtatcggct

SEQ ID NO: 810 - DNA, 154 bp, Unknown
  gut microbiota DNA sequence
agggtgggtaatgggattcgaacccacggcctccagagccacaatctggcgcgctaaccagctgcgctatacccaccatatataaaaaacgagcctgaagggattcgaacccccgacccacggcttagaaggccgttgctctatccaactgagc

SEQ ID NO: 811 - DNA, 255 bp, Unknown
  gut microbiota DNA sequence
gatagtatttgtcatcaggaagtcctgcatagtttacatgagatactttctcatgggcattcaggaattcagcaatcttctgtgcattatagcagtgacgttccacgcggagaggaagagtttcaagtcccaagtttaacaggaagcagtttgtaggagacgggatagagcccaggtcacgcatcaactgagaggttgcctttgtgatataagccttctttccaaactgtttagtataaataacaccatgataag

SEQ ID NO: 812 - DNA, 174 bp, Unknown
  gut microbiota DNA sequence
gtattagatatgatgggatcaactggtggatcacagtaggcattgaatacgaagactctgttaccgttccatccaatgatgggatagggatcgatttagggattaaagatttagcgatatgttctgatggcaataaatataagaacatcaataaaacgaaaaaagttaagaaac

SEQ ID NO: 813 - DNA, 710 bp, Unknown
  gut microbiota DNA sequence
aagtacggtaacgtatggagctgactgttactaatcggtcgaggctttaaccaaagaaggctgaagtgtaggagatgtagaaagattcttgtatgttgttttgaaggtatatgatataataagaatagaccttataataatcctcgatagctcagttggtagagcacacggctgttaaccgtgctgtcgctggttcgagcccggctcggggagttaaatactgaataaagtattaagaccgtgaagcggtcgaacaatcaggctccatggtcaagtggttaagacaccgccctttcacggcggtaacacgggttcaaatcccgttggagtcattacgattcataaatgagtgatatcgtctaatatgccgttgtggctcaattggcagagcagctgatttgtaatcagcaggttaccggttcaagtccggtcaacggctttaaacggacctttagctcagttggttagagcaatcggctcataaccgatcggtccggggttcgagtccccgagggtccatttaaactaaataatttacattctggcccggtggctcagctggttagagcgccgccctgtcacggcggaggtcgtgggttcgattcccatccgggtcgctagattgtgtttaaaccaatcgtttgggatcatagctcagctgggagagcatctgccttacaagcagagggtcataggttcgagtcctattg

SEQ ID NO: 814 - DNA, 1192 bp, Unknown
  gut microbiota DNA sequence
atatgccagataattaaggtatgtatatgccgcagtggcggaactggcagacgcgcaggacttaaaatcctgttcgagttaaatcgagtaccggttcgattccggtctgcggcatttagatgtgaataacatctgaattgtcaaatatgacaattgaatatgtgggcgtagctcagctggatagagcgtctggctacggaccagaaggccgggagttcgaatcttctcgcccacgctgaagagatctgatttatcaggtctctttttgtatgtaaaaaaagaacacaatgatacaaattttacaattatttcatttgttaattataaaattcaaaacaatacactatttcctttacatttgtgtcgttatatggtaaaattcttcaagtatgtaacagaagtgtaacaattgaaagggttatcaatgaaatcacgattaaagaaaataacaattttctcattagtctttttatttatatttggtacagcaatcacaacaacaccaaaacagcaggttaaggctgatgatggatataatggaaaaatcttcagacactggtgcaaattaagatccagcagatcaaaaagatcaaaagttttaaagagattagagattggaacacctgtcacagtctattcaacaagtggacagtggagaaaggtttctgtagacggtaaggcaggatatgtcttaaagaaatatgtttatattaacacagatgctcctacattagaaggaacaacatatgacaaaggacagacagtagcacaatttgcacagcgttttgttggaaactcctacgtatggggtggaacagacctaaacagaggagctgactgttcaggatttattggatcagtttacagatcatttggatataatcttccaagaacttcttctgaattaagaagagcaggaagaaaagtttcttataatgagaaacagccaggagatatcatctgttataatggacatgtagcgatgtatattggaaatggaaagatcgtacatgcaagtaacagaaaaacaggaatcaaaatttcgccaagagcaaactaccgtagaattgtttgtgtaagacgagtagtggaataattacataaagaattggaagaacctttacatgatcagattagattatgtaggggttctttttttcgatttataggaaattcccctatgaattgtaat

SEQ ID NO: 815 - DNA, 381 bp, Unknown
  gut microbiota DNA sequence
atcataggtgatcatttttaacattttatcaatcaattctaatggctttggtgtatcaaatgttttttctcccatcaatgtctttagccttgatgttgctgatgatgttaatcctgcgtcatcccaccatgtagtggcagtacgtcgtgtactacttgcagatgatttaaaatatttctgatataaactattccccttttttacaattaatccattatcatatttttcttgcattgttgtttttgaaaatctccaatatccttctacacctaaaaaagtataaaaaggattccccttttttgccccaccaggtccatcaactggcactaaacgataatctcctcttccatcattatcatttaaattaaatccttctaatac

SEQ ID NO: 816 - DNA, 815 bp, Unknown
  gut microbiota DNA sequence
ataagagcactggtcaggaaaatgtatcagccccttaataaggtagtatctaatatggattatgttgcaacaggttccctgagaacaagaatcaatgttgacaatatgggtgaagatttcacaaagcttgcaattggttttaactctatgatggatgaaatcgaggtgttgatggaacaggtaaaactggaacagcatcagctggagcagatccgttttaatgcccttcagtcgcagattcagccgcattttctttataatacactggaatgtatccactggcaggcgattgccgaaggaaataaagagatttccacaatggtaaaggcgctggcgaaatattacaggatctgtctcagcaaaggacatgacgtgatcacgatcagagaagaagtagagcatatcaggaattatatgattatccagaacatgagatacgacaacattatcggaagtgagattgttgtagaatctcaggtggaagaaagcctgataccgaagctgactctgcagccactggtggagaattctatttatcatggaatgaaagtaaaagagggaaaaacaggtacactttatcttacagcatataaaaatgaggatgaagttatcataaaggtatcagatacaggcacaggaatgagtcaggaacagatagatgaaatgaatgaacagctctccagatacgaggattcctttggatatggagtgcgaaacgtaaacaagaggattgaacttcttttttgagagggatatggtcttaattatcagaagaatgatttgggtggggtaactgtcgtgatccatctgccata

SEQ ID NO: 817 - DNA, 1871 bp, Unknown
  gut microbiota DNA sequence
agtgtcaccctttattcttataaatatttcttctcttgttctttctgactcatacatgcaacactatcaacaaatcacaattttatcttggtgttaattctacatacatatctttgtactgtcttgcacttgtctcccatgatacatctttattcatatcacggatcaccatatcatcccagcttgctctattttcaaagtagcatgtctttgctctattgatcgtatcatacagaagtccgctttcatatcgatcaaatgtaaagccgttacctgtattatcaaacatgttatatggccaaacagtatctctaagtcctcctgtctctctgacaattggaatcgcaccatatctcatagcaatcaattgtgttagtccgcatggctcgaatcttgatggaactaaaagtgcatcacatccagaatagatattgtgggcaacattttcatcgtaagcaatataggcacaaaaacttcctttatattgattctcgtaagaacggaaagcttcttcataccaggaatcacctgtaccaagaacaactacctgtgtatttccatccataacgcctggaattacgtcattgaccagatcaagtcctttttggttcgtaagacgagaaatcaatccgatcaccatcttgtgttcgtcgacctctaatcctaaagattcctgtagtgctttcttattcttctttttattttcgattgctgtctttgcatcataatttgcttttaacaacttgtctgtagatggattccagatgttgatatcaataccatttacaattcctctgatcttattctggtgatatcttaagtgctctgcaagtccttctccatattcttctgtctgaatctctccagcgtatgtgttacttaccgttgtaagtctattacaataagtgattccaccttttaacatattcgcatccagccagttctgagtcaggcagtctttgttgaatacataatccggaagtcctgaccagtattggatcatttttctgtcgtagataccttggaattttaggttatgtatcgtaagtactgcacttgcacgtcctacatttgtatctgcaaaacatgttcttagataaagtggtaccaacgctgcctgccagtcgtggcagtgtactacatcaggaacccagtccagataattcagtgccgccaatgctgccttggaaaagtaacagaactttggaatatcatcaatcagatttgtatacggattaccccaagagaaaaattcctcattgtcgataaaatcataaattacaccatcttcctgatactccataatacctacatagtattgtcttccatcagaacaaagatccatatagaaagagcctttgtattccatcttttcttggtattcccaaggaatgcatttataccttggaaggattactttcacatctacatttaatttagcaagactctttggaagtgcagacattacatctccaagacctcctgttttcacaaatggatagcattctgagccaataaaaacgacacttcttcttggtccaagatcaggctgttcaataacctgattttcttctactggcgtttctattttgatttcttcttttggttctggttgtgcaacttcctcttttattattgcaggttctgctgttggaataacagtctcttctgtatctgtacttttcactgttgaaacagttgctttttttgccctgctttttgcattatttcttgtcttactttttgttcttgtttttctgctcatatttgcctccaatctgcaacatacatcatgcggtctgcaatgaatttttatgatattcttattataccataaatattttcaaataacaaatgcccaaaacatcgta

SEQ ID NO: 818 - DNA, 582 bp, Unknown
  gut microbiota DNA sequence
tacagataaaacttggttctcgttttacgatctctgatgttatatgatgtaaatgatcatgacggatatttgtcagtctgtgatttaatgttaataaaagtttttcctttttgatcacattcttcgttttacagtattcctttccttgtttattgttctcgtatgaacgagagatgctacgctgtaatctgcgtttttgtttctctagtttcttaacttttttcgttttattgatgttcttatatttattgccatcagaacatatcgctagatctttgatccctaaatcgatccctatcccatcattggacggaaccgtaacacagtcttcgtattcaatgcctactgtgatccaccagttgatcccatcatatttcatacggggattactatatttgcaattcacaggaattcgattcttttccgcaagtctgatccagtttatcttctgcttattcttctttttggaagcagcaaaaccctcaatttttacatgagtatctgaaaattgaatctttacattatcctgataaaaagatggtatagaaaattttcggcttttgaatttaggaaactttgaac

SEQ ID NO: 819 - DNA, 20940 bp, Unknown
  gut microbiota DNA sequence
ctcatgattctgagagcctataaaaatataaagggcagaattctatcttctaccccttatatttttatatcattatttcatatccttactaacaataaagacaatccctattggtattttcacttttcctgttgtaattttatcatcaaaaaataagtctttttcataaagttgaatactatagctttgataaaaaatacatgctttgatatttttcttatatccatttttcacattgacatattgtgaggcagaaataagtactttattttttggatgaatattttcttcaacaactttttttaaaatcctcagatttttattattataatctttatttacttggtattctattgataatttttcacgaaattgcatgccacctttcggtgcctcataccaagatgaataacttggttcttgtagttcctttttttcatctttaactttaatataatattctccaaatccaatatctacaacatttgatttatccgttattcttttatttcctatgatttttttatccaatggaatatatctaatgctttcaacgtttgatacatcttttatatagaaagataataagctattttccatatcttttgattttttatcattcgcaaatacattttctgtctttccacttaatatcaacatacctaataaacatataattacaactacatatttttttatcttgttttcttttatcatgattttttcatatccaatcgtatgttatcaagcagaaaatatctcaaataaattctctgcttgattaaaatccttttattatctattttttataaaccttctaatattttcctcacatctatatcctaaaacacaaaataataatgcttgtattcctcttcctactgcattattaatgtctggagttagaacaataaaaaataaaataagataaccaattcctataattaaatatctattattttttttatttttcaattcatttcacctacctaaaacaaaacaaatacaattaatcttgctcctattccagcaaatgtttttggaattcctactttttgtaatgcatgctgaattgcgtctgtaattgtccctcttccataaccattactcacattgatattatcttcctttaatgaaaaagtcccgaaacccacataaatgcgtggtttcgagacttttaaccgaaagcgatagacggggctcgaacccgcggtctcgaccttggcaaggtcgcgcgttaccaactacgccactatcgcatataatgactgtcccttttcagaacagtcattattttaccttattcacagtttgttgtcaatcattttttactaaaattccgcaacaactgtttttcctgcaactgttttttctccagttttataatctacttttggcagattagaatcttctaagacaacaaccataacatctgggctatatccttctttcttgatcagatcgatatcaaactctaccaacttatctcctgcctttacttcttgtccactcttgacaaaagacttaaatccttttccatctaatttgactgtatcaattccgatatgaattaaaagatttaatccttcttttgtctcgattccaatcgcatgtaaagatggtttcattaatgctgtgatctttccatctgctggtgcaacaacgacacctttttctggttcgattacaacaccatctcccatagcacaagttgcaaatgcctcatcttttgcctgtgtcattgcaagaacttttcctgttgctaccgcaactaatttaccatgtctgatttcttttttctcttcttctttggaggaaactatgggtgttacctcttcttctttggaaggatctgttccatgctgtgcataatattccacatattcttcaaaattactcttgatcacagatacctgtggtccataaataatctgaattcctgttccttttttgatgattcctttggaaccagattgttttaagtactgatctgtcaccttagtttcatctgttactgtgatacgaagtcttgtagcacagcagtcaatatcttcaatatttttaattccaccaagtccttttaagatcataaaggaaattggatcctctggtgcgtctgtatcttcatttgctgcacctttttttgcctggtaatcagcttttgtatataattttacctcttcttcgtcatcatctctacctggtgttggaagatcaaatttctcaatgacaaatttgaacacaaagtaatataatactgcataaactgcaaatactggaaggatcatcatccagttactctttgtctgtccctgtaatacaccgtataacataaagtcgatcaatccacaagagaatgttgttccgatacagatctttaagatatgcattaatgcaaatgacaaacctgctaatccacaatgtaaaataaataatcctggtgcaataaataagaatgtaaattcaatcggttctgtaattcctgtaaggaatgatgttaatgctgctgagaatagtaatcctccaacaatttttcttttttctggttttgcacaacgatacattgcataagctgctccaggaagtcccgccatcatgaaagaatattttcctgtcatgaatctacatgcttctactgcaaaatgttttgtatttgggtctgccagctgtgcaaagaagatattctgtgcaccttctaccatctttccagcaacttccattgttcctccaagagatgtctgccagaatggtaaataaaatacatgatgtaatccgaatggaattaatgctctctctaagaatccaaagattgctgttccaaaatatccagaatgcataaccagattaccaagtgcaaagattccactctgaatcgttggccatacaaagaagcagataatacctacaccgatatgtgcgattacactaataattggcacaaaacgtactcctgagaaaaatgctaatgctgctggtaattgctgtttataaaagcgattatgtaatgctgctgttacaagtcctacgataactccagcaaatactcccatctgaagagaatcaataccacagacactcgtgatctgtccgtttaagacactctttgcatatgttccgtccgctaaaatctttcctgataattttaacatcgcattaattgttgaattcattacaaagaatgaaatacctgcagaaagtactgcgactgctttttcattttttgccattcctaatgctactgctaatgcaaagatcaatggtaaatttccaaagattgtattaccgacctgtgacatgatcgttaaaagcgcattcaggatagttccctctcccatgattccttgtaaatgatacgctgcgatcgtatcagcattagtaaatgaagatcccagtcctagtaagatacctgcaattggtaacacagatactggaagaaaaaatgattttccgatctgttgtactaccgcaaatgctgaacttttctttttctttgccattttaatcctcctttgtgacaaattgatacatggttactgtctgatacacttctcctgcgtcaaatactggtgcatcaaactcttttgtgttaatactgtttgggaaataatgtggttccatgcaaaatccacatccttttccatagatcactccccctttcccttttgttgatttcattgtatttccagtgtaaaactgtaatcctggaagatctgaataaacttccattttaataccctgttcttcgtccaatgcttccgccatttttcggaaaccacaatctttattccgaattacaaaattatgatcatatcctttgcctttttctagttgttcatcttcggcatatagatcattcttgatctttttccattcacgaaaatccatcggtgtatgttctacttttctgatttctcctgttgggatcgtatcttcattgatcggtgtaaattcatctgcataaatccttacttttgtattttcgatcgttccgctttcatgtccacccaagttaaagtaattatgatttgtcagattgatcagcgttttcttatcgctgactgcatgataggaaacgatcaatccatttgtttccgttaccgtataaatgatatttgttaccaatgttcccggaaatccttgttccccatctggacttacataagtaaacttcactgcatgatcatcaatgatctcactatcccataagactttgtgaaatccatgttctttgtcactgtgaatgttatgttttccacgattttttgctacatgatactctttcccatcaatttcgaatctggcatttgagatacggtttacattccgtccgacagttgctccaaacataattccattctcaaaatattcttccaaggtgtcatatccaagggctacatctttgatgtttccctccttgttttttacaaggagagaaacaatatttacaccaaaatcagtaactttgactgcaaatccattttgattttcaatcgtgtatagaaatgcttctcttttatcttctaaaaagccaaaactttcttttgttacacccatatcagcctcctgcttagtgtccatgttccattaagtccataacaacaggatctgtagaatgaactccttttgctttaagttcttcaatcttttctttaaactgtggcagatattttgcatgtgcaactaacagttcatctaaaacttttgttgtattttcattattttctactaatggatttaatacgaaggcttctaatgcttttccgtaatctcctgtcaatgccgcttcaattgtacattcttccattgccttcatcatctgaagccatcctttttctgctgatggaagctttccaaatgccattggctgtgctcctgtcgctgaaatgatacttgatacttccacgatagagtcatcatctaagcatgaaattgctccattgttttgtgtacttactaccatatggatcttcttatttgcataaattgcacgaatacattcgcaagctgcatcactgtaatatgctcctccacgttttccaagttgttctggtttttcatgaagttctgcatttttataaatttcaaacaactcatgttctacctgtttcatttgctctgctctagtaccaccttcattgaattcttcaatcgcatgctcaagcattgcttgtttcatgtagtaatatctgtggtatccacaaggcaccatattcatgctgtgaagtaattccaatggaaattcagcttgatagatattggctggtgttccaccacctttttcattgatatgatcgatcaaaattggtgtcatatcatttccattttcatcaaatactttatgccaatgaaaatggttaattcctgcatatctgtaatttaactggctgatatccttcccaaggagctttggttctgccatcattgcgatcgttggcacgttgcaaagtccgatacattttttccatccaaaatgtttaattacagcttctgttaccattccacttggatttgtaaagttaatcagccatgcatctgggcataattctctcatatcttctatgatctgtccgatcactggaatggttcgaaatgctttaaacattcctcccgctccatttgtttcctgaccaagcattccatacaatgatggaattctttcatctttaattctggcatctaaaaggcctactcgaaattgtgttgtaacaaagtctgcatcttttaatgcttctcttctgtctaatgttgtataaacttttacatcatatggagatgcatcccacattctctgtgccagtgctcctacaatctctactttttcttttccatcttcaatatcgaccagccagatttctttgattggtaaatcttcatatcgtttgataaatccttccatcaattctggtgtgtaactgcttcctccaccgatcgttacgatttttattgcacctttcatcgctctatgcctcctcaaatatctttgtttcctttgttctgttcacatgatacagagctggcttctttcgtacaacggattttcctgattcggatattttttccctaaaaaagtttcagaattacgaaacactctgaaactttttgaaactttatttcaattccacccagtattctttgtttgcttcgatcatttcatctaaaatttcttttgccacatttgcagatggaattgtgcggtttaaagtaaatgcctgcaatgcttttttatatgatccttcgatcactgcttctacgaccaacccttcacaagcatcctgctgttcgatcagtcctttataaaatcttggaatttctccaactcttactggttctggtccgtcttttgtaatatatgcaggaatttcaaccatggcatcatctggaagattcttgactgctccgtcattttttacgatgacaagctgtctgcttctcgtgtcatatgcaagtgcttttaccacttctacaataaattttccatgaactcctacataaaattgtgtcaaatcgattttttctccattttctagtttcttaactgcctcacgaatctttgtttctcttccatgaataacctgcattccccttgtattattaatatccatgtaatctacaatgtcatctccaagaagataatactgccagtatgtatttggcagataatctggaaaatagttgacgatcttctttgcattcgtaaatgtatgtaaccagtctggatctttgaccaaggcatcttcataacttgcctttgatacataaccatactctgccacatgtttctttaatttttctgtgacatcttcgccattacactgtacttttgtaaaccatccataatgattcaatccaaaataatccacttccagattgctaagatctgtgtctaggatttctgccattcttgcctctacctcaactggcatatcacagatatttaaaattcttgcatttggacgtaatgtctgtgttgccttagcaacaatcgcagctggatttgaataattaacgatccaataagtttttgatgcatatttctcacaaacatcgattagatgtaccattggtccgatcgttctcattccatatgccattcccccggctccacatgtttcctgtccaatgcatccatgttttaatgaaatctgttcatcttttactcgcattttcagtccaccgactcgcatctgtgccataataaagtctgcatctgtaaatgcctcttcttcatccgtactaattttcaattccaaagaaggtcttaaatcttttacaacttcttttacgatcagtgacactttttcttgtcgttcctgatcaatatcatataaccataattctttgatttttaattcttcctcttccaaaagattttttacaatccctgcggtataagtacttccaccaccacatatcacaatcttaaattcttttttcattgattttttcctccatatccgtcatattatttcatgtgccctgattatatttcttgaaaatttcaggctcaatagttcacgctatttttggaacatcacaactatttcatggacaatctgcataaatttattccggttatttgtgcaaattcacaataaaaaaagaaatatttgaaaactatacttttttaggagaatgattgatatgatactagaacaaattaaaaatcctgatttttttaataattctgaacagaatatgatttattttttacaaaacaatttaaactcttttgatcaagtcactttaaacaaaatggcaaaagaatccttttcttcgacttcttctgttttacgtttttgtaaaaaattaggatttgatggatttaaagatttcaaattacaactgatccgagaagcatctatttctggtcaggatcttaattttaatctacctttttctccagatgattctgttgaagatatcggtcttcatttatctgaaattcttgcaaatggaattaaaaaaacacggaatctgttagatcccgtgcaattagaaatgactgcttataatataaaaaagagccaccgtgtattcctgtttggaaaaggtgactccagaatttctcttgagaattttaaaaataaaatgatcaaattaaatgaatattttattattggtgatgaatatcagaataatttttatacagtcggcaatattacctctaatgaccttgtgatcttctgtacttatagtgctatgcatcatgattacaattcttatcttccagttttaaaagatcataacgttccgatcattacggttacaagtaatattcattccaaactggctgtgaattctgatattgtattacaacttcctgatgatgaatcctttgatgaaaaagttgccagttttgcctctcaaacaaatatggattttatttttgattacatctattctatcattttccagaaaaattatatggagaattatcattcgaaacatgctaaagatgtatatacaaattccatgatctataacaaactataatttagtatcattcatcctgaatatctcgatcatccataaatcctatggattctttgagatattcaatattcttttcacggtccatattgtaaatacagccaaaaacaacatccatcatatactgcatcgcaatatgagatgagaactgagagatacgatctcttaagttttctctgctgctgatcgttaatgcaccggcaacatactgtggatataaattcccacctgctttcccaacatacacaacaggcaccttcttttgatgcagcacctttaaaattggctttacaaaggatgcttttccagaatatgagagaatgatcgctgcatgtttcggattacttgctaatgctgtcagtctttgtttataaaatccatgtggacattctacactacttttgcctgctgttaacatcttatcctgaaaattttctgcaacattcatgttatgtgaatgggtataaatgtctataacttccgctttatgtaataattgtgccactttatgcaattctataaaatccatataatcataggtatcatagattgctgtttcatataacttactcagtttctttgcgatcatctgtggcccatcttttcgttcaaatggataatttacatcgatcatctcaatatctgatttcatttctgagatatcttttgccaatatgactttcaattcattgaatccttttaacccaatctttttgcaaaatcgatgaatggctgattttgacacaaatgttttttctgctaattcaataaccgacatatctaagatatcttcttgattttttagaatataatatcctatttctgtttcaattggtgttaatccatctgctaattcaatcatatttttaagtgtcataggtagcacctctttatttttgatttatttcagtgttccttattattttaacattgctattttattatctcaaataatttattacttctacccaaaaactatatctaattatcaaaaaccaaacatgcagctccaatcaaaccgcaatcttctcccaacgccgctggcacaatcttcacattgctttttagcgcatcatatactttctcttttgcgcgtttttcaatctcttcgataaatccaggaatctttaacgcaacacttccacttaggacaaatagctctggatcaagtacaccataaagtgttgcaatgaaacttgacagatattcataagcatcttccatgatcattgccgcagtttcatttccttcctgtgcaagttgatacacttctcctgcatgggcagcttctaaccctgcatcatttgccctctttgtgatggctgttccactggcaattgattcaatggaacctttctttaaatctccctgtgatggaccatttttccataaaatgcagtttgctacttcttgtgcaaatccttttgctccacgatagatttgtccatcaatacataatcctgcaccaactcctgttgaaatggtcagaaattctacgatcttctttccttttccagccccgatcacagtttctgcaagtcctgcaaggttcgcatcattttctaactgcacagaaatacctgtaatcttttctaattcttttgtcagttcaaaattatgccaccctggaaggtttggtggtgttaaaataatcccattgatcaagtctaatggccctggacaagaaattccaatcccttcgattttttctccaaaccctttgatcacatcattgatctggtttaatgtttttataggattttttggatctgatccaaactgaactctttctttgatctcatatttctcgttgatcagcgcaactcttgtatttgttcccccaacatcaattcctactgcatatttcatgattttctttccctcctatataaacgaaaagggggacaaccgaagctgtcccctctttatgttgttgtttgtaaatatcttattcgtagtaatatttaactttgtctgcagaatcaaataagttaactttgtgagcaataacttctctacaagctttgattggttctggatagatttcaagaggctctctgtattctggatgagcattcaatacttctctacatttatcatagaatgcaaccttgatatcacttgaaatgttaatcttagaaataccgattttaactgcttttgcgatttcttcatctttgttgcttgatccaccgtgtaatactaatggaatatcaagagtatcttttaatatctgtaagatgtcaagacggagttctggtttcatatcgcttgggtagattccgtgagctgttccgattgctactgctaatgtatcaattcctgttttttcaacaaaatcttttgcctgatcaggatctgtatagataattcctgttgttccaccttcgatagagtttcctgttgttccgattgttccaagttcactttctacagatacgtttgcaagatgtgcaacttcacatactttctgagtgatcgcaatattttcttcatatggtagtttagaagcgtcgatcataacagatgtaaatcctgcctgaattgctcttacaactgtttcatatttatcaccatgatctaaatgaataacaactggtacatctgttttagatgcttcataaatcatgctctgtattaaactgttttcaacaaagttaaattcgtctggagacatctctaagatgactgggctcttcatttcttttacctgctgcataacagcttttaataactgatcactaccgatattgaatgctggtactgcaaatcctttttcatctgctacttttaaaagttctttcatgttcattaacatagttctatttctcctttttgatgttgatatcttataatgattttccttctgatccagacaggtggatatatttttttactaattcctggctatcaatctccacctgatgcatcattacccaataattgatgtctggatcttttttaagatgctgtttaatgctgtctacattggcattcataaaatcacatcctacattgatcttattgattccaaattcaacacatcttttaatattttcatcaccagaaccgcttcccccatgcagtaccagtggcatctttgttttttctttgatttcttttagtctctcaaaatcaaattctggtacatatccttctggatagtttccatgagaacttccaaaagaaattgctaatgcatcaattccagtttcttttgcaaatcgtaatgcctcgtcaggattagttttcatatcatcgtctgtataattatcgccttcactagcacccatacatccgatctctccttcgacacttgcatcgaactgtttcgcaaattccacgatttctcttgtcattcggatattaccttccaagttgtatctggaagcatctaccataacactggaatatccatcaactaatgctttctttaacaatccgatttcttccccatggtcgaaatttaaagctacttcaacacttgctctttgtgccagtttcttgacgatcggtgcgatcaaattgctgtcacaatgatttaccatatgttcctgtacgatattgatgatgatcggtgctcttaatgactgagctgcattgatcaccgctcttgctgtctcaatgttaaagcagttgattgccatgactgcataattgccttcattcgcacgttttaacattcccttcattgatacatacatagcttatctgtcctttctgattttatgaaatagtgaatcctgataaatcaagatcttcttctttttcgtcaaccattggttcgtcttcttctgttttctttttcttgatcagtacaagtaaaacacctgtaactgctgttcctgctaacagtgcgataagtgctgcaagtggatttgacattgctgggattacaaatacaccacctgatggtactttacttcctacatcaagactgaaactgatcgctcctgtaacaccacatcctgttgctgtacagataactgtacgaatgatatcattcatagcgattggaataactccttcagagatcatgcaaagacccattgggaacgcaactttaatattttctttttcctgtgctgtataaatgttctttttcagtaattttgataatactaatgagaatgtaattccaagtggtggaaccatagctgctaatactttgatcgcttctggtcctgtgattccttctaatagtaatccatcacagattaagttaggtactttactgattggtccaccgaagtcgatacatccaagagctccgatgatgaatccataaactgcttttgaagactggtcaagtcctgtaataaagtttgttaaggcttttgttgccattgtaattggtgttcctactacgaagaacatgataagtccagcgatgattgctgataatgttggtacgatcatcattggcattaatgcttctgcccatttaggtactttcagattattcttaatgaataatgcgatgtaacctactaagtaaccaccgaccattccacctaagaatccagctcctaagaatgatgcgatctgacccattaagaaaccaggtgcaataccaggtctgtcagcgattgagtaagcgatatatcctgcgataaaggatggtaacaatcccatacccataacaccaagtgttgttaatgcactaggaagtgtcatcttagataattcagttacgttttctcctcccattaagttaccgatcgcgatcagtaatcctgatgctactactaaaggtaacatataggaaatggccgtcaatgcgtgacgttttaattccgctccaagttttttcattgttctcttctcctttaagtatagttttttgtttctctcttatttacctaattcattttcgatcttttcgatcagtttcttaggcgcttttacacaaacatttgtaggaactttgatcgtaggtttcccttcaaatctttctgttcctgtaatagcaatatcgactgcaaggattacaacatctgcttctttgatttcttctgctgttaattcatcctctgttccgattgttccctgtgtttccactttgattgtgtgtcccatgctttcagctgcacggattaatttttcttttgcgatgtaagtgtgcgcgattcctgatgtacatgcacatacagatacgattttcataacttacaactcctttcttatttttcttttggttgtttattacctctttctttatgttctaatcatacaccagctttccttactgtgttcattaagagagggctttttaatgtggcattttttccatttaattatgacattttttcaatatgggcattttaattagggtagtttttttgtttcacattccacaagggaagtatttaaatgcggtaattttttatttatttttaacatatagaagtgcaaaagatccctgctcctattggaacagggatcctaagaattatatagagtgttaggaaacttatttatgcaaatacagcttttagatcttctactgtgctagcattcaacagagcttctactgcatcgtcattacctaaggttcttgctacttcagccaataatcttaaatgagtttttgcattctcattatcatttccaactgcgaataaaaagatcagttttacaccatttccatccagtgtctcccattcgatctcatcctgaactttaccaatcgcaattcctacctgtgttacagaatcacttttcccatgaggaattgccacatagtgtccaattcctgtctgtccctgtgattctctcaaataaatatcttctatataagaatcaacatccgcaatatatccggcatcttttaattttcctgcaagatgctcgatcgcttctttcttattctttgctgtcatatttaagtcgataactctttcatctaatacacttttaatatccatttttaattctccttttaacttttctttttacttattgaatcagatacttatataactcaatgtttgatttcatactctttaatttctctaatttttcctctgaatcgatcaatgttacatattctttataaaacatctgaatcctgctgatctcatctctggtacttaaacggaacgccagtaaaaatactacctgaacctgttcattgtcccacatgatcggattttttaagattgctatcccaacttttgattcattaaccgctgtcggtgaaccatgcggaagactgaccccatttccaatcgttgttgttgttttactctcacgatccataactgaatcataaaaatcttctgtaacaacatgcttttcttccattgcctggctcattatttttaaacattcttcttttgttttgacttccagatcagtaaatataaattccggtgaaaataaaataaaacattctggtgaaaatggtgttgcattttctatcattatagaattcatattgtctaaatgtgccctcaaagtagaaattcctgtttcatttaagatatttggaatgactacaattctcttatctttttcttttctctcttctgtcgaaatgataatgtcataatcttcataatccgcaatcttaaagtcatgaatacttacaaatttaatttcatcaatctctggcacagatttcttaatcttttcttttactaattgtgtatgacccatgttaaaattagaaaccattaccgtgcggtactgatgtttttttctttcgatcgctgcctgaatatataacacgatatatccaatttcatcttctgtaatctgaagtccataatattcttcaaacaaaatactgatcgcccagcttgcacgaaatacattcttatattctttttttataaaatcaatcaatgcatttttttgtggcgttccataacgaagtctgaaaattgttggtcttaaatgaatgatcaggctttcttttactttctcatctgaagtgagatcaacatctaaaatatctctgattacctttaacatgcgatctacaaaatcaaccaatttattgtcatatttctttacctgacttaatgtcacatctacatctgatattccaataaactttgaacacaaaatctgaattgataaaaacaaaacatcttctatcaaaaaatgtacatgaaatacttcttctaatttttcaaagattgctaccgtaaatgcatattcattatatttcttaaggatttttaattcctctggaaaataatcgctgactaatggtaatgcaagctcttttctcttatacgcaatgcaacaataaattaagatctcataaaatgattcatctgtgaaatggtaatcccattcgttttctgtttgaatgatacattttctgatcgcagaaacatcaatgttagaaaagaaataatctatattctctttgatctcttctcctggtttcttcatcatgatcagattctttaatgcaaccctgtattcattttcttcacttttgagccgatatccctttcctctttcattcacaagagaaatgtggtatacttccagccattcttcgcattcctttaatactttcagcattgttggaacacttaagaataacttctcagctagtttctgtgttgtcattgtctgccatggacgcaaattaaaaaatacctttaatatctcatttactctatctcttggatcataatttcctacttgcagattttcatctgataatattttctgtatttcttctttttgattttcatttgcttctagccaaattccaactcgtggtttccgctgtatttctccaagcttattttctaataggaagtcactcaattcatttaagcgatttctaactgatttctcagacaatccgatttctttggcaatctttccagttgcaatgatctctccatctgaaatacaatcaaaaatctgtttcatataaaatttgtcttttgaacgtttcatattgtttatcctttcaaatttaatgactttcttttttgcacctcctgttgtttaacttgaatttagtatagcacgaaacgattcttccaacttatcaagaacaggctttttaatgtggtacattttatctattgcaaaaaaaatacggtaaaaattcttttttgaaatgtggtaattttataaacaaaaaagaagaacttctgtttattttctagttctccttttgtataaaatataagggggcagaattctatcttctaccccttatatttttctattaatattattgcaccggacaagcggccccgacatattccatcctattttctttcacgctcgtaatatccgcatgttctccacagacacggcagttcttattcttcgatggaaatttaactactcttgtattcatcgttaatccatccatcacaagcatcttgcctgtcagcaattccccgattcctaacagatacttgatcgcttctaatgcctgaatacatccaatgattcctgcgactgcaccgataattcctgcctgactgcagtttggcacagaaccgctttctggtatctcctcaaagatacatctgtaacatggctggtcttcttctggaacataggtcataacctgaccctggaactgtaagattcctgcatgacaaaatggtttctttaacaacacacatgtatcattgatcaagaactttgtctcaaagttatccacagcatcaataataaaatcgtattctttgaacaattcttctgcgttatccgcatataaatattctggataggtgtttaccttgatatgctcatttaattcaagtattgatttctttgctgattctgccttatttgttccttctcttttgcttgtgtgaatgatctgtctctgtaagtttgacacgctgacatcatctgcatccacaattccgatcgttccaacgcctgctcctgcaagatataaagccgctggtgcacctaagccgccagctccgatgatcagaacttttgatttctttaatttcttttgtccgtcacttcctacctgtggcaggatgatctgacgatcatatcgtttaacctcgtctggtgttaattcttctgtagacgaaaacagatgcagtccgtcctttgaaacgtcctgcatctgttctttttgggatgtcacatgtaataaccattctcggtaaccgccggataagttcaaagcttcatacccttcttgtcttaactgttcggcaattggggcgcttttctctccatagttgcaatatacgatcagtctcttatcctttggaagttcctcgatgtgagagaaatcaccagcccattcgtaagccttcggtatatgtccatgctggtatgcgatctcacctcttacatctagatagatataatcatcatcggacagtaattctacttgctgtaccgtgatatccatattctttcctcttaatcttaatcctattcttcagcaaataatgctgtagataagtatctgtctcctgaatctggaagtaatgctacaattgtctttcctttgttctctggtctctctgcaaggatcgtagctgcttttaatgctgctcctgaagaaataccaactaagattccttcgctgtgtgcgaatgctcttccttctgtaaatgcatcttcattctcgattgtgataacttcatcataaatctttgtattcagtgtgtcaggtacgaatccagcaccgattccctgaatcttatgtgctccagctgttccttttgataatactggagatgttgcaggttcaactgctactattttaacatctgggttctgttctttcaagtattcaccaacacctgttaatgttcctcctgtaccaacacctgctacgaagatgtctactttaccgtctgtctgatcccagatctctggtcctgttgttgctttgtgtacagctgggtttgctgggtttacgaactgtcctaagatgactgctccgtcaatctcttttgcgagttcatcggctttggcgatagcacctttcattcctttggcaccttctgttaatactaattcagcaccataggcttttaataagtttcttctttcaacgctcattgtgtcaggcagtgtaaggatcgctctgtatccttttgctgttgcaactgctgcaagaccgattcctgtgttaccacttgttggttcgatgatcgttgatcctggttttaactgacctttcttctctgcatcttcgatcattgccaatgcgatacggtctttgacagatcctgctggatttaagtactcaagttttgtaaggatcgttgcgtctttcactcctgctttgtctgcatatctatctgctttaagaagtggtgttcctccgattaattctaatgcacttgctgtaatcttactcataattctaaacctccataaaaagttgttgtttttattccgttttatttcctatttttctactaggttttctatgttttagattatacaaccacatatctttattgtcaacatcttttgcattatttctgttataggtttttcttttgatttgctataagttctctttatatttttatccacagattcttatgatctggagatcaaatgttcttgcagaaacactccaattccatcgtgatcattgtctttggtaatatgatctgcaacacttcttgttttttcacttccatttgccatgacgactccgactcctgcatgcaaggtcatatcataatcattatctgcatctccaaatgtgcagagattttccatcgtaaatccatgcatctccatcagtttttgtaatccaaaggattttgagattctaggatccataaattcaaacaggtgttgcgtcgtttgaagacttgcacatttgaaacgttcatttttaaaggtttttgctctctcaataactgccggcatagtttctggtttgcatacaataagaagttttaaacgatcttcttttaaatattcgtcaaaatctatgacttcatatggaagctgatcacctttagataaaattttaataagttcatcttctttcggagtatacaaaactccatccccatgaattgcaaaattcacatccatatctttatagtgctccatgatatttgcgatcaggtttcctggaagggcaaaattttcttcataataatcggttttgtaatcataaatctcacctccgttgcttccaacgaccatatcaacaagcccgccaattccccattttccaaacaacctttttacacttggaacgtctcttcctgttgatattccaaacaagattccttgttctcgaactttctttatcgcatcaattgtttttgaggtaacaattcccttgctatttaacagtgttccatcaatatcacacattataacttttatattcttcataacgtttctcccttgattttgtccataaatattattttctatcaatttaacatattctttcaaaacaaataagtcccagcacaaaactttacgctttttctgggacttatgaattttatatatttagaaatcagataacaattattttaattgtaacatcgcaaacatacaaattccagcaaaaattagaactacgatacttcctgaaatatctctcagaaaatgattttttaggcttttttctacagagtctttcactggaatctgatatgttttaactgttttatatagaaggaaagctaatgcgactacatataagaagttctgaagcattacttctgcaacgatcatcaatgccatattcacaaccgcatatccataatcagctttattcaaatgctgttgtaaaaagcctaacaagtatgcgataaatggattaaccatggcaactaagaacataacggtataatgtggattctgacttaggatcgtctgtagattagcacctgcagttcctttggctgtaagataacctaatgccataaatggacttactgccaataatactctaatgatcgtaaatatgcgctcaattgaagaatttactgttacattcttctgaatcgttttcatcatgattctttcctcctgtactgcaaaatctttattactttaattctggccaataacccttgttagcctcgatcaggtcatctaagatctgttttgctacttttgcacttggtactgtcttagataatgtcagtgcctgccataacttttgatagcttccttcgatccatgcttctactgtcagtttttctacgcttacctgctgttccattaatcctttctggaactgtgggattgctccctgacagatcttttcgtatccgttgcttcctacgatacatgggatctctaccatggctgtacggtcaaagttctcaactgcaccttcgtttggtacgatcagtaagaatctttcctgtgtattttctgcgatcgcacatgctaagtctacgatatatgttgcatgagcatctggttcgaatgcacttccgactgctgttccgttttcgatgatctttctgcattctccgaagatga

SEQ ID NO: 820 - DNA, 392 bp, Unknown
  gut microbiota DNA sequence
cgctccctgacagatcttttcatatccgttgcttcctacgatacatgggatctctaccattgctgttcggtcaaagttctctactgctccttcgtttggtacgatcagtaagaatctttcctgtgtattttctgcgatcgcacatgctaagtctacgatatatgttgcatgtgcatctggttcgaatgcacttccgactgctgttcctttttcgatgatctttctgcattctccgaagatgaatttttctcttccatccatgacttcgttcgctcttgtgtattctggatttgatgtttctacaacataatctgggaacagatagtattttaagtatgtatttggaattgtttctggatcaactgcatatacatctcttgctttctggaatg

SEQ ID NO: 821 - DNA, 142 bp, Unknown
  gut microbiota DNA sequence
taagaaagaacatgatatgatgtaaaagttgctgcggttcttatgaagaacgggtcaacaaaataaatcaaaaaagttcttgacaagctaagaacaaagtgatataataataaagcttcttatacgaagcggatcacaaaaa

SEQ ID NO: 822 - DNA, 232 bp, Unknown
  gut microbiota DNA sequence
aatacagtaaaacatacacccctaccagtggtttcgataactgaaattattgaatattataaaaatggttatatgtcggcgaccgtaggaacacgcctgcacttagcgagtggatgatcgtaagatcattcaggagcttagtacagctgcgtagtgagtcgagcgagagcgcgtcgcagacatataaccatttttataatattccaccaataacttcagttcatcaaactac

SEQ ID NO: 823 - DNA, 192 bp, Unknown
  gut microbiota DNA sequence
atactatggattaaaccacttcggatggtggaacaagatctatgattctgaaggaaatgacttaatgccagagatcaagaaacatatggcagcaaacggatatgcagatgcattatcagattctaaccagcatgtagacgaaagctgggtacatacattccagaaagcaagagatgtatatgcagttgatcc

SEQ ID NO: 824 - DNA, 198 bp, Unknown
  gut microbiota DNA sequence
atcggatacctacggattgtaactatagtaatccccgtattagatatgatgggatcaactggtggatcaccgtaggcattgaatacgaagactctgttaccgttccctccaatgatgggatagggattgatttagggatcaaagatttagcgatatgttctgatggcaataaatataagaacatcaataaaacgaaaa

SEQ ID NO: 825 - DNA, 141 bp, Unknown
  gut microbiota DNA sequence
ctatcccatcattggagggaacggtaacagagtcttcgtattcaatgcctactgtgatccaccagttgattccatcatatctaatacggggattactatagttacaatccgtaggtatccgattcttttccgcaagtctga

SEQ ID NO: 826 - DNA, 363 bp, Unknown
  gut microbiota DNA sequence
taatatagcagggatggagagttcgtttaagaatcagtataatagaaaagccgtatgactttttattataatataaatcatggctttgcggcaaagaaaaaggcagagcaaatttaaggaggattttaatcatgagtaaagtagcagttgtatattggagcagcacaggaaacacagaagcaatggcaaacgcagttgcagacggaatcagggaaaaaggcggcgaagctgttcttcatacctgtgaggattttgacggttctaaagttgctgaatatgatgcaatcgccttcggatgccctgcaatgggagatgaagttctcgaagatacagaattcgagccaatgtttgacggatgcaaag

SEQ ID NO: 827 - DNA, 344 bp, Unknown
  gut microbiota DNA sequence
gcatctgtggaacagagtctgaatactttgatttctaatacttcgcatataaaaatggatacctatcatgcacagttagaatctgcagaatcagtaacccgcatgatgaagcttggctgttatctgtttatggcggttgtaggactcatcggttttatgaatatggcaaacaccatgatcatgaatattacgacaaaaaagcaggaatatggtgtattacaggctgtgggcatgacaaataaacaattaaatttatgcctgcagttacagggactgatgtttacggttggcaccatatgcgtagctttgattattggtctgccgctcggctatgcacttttttc

SEQ ID NO: 828 - DNA, 10371 bp, Unknown
  gut microbiota DNA sequence
cctgcttttcctatgctacagcattgtaattatttaattttaattgtaaccgtcttgctctttccgcttccatccactgctcttgctgtgatcttcacggattttttctttccagctttgtatgttgttacagttcctttggaagaaactttcgcatattttgtattgctgcttgaccattttaatgttctatttgcccctgaagatgcgcttgtttttcctttcagatataacttcttaccagcttttactgatttaactccagaaatgtagactttctttacgatacctttcttgacatagatcttatatgatgctttcttaccacttccgtctttggctgtcgctgtgatcgttactgtttttccacccattttcttcttcgtcgtaacaacaccgctgctgctgactgttgcaactttggtattgcttgatttccatgtaacacctttattgtatgcattggatggtgttacggtcgcctttaatgttactttcttaccagttgcgatcttgttagatgttgttgttgtgatcgtaatcttgctgactttgatattttctactgttacgatgcagtacattacatttccgtcagatgttattgccgtaataattgcttttcctgcagccttagctgttaatttacctgctgcatcaactgttacaactgcttcgttagaagatgtccattttactgttccgattgaagctgttgcataatctggtaaatatgtaatcttcagctgttctatcttgcctggatttaatgttacaaatgttttgtttaatacaaccgcctgtgtaggaatcttacctgtttcatctgttgtgtaaactttgatcgtttttgttgttgttccagcttttaatgtcagtgttgccatctgtccttttgttccagctttgatcttatctcctgtaatggatactgctgtcgtattagatgaagtgatagtaaatgcctcagaggctgtatcatttacaaatacacctttggtaaattcttttattgacagttcctgtccttcttttaagtatacagtatcacttaagaatgaaagtcttgttgctgtgcttactgctgatggcaggaataagaagtttaactgtgctttcagatcatttaatgctgtaaaatctgtaacagctgttcctcttaaatacagttcttttaactgttttaaatttttcacaaaactaatgtttgtgatgtttttgttattttcaagattaatcttttcgcaattgactgcttctgataatcctgctaaatctgcatttgtaagatctttggattctaactcgatagattttacttttttaatctcatcactgttaatgcttccatctttgttcgcatccacatcttttaatgcattgtatactgttatacttgtcaatggaataattgtctttccatctgcatcttgctgtgctactttgacttcaatgtcaatagaatctttatatacttttccatctcgtgtaatcgtagcttctaaagttgtttttcccgcagcttttgcttcaacaataaatggaattgtaacatctgctgttgctacacttgcttttgtgacaacatttaagatcttattatctttagaagtaacagatactacatctcctgatttaacattcatcactttgacttctttgttaaatgttcctacgcttagatttggaatatttttatcaatctgtggtgacgtttcactttttgctgtaactgtaactggaattgttactgtcgctgatggtgttgttttactttcaacttttaattttgtttctccagcttctgcagtatcaatcgcctcaagacttaatgttttatccgtctgatcttgtattaattttaattttgcagctgttcctgttgctacatcttcagaatatttaacatctgtacatccttttaaaattccttttggaagaattggatctgatgttgttgtacctttttctactgtaattttgtttgtcttgatcaatgcaattttgtctgctgtagaaacagaagttcctacaagattaatctcttttaaatttgtcatagattttaatgcatcaattttcttaacatttatattgttgcttaaatctaatttttcacatcctgttgcatctttcaaatattctacatctgtgtctgtcagattcttgttagaaagattgatttctttcttagctgctaattctgcttttgtgatctgaccgtttgttccgccaagtgcttcatataaagaataggatgttactggaaccacattgtcatctgctttagctagattaaattcaaattctattgttcctttgttgatctgcttactttcaaatgttgctgttactttgacagtacccttatcctttaatgcgattggcatatattcgataacgtcttttccttcagcatctttgactgttctttgttcaatcttcaatgctgattcatctgctgacttgagtgttactttgtcaatgtttgccgtatctgttccttggaatctgtaataatggaaacttccaacttttacatcttttgattctgctgcaaatgaaattccacttgtaactgttggtgtggtggttgtaccttcctgtgtcaccgctgcctgattcccctgatctgctgttgccgccattaccgtaaatccgttgaccggtatcatggatatgctgagcagacatgctaacagtttctttctgctcttgccatttaagtggctgaatactttccatccttcttgcatgaaattcgtcctccttttcttcatgtttgaatctgcatattgctttgtttattataacacttttttgtgtagaatgcataaaagagtgatcaattttatcactcttttagcgcattttgagattatttaattttaatcgttacagttgctttctttccacgtacttttttccgtggaatcttagtcttcttcataagtgaaagctccctattaacttattatccctatttacaattattatacttttttaattatactcctgcattaatctttattcaatgtatttgttcacattttatacacatttttcatgcatacaacaacaataaaaagactaggacagtcagttttggaagatgtatatctatacaatccaaaactgactgtcctagtcttttgttcattagagtttttatttaattatttttatatctaatgctgtggcgctccattaggttccaatgttcctccaacctgtttcttcattctgaaacggtagaagatgatcgttgctaatgttgacacaactaagattccaacaaatactgcaatatcctgtccgatctgtccatccatagatagtgtgtgacgaaatgcgtgtactgtatagctgaatggcatatatttgtgtaatactgtgtagaagtgtggtgccatatccagtggatatgttcctccggctgcacctaactgtacaaccatgaatactaacatgacgtaacttccgacacggtttaataacatctcaccaaagcagatcaatgacataaatgccatggatgctaagacggccattccaaatgtttttcctacataatgtggttcgagtccattgattcccattaaaactgcaaccatgatcactgcctgtgcaatggatactgctgccatgactgtgactttgcttaaccaccactgaagtccactcttgacttcttcgtttttctccattaaaggatacattaatgtaaatgccatacatgctacgaataatccaacggacatcatatatggcgccattgcgtgaccgttgttatcaacgtgtgaatattctacattcttagcttttactggtgctgcaaacattttgtttgtcttcttggttgccttaatgctgttaacctgatctgctcctttttgtaaggaatcttttaatgtcttgcttccactctgaagtgttccgattccatttccaagagttgtagatcctgctgctaactgacttgatccacttgcgatctgtccagctccagatgctaactgtccggctccactgtttaatgtattgttgttagcaactaaggctgctgttcctgatttcagtgtttttgttcctttgtaaagttttgctgttcctgacttaaatgttggaagttttgagcttacctgaccaattccactattcagctgagttgctccgctatttaatgctttggaattgtttgttaatgttgtaagtcctgtgttcaggctttcaactcctgctgtgtagttggcaattccaatctttaatccgcttgtactgtcgttgattccagattctaaggttgtcattcctgtctgtacttttgtagcaccttctgataactgagtcaacgcctggatcatacccattgtatcctgagttgttccctgacggtctaatgttgtttttacttcatttaagccttcatacagaccattcatcatcgctttttcgtatccagaaagtgtctgggatgattctgcaagttgcttagatgattttgctaaagaactaacatatgctttcactgttgcaagttgctgttcactacttgcggactgtgtttttgcttttgtttttgtatctgccgctttctgtgcatttgtatatgtttcatcaacattattttcaacatcagatgctgcgctatctacctcgtcgatttcagctaataatgcttttttatcttcttcgcttaatttatcaagtacagatgaattctttaactcgcttactttgctgtttaaatcagatacacttgactttgcatttgctgcactgcttgctgccttcttagctgtttcattgtttgctgtctgtgttgatgtctctgatgcggttgatccagcagaaagcatttgatttaattcatttaattttgtattaaatgcttctaattgtgtatcgaaattgcttcgtttgcttataattccatctttcttcgcttcattttcttttaactgagttccaagtccattggatgtttcttttgtctgacccaacagatttttaaggcctgctgataatgttccagttccatcttttaaatccttacttccactggataatttctcaacacctgcatttaatgctttattattcgctgcaagctgtttgcttccagcctgtgctgtgctgactccgtttgtgtactgggagattcctaattttaaggatttagagccattggataactgagttgctcctgtctgcagagctgcaactccatttttcaatgtctttgttcctgattttaaagattttgctccactgtcaactttggctacacctgctgtatatgtttttagtcctacggaaagtgattttgctccattctggaatgttaatgtgctggatgctaatttctttaaattctgttcgatcgtatcatttccagctttcagcttcttcgctccgctttcgatctttttagatccatctgctgctttctggaaaccgcttccggctgtcttgatctggtcaaatacggtctttacataagtttctgttactttttctctgactgacttctcaatcttcgccatggcactatcatccatcttggatgctacatagttcgtacctgggtttgtcttgtatgtcagtttcatctgttttggattcttatccattaatgttgttgcattctttgagaaattttctggaatggaaatgatcatatagtattctccactcttcaatccttcctctgctttcttgtcacttacaaaatgaaaatccagtgatcctgaatcttttagattctttaccagatcatctcctacttgtaatgtttttccctcgtaatttaccttcttatcgtgattgactaccgctactggtaattgatctgcatctccgtatggatcccacatagaaccaaggaatacagatgtataaattgcaggaatcgtaatgatcgcgatcaaaatgataatcatccaggggttctttgaaattttctgccattctcgttttaacatgatcacagctgctccttccttgcatttttattacttatatagaggtcatacctctttgaatcattggttattatatgcacttccttgatgaaagtcaataatttattgaacattggtcatttttttatttcatacataactttctttttcatttatgatatatcttttttcttctgttcattttcttttgattctgttatgataaaagtgctttttttatttgaattttaatggaaacgaggaattttattacatatgatacaagatatttatccacataaactaaacaatcaatatcatccagatcaaaaaccagatgctgacagcattattttatattttacacaggacggtcttcttcatcgtttattaaagaaagaagacttagaagaaatggggcaggaagatctattttctctggatgaaatgatctatactggtgatggtaagaaacttgcaagaccaactcttttaaatgaggaacatctatttttatcattccctagattgagtgattttgtgaatgatactcatgttacagaagaaactcttacatatcttttctctgtggatgatgacaactacttcttattaaatgaagctccggaagaaattcctgaagattatgaattcaataccgtacgtgagcttcgcaatttacagattggtccaaaataccgcacgtttgcggcgatcactggtttacatctttataactggtaccgcacaaaccgtttctgtggatgctgtggacacaagaccgttcattcttccacagaacgtgctttaaaatgcccatcttgcggtcacttgatctatccaagaatcgtacctgctgttattgttggagttaaaaatggtgataagatcctgcttacaaaataccgtaaaggattcactccttttgctttaattgctgggtttacggaaattggtgaaactttggaagaaactgttgcacgagaggtcatggaagaagctggtattcgtgtgaagaatattcaatattataaatctcagccttggggtgttgtggatgatctgctggctggtttttattgtgaggtagatggagatacagagattcatatggatgcttcagaattgaaacttgctgagtggaaatctcgtgatgaaattgaattacaaccaaatgattttagtttgacgaatgagatgatgcgggcgtttaaagaagggaagttttagtttgaagatggaaattattggtggaatattataaaaagagatcatgtgtccgtacggttgctgacacatgatctctttttataatattcaaataatttatgtcattcaaaccactatacattgtgtatgttaaacggtattggttgataatttttgtatttattaacagaaagtaaaaggacttctacaacaccgatttgttggaatgtttatgaagcataataacattactttctgtttgaaatacaatagaaagtgtcccacttttccctttggaagctactttggatgtctctttttcatttaataaaaatatttattttgctgtagcagtttctttatgcccactctttatcttatcatactgtgcaaacatacctgcaagtaatgttccagagattgaatgccatacacaagatactgcacagataattgctgattctggtgttgatgcgaactgagctgttgttgttgcaaggtttgttgctaatccagcattctgcattccaacttcgatagaaattgttcgtttctttgctgtgttcattccagtaagttttcccgcacaatatccaaggaaatatccgaaaccgttgtgtaaaagtactgcaacaaagatcacgattccagactggaagaattttgatccctgtgatgagataactccaccaacaacacatgcaagtccaagaactgccacacccggcataactttctgaacttctttgaatgcttcattttttcctaatgcgtagtttaatgcaaacccgatcgctactggtacgataaccgtttctacgatagatacaaacattggtaatccatgaattgtgatcttggctccgcttgccagaaaggataccatcagtggtgtcatcactggagagaggattgtagatacagttgtcattccaacagaaaatgcaacatctccaccgcaaagataggacataatgtttgatgatactcctccaggacagcatcctacaagaatcagtccaagagcgattccatctggcagattcagtaattttgtaattgcaaatgccaggaatggcatgatcagatactgagcgatcgcaccaatacagatatcaaatggtctttgtgcaagaattttgaaatcttctgttgtcagtgtcaatcccatactgaacatgatgacaccaataatgatagactgactcgtgaatttatttgctactggatccgtgaataattgaaaattcacccaccccatcaacgatggcaggaaaaatgtaatgactgcgatcgcgatgacaacgatagatgtgtagtctgataaaaatttgcttagtttttgtagttgtttcatattatgttacctcctgatattcctcaccgcccttcgcaataaagcaagaaagaatcctgctcagaggactttttatttcatcgaaattttctatgcaataaaaaagccccttctcagaaaaatcctgaaaagggacgaactaatccgcgttaccacccaatttctgcaataaaattacagctcttaacgtactatcatacgctttccttataacggaggattccggcgagacttactggttcaaaatattaatgtcaagtaatgttcagtccgcatcttagagatgatatctgttcatgaaaatgtatctgctcgcaccaaccgcagactctctgaaacacttgattcaaaaacagcgttgttctcttcaacgaatttcggtgaagtttatttatttaaaatatattatagtcctttgagataatttgtcaagttttagtttgaagacggaaattattggtggaatattataaaaatggttatatgtctgcgacgcgctctcgctcgactcactacgcagctgtactaagctcctgaatgatcttacgatcatccactcgctaagtgcaggcgtgttcctacggtcgccgacatataaccatttttataatattcaataatttcagttatcgaaaccactggtaggggtgtatgttttactgtatttaaacactgtctgtcactacaaaaattaaaaaacgataacactcaacatacacaccacttaagttttccaatcttgtaattgtctacactttagacttctggtatatgataaaaaataaataaacgatcggaagagtagcattagaattttgccacgttttttacggattcgcagccggcttggtgcgttgtttgagcctcaaagagttctgttttcaatacccttgaaggcgagttacgcaaggaaagccggcggatcagcgatctgtaaaaaacgtgaggaaaattctctagctgctcttccgatcgtttatttattttttatcatatattcgaaatctacagttggccaactacaaattaaaaatttatccacagatctctacaaatttcttaattctatctacagaaacacttcggtaccgatctccatcttcatcggatacctggaatgatactctctctcccattccagtcgcatcgactccccagcctctgcatgtgctgtgtaattgtttgattcccgttttgtctatgatcttctgggcgttgttttcgttgactccacatcctgcgatgatctcaatctggttcccatattttttctgaagatctgctaacagatgaattccttcttctgcggttgcttcctgtccacttgtcagtaatcgatcaaatcctagatcgatcagtgtttcgattgcctcatatggatctcttgtgcagtcaaatgctctatggaatgttgctttgcgtccttcattttttacattttccaagaattcctgacaacggttcttatcgattgttcggtcttcatttaagaaaccgaaagatactccatctgtcccatatgctaatagtagcttaagattctcaagcatctgttcatactggtaatttgtatagcagaatccccctgctctggctcttaccatagatacgatctcaatatcgctgtattgtttgatcatgatcaagcttcctaaagatggtgttaatccacctaaacttaatgcactgtttaattctactcttttgattccgcattcacttgccatcatggcatcttcgaagcttccacaacatacttctatcattgttttccgttactgaaaacttataaaaagttataaacctttatgtttcattcctacttcaacgagtatgcttttg

SEQ ID NO: 829 - DNA, 172 bp, Unknown
  gut microbiota DNA sequence
tgaatattgttccacttagatttatattccatctgccgcctaaattcataaaatccctgttgttgaactgttttggataaatgtctgtttttcatcattccatttacatttagatcttcgatacagataaaacttggttctcgttttacgatctctgatgttatatgatgta

SEQ ID NO: 830 - DNA, 149 bp, Unknown
  gut microbiota DNA sequence
taaaaagcaactatgccggtttatataataatctgtattatctttctttcgcatgacgtatctcctttacggctgaacgtatgtttggtataattatactataaaagtacgatattttcaacatatcagaaaggagacaaccatatggc

SEQ ID NO: 831 - DNA, 20928 bp, Unknown
  gut microbiota DNA sequence
tttctaaaaataatactgtcatgttttaatgtattattttatatattatgttttttaatattttaaatatagttgcatatagtgctaccccaataactactgcgatcagctgtataattaaatctggtattaacattgcttccacctctatttagcttcttctgcttcccagataatgatgtttccttcatctttaccggagtgttctttttttagttccctgacttgttgctttgttacttttcctttggctttgtctttgatcgttacaccttggtatttatttgttgtaactgtgtcttctttctgcttggcagagttggttttgttttgtccataagttgtgcctgcactgtatagtgcagctgttaggcatacccctgcaagtagtattgataattttttcatatcttattttccttaatgtttcatactatagcatatcatatttttcatggaatatcaaatccctaatatctaatagtttttcgacttattaccgcacacacaatggatgcagcaagcattggtataatactatcttggcttaaaatctgaataaaatttccaatgaagcaaacaatcataaatatactgattattttcgctgttttagcaccatagtcttttggatgtctatgtgctatagcccagctgatgactgctagtattatacatgggatcattgtgtaatggatgccgttatatgacaatatatatccactatttcctgaccaactgttgagattcaaactatccaaaatcatatctccaattgacaccgtcttctcataaaatgggatacttagaaatccattgatcataaccagtaccaatgcctctgttccaaatcctaattgcttttttaaaagaattttttgcaacaggttctctaggatatacccgatcagaaatcctaatgtattaaaaatgatatcatcaatatcaccaattcttcctgcaaatacaacttgtacaaactcgatcatcaaagatatcaatgcccctgcaattattgcttttccatagttccattttattttctttataaatatgggaacaaaaagtcccattggcagaaacattaatgtatttaacagcatcaatttccagctttcattcacaaatggtacaatattccaggctgtaaatcctccatatgaccatgatgtgatgtctaatactctcgtgaccatgccaacggttgctatgtaaaccaaaaatatgtattttatgatccatcctggctgacatataatctttttattatatcgtaaatagtaaattgtgcttatgactgcaaatgcaatcgttgccataacaatagcttgagctagataactactcccaagcagaatcttctccatcatgttcttttctcctttaatccaatcattcctgcacataacaaaaatactattatcatataagacacaaaatcagaagaatatatttgaattatttttatgtgtttaggaaacaagaaccgcaaaaatacatttgcaaatatactcccacttgtacatagggctactgttttatataccaatgttttcacttttcttgtattcacagccagtactttatatacaacgatgaattctagtagcaaatttaaactcatgaatatcaatgctttttcagttgtcattggtaataaattatttgatttccatttcatctgcggtatcacataacgataacctgtctccctgcgtattctttttagcaaattacttatttgacgatactctttctcattcttataacaaaaataacctgaacattttactgacattaatattttttcattctcttgtttcattgttttcattttacttactgttggcataatcaatgtttcatcaagatttaattccgatgacaacctagtattcttatgtaaaaacccaacaattttaaacgtacaattttcagttcccaaatatcctgccttaattttctgattcaaatgaaaaactttttgataatcatatcctgcaattaatggaatctcttgattcaaaggtctttgatactcttttaaagtaaagcaacgacctttttcaatatgttgttctatcttcttttcacttatcattttctctggcatctgaagtacagttaaatttgtaagatatccatcttccgttttgtcattatatgatccagatgcaagtttttcattcccacgaaaatattcatgataagatagaatctgtctggaatattctctgtataactctgctttttctaattctttatatacgttttttaaaatactgagagagtttttctgatgaaggaattccatatagctagaatttctattatcatattcatctgataacttccatactccagggtattctatctccacttgttcattatgacgatcaatcttattttgatacgaatatataataattcccagtaaacacccaatgcttaatatataaaataccataaaacgaactacatatttcctcatttatcatttctccaaacaaatcgctattcctatttttattttctttttataacgattttcaacgaatactttatattttccatcttttttcacataaaagtcatgtataatatcgaccgcatgcatcacatatcgttcttttcctgtcccatctataactcctgctacaaaatccttgtcgtctctttgtatttcttgagatgaaaaaacggtcagtttaattttctcgcctttttttaattccagctcttttgtttctagccttgtttttgcgtttaatggctgaactacatctagttcttctccttttttgatattttgttttagttttgtaactgctaagtttgtcccgatcctttttgcggtatattctttcaaatccattgtatattctgtctcttcttctggaagatcctcttctatttccgttgcccagactgtttctacataaattttatgatagccgatcgtgcttagaataattatcgcaacgaccacaaaagataatcctatacaaaggaatgttcctgccattacattccttgtatttttgttttcaattgatttaattcttaaaattcgtgtctttaattgacttttgtcttctcctaatgctgcgcacagatatgctccttttgcaaatggtgatattccgatttcacagattgttgtaaaatatctttttttgcttttcataattgtgattgattctaaatcgcagtatgtttcattccagctgtctacatccatatctaattgttttactaatggattccaccaatgaatgacccttacaagtccgcataactgtttccacaaaatatctttatgcttacagtgaatcaactcatggatgcatataatctttaattcttctttgttatattctctttctggaagcaaaatcatcggttttagaaatccgcaaataatcggtaccgccaatccatatacggttttgatttcgacatttctacaaacacctacttcttctttccattgattcttgcaatctaaaatagatctgctgcatacacatgccctctttcgtaattgattcatttgtgcctgaatacgtattgttttcagtatagcttttaaaaatccaatcgtccaaatgattcctacaacaaaaaatacccatcctaccaatggagacagtgcaaacatcgtataatcttcttcatatacataataaatgaaatagatcaatacaattacaattggcatcagaaatgataaaactgctcctcttaaaacagtaatgcacatactgatcagtccttttttctctagtcgctgccttatcttgcgaaagcacatatacgaaatacttcccaccaaaccattcagcagtatcatactgatgacataaatatatatttttttaatcatccaaatcattgatcaaatcctttaattcttctttttcttcttttgatattgtgtgtgttaacgtctgaaccaattccttcaccgacccatcatgccaaaaatccttcatcaattccatctgttcttcacgatacatttcttctgtgatctttgctgtgacatagctgtaattgcctttcacttgtgtatctacaaatccttttttctttaattttgtgatatatgtctttactgtgcttcttgtatatttcctgtcatatatttgatctagataatcaataatttcatataccgtaatcccatccccaagtttccaaatacttttcataataagtatttctacttctgataattctattaatttcattgttcttcctttcatttagactggttattattgtaatcattatatagatcaaacctatctttgtcaagattaattataactatagccaatttgtatacaaaaactatctttgatttttcacttttgtctttttctcagccttcgcatatccatttttattgactcatacatattcaacacgctaaaaaaagccaaataaaaaatccgacccaaggaagtctggtcagattttctagctttgttatgttttgtttttgttttatgttagttagtcttaactaactgttattataatatcctatcttggatgttttgtctacctttatttttgagaaactttctcaataccaaggatcttttctgcctttgctacagcttcttcgcttggcggatttacgccttctaatgggtattttattcctaatttttcccatttaaagagtccaagtgtatggtatggcaagatttccactctcttaactgtttttagtccatcgatgaaatgttttaagtctgctagtcctttttcatcgtctgttaaatctggcactagcacgtgacggatccacagatctactccgaggtctgagatttcctgtgccattgctaaaatattactgtttggacagcctgtcaatttcttatgtttttcctcgtccatttcttttaagtctagaatgacaaggtcagtgtatttcattaattctaaccatttgctgtgaaatggttcttcttttgtatatggattagcagaggtatcaagtgcagtatggattccttcttgttttgccaatttaaaaaattcgatcaagaactcgatctgtagaaggggttctccaccgctgactgtaattcctccatcacttccccagtacatgcggtaacgcaaagccctctttaagagggcttctgcctgccagtcttcaccgcagttttcctgccaagtctccggattgtgacaatatttgcatctcatccggcagccttgcatgaaagcgataaaccgcacaccgggaccatccacgagaccaaaagtctcgatggaatggatttttccggttattttttcattcatagttctattccactaatttaaattacattgttgcatggcatgttctggaaataacgtccatctgctgttctcttgttaagtcgatgaacttaactgcatatccagatacacggatcgtaaagtttgcatattcttctttttcaggatgttccatcgcatcgatcagtttttctttaccaaatacgtttacatttaagtggtgagctccctgatcaaagtatccatccataacatttacaaggttattgattctttcaccctcttcatgtcctaatgcatctgggttgatcgtctgtgtattagaaataccatctaatgcccattcatatggaagtttagctacagagtttaaggatgctaataatccattctgttctgctccataacttgggtttgctcctggtgctaaaggttctcctgcttttctaccatctggcattgttcctgttgcttttccgtatacaacgttagatgtgatcgtaaggatagatgttgtaggctcagagtttcgatatgtgtgatgttttttgatcttagctaagaatgttcttaacagccatactgcgatatcatcagctctgtcatcatcgtttccgtatttagggaagtctccttcgatttcatagtctacaactaatccatcttcatcacggattgcttttacttttgcatatttgatcgcacttaaagagtcaactgcatgagagaatcctgcgattcctgttgcaaatgttctttcaagttctgtatccattaatgctaattccgctgcttcatagtaatatttgtcatgcatatactggatcaagtttaatgtgttcacataaagatctactaaccagtccatcataacatcatatttctccataacttcgtcatagtctaaatattcagacatgattggtttgtaagaaggtcctacctgctgttttgatttgcagtccacaccaccgttgatcgcatataataagcattttgcaaggtttgctcttgcaccaaagaactgcatttccttaccagtcttagttgcagatacacagcaacagattgcataatcatctccccatactggtttcataacatcatcattttcgtactggatagaacttgtacggatagagatatcagctgcatatttcttgaagttttctggaagatcagaagaatataatacagtgatgtttggttctggagatggtcccatgttctctaatgtatgtaagaaacggaagtctgtctttgtaaccatggaacgtccatctacaccgataccagcaaggtcaagcgttgcccatactgggtctcctgagaataactggttgtaagaaggaattcttgcgaattttaccattctgaatttcattgttaaatgatcgatcatttcctgagcttcttcttctgtgatgattcctttgtcaaggtcacgctggatatagatatcaaggaatgtagcgacacgtccgatactcatggcagctccattctgagttttgatcgctgctaagtatccaaagtacatccactggattgcttcttttgcagtttttgctggtcttgaaatgtcaaatccatagatcttagccatttctttcataccttttaatgcttttttctgttctgcaatctcttcacgaagacggatcacatcatctgtcataacaccgcatccacagtttgcaaaatcattttctttttcttctaataagtagtcgattccgtataaagcaacacgacggtagtcacctacaatacgaccacgtccataagtatctggaagacccgtgatgatcttgttatgtcttgcttttttcatttctggtgtgtaagcatcgaaaacagctgtgttatgagtctttgaatattttgtaaagatttcatgtaatctttcgcttggttcataaccatagttacgacaagattcttctgccattttgataccaccatatggcataaatgcacgttttaatggtttgtctgtctgaagaccaacgatctgctccaaatcttttgtttcttcactgatataaccaggtccatgagaagttaaagaagatacgatatctgtatccatgtcaagaactccacctttttttcgttcttctttctgaagtccctgtaagataccccatagcttatctgttgcttctgtagatcctgcaaggaagctttcgtctccatcataaggtgtgtagttttcctggatgaaatctcttgtattgatttcttccttccagattctacctttaaatccttcccattcttcaaactgtttcattttgaaaactcctccatttcttttggattaaaattattataaaaactcctttggttagttctatctaactcaattacattatagcaaaaataaaattgaatacaatatacttaaccgataaactttctcgttaaataaataataactcctgtttttcatatttttttgcatacaaaaacagtatatggtccaaaaaattatacttcagaccatatactgtttttcatgttcaatgactatataaagaaactttttagtgatggaataatctgattcctgtaaatgccattgccatgttgtacttattacagcagtcaatgacagcgtcatctcttacagatccacctggctgtgcgatgtattttacaccactcttatgtgctctctcaatgttatcaaagaatgggaagaatgcatcagatcccaatgtaacatctgttaacttatctaaccattctctcttttcttcttttgtaaagacttctggcttctcagtgaagatgttttcccatgctccgtctgctaaaacatccatgtattcatctccaatgtaaagatcgatcgcattatctctgtctgcacggcggattttttctttaaatggcaggttcataacttttggacactgtcttaaccaccagttgtctgccttctgtcctgcaagtcttgtacaatgcacacgtgactgctgccctgctccgattccgatcgcctgtccgtcttttacgaaacatacagagttagactgtgtgtattttaatacgatcaaagaaatcttcatatcgatcaatgcttcttctggaatctctttgttctcagtcacgatattagataataattcatcatcgatcggaagttcctgtcttccctgttcaaatgtaacaccaaatacctgtttatgctctaatggtgctggtgtatagttctcatcgatcttgatgatgttatagtttccgtttttctttgcttttaagatttccagtgcttcatctgtgtatcctggtgcgatcactccgtcagatacttctctcttgatcagacgtgctgtatctgcatcacatacatcagataaagaaataaagtcaccgaatgaagacatacggtctgcacctcttgctctggcatatgcacatgctaatggagataaatctcccatatcatctacccagtagatcttctttaaggtatcagacattggacgtcctacagatgctcccgcaggtgatacgtgtttgaaagaagttgcagcaggaagtcctgttgctttctttaattctcttaccagctgccatccattaaatgcatccaaaaagttgatgtaccctggtcttccgtttaatacttcaattggaagttcacttccatctgccatgtagattcttgatggtttctggtttggattacatccgtactttaattctaattccttcatttttcttctcctttgatctgctgatcgactgattatttgttcttatttacgattcttgtctcatattctcctgttgcaatatcaatataacgtacaaacagagatactttgttgtcatcgtttaagctgttccaaagtgtatttgtgaagtcatcgatatcttcttcgatcgctactaatttaggttctccttcaaaacttggaagtggattcccattatgcatatatgtgtggataaaacgtccttctcctgcgattggattttcatatgtatatgtaaatcgattgcaactttctggatttccattgttgctctttaaaatagacattgcatagtgaaatgtcccatctttaatcttcatcagaccagaaattcttggtgtatagtttggtccgtctggttcaaactcacgacttcttaaagattcttcaaaggtaagtcccttttctcttccttcatatactgtgtctgtctgatccccgttcgtaacgatcgtctcgtctccaagaacacgaactggtgcataaatgatcaggcttggatcttctagtttagcaggatcaaatgcctgtgtgcggattccttccccttcttctacaaagacacgattacggctattctcactgcgtcccatgataaaatatgcagtgaccgctttcttcccatctttggatcttccgatgacgattcctcgtcctgggtaagcattttcctttaattcctgagcaagagctaacttcttcattggtcttaaatctccttcttttgaaaatcttgtttttttatttcttctattgtatataaaaaatggattgaatacaagaaaaaactaacaattataaaataaagggcaggtttcctatatatttttgcaacactgtcctttatttctatcattttttacatagttatgcttttttattttacaatccttcttatagcaagcaactccataaggtagaaattccgcataatttattattttaacatacaaaaaagaatggaacatcaatccctgacattccatcctttttcttattttatattcaaaaattacattctcttgattcgttcaatagcttcgactgtattctcatagttaccgaacgctgtaagtcggaagtatccttctccgcttggtccgaatcctgatcctggtgttccaacgacgttggcatcttctaacagatgatcgaagaattcccaagatgtcatgttatctggtgtctttaaccagatgtatggcgcattgacaccaccagatactgtgtatcctgcatcctgtaatccgttaaagattacttttgcattgttcatgtagtatccaacctgttcttttaactgagcttttccggcttcagagtaaactgcttctccagctctctgtacgatgtatggagctccgttatattttgttccgtgacgtcttgcccataacgcatgtaactgtgtatctccacattttaaatctttagggataacagtatatcctaaacgaactcctgtaaatcctgcattcttagagaaactctttaattcgatcgcacatgttcttgcaccttcacattcataaattgtatgtgcaacgttatcttctgagatatatgcttcgtatgctgcatcataaatgatcacgcatccgtttttgtttgcatagtctacccatccctgtaactggtcttttgtgattgttgatccagttggattgttagggaagcaaaggtaaatgatatctggcacttcgcttgggaaatctggtgcgaagttattctctgctgtacatggcatgtagataacatcgctccatgtttctgttgctttatcatatgttccggctcttcctgccataacgtttgtatctacatatactgggtatacagggtcacatacggcaatcttgttatcctgtgcaaagatttcctgaatatttccagaatcacattttgctccatcacttacaaagatttcatctgctttgatatctgctccacgatcctgataatcattctttgcgattgcatttcttaaaaattcatatccaaggtctggtgcgtatccgtgaaatgtttctgcatgtcccatttcatctactgctttgtgtaaagagtcaatgatcgctggtgccagaggctgtgttacgtctccaattcctaaacgaataatatttttgtcagggtttgcctcggaatatgcatttacttttttcgcaattgtagaaaataaataacttccaggcagtttcaagtagttgtcgttaattttaaacataaattcctcctagttttgatatgttaatgattctttaatcatctttgccatttcgataagacccactccactgttcatgcttctttgttgtatatatgcgtgggcttcactctctgtaatctgattattctgcatcagtaattctttgacttcttccagaagacggacttcttctctcgtacgttgttttggacgttgttttcttcgtctttgcttctcagaaatttcggtaacgatctctctcgttttctcgactaattcatacccttttaacggcatcgaaagtcctatgacattcggatacacgcagtcatctaaatattggcgagaagcgatcagcaacatcttgacctcttcagaaagatattctcttaattcactgtagatcatatcggaacatttgtatccgcagacgactagtccttcttcaacaccttccatacgctggactacctgtgcacccgttgcacatacagcggtcacttcaaaaccacttcttaccagaagattcctaatgcttctggcgacttcttgtttcgggaataaaacgatgacgtttaccaagcttctcacctcccgtatcatgtatatatcaatcattagatcttgtataaataacgatcgacttcccattgtgatacgaacttctgataagactcccattcagcactcttagcttcaacatacttgttaaaaatatgatctcctaaaagttctttcatataagtgctttgtttgaaaatctcaagagcttctttcatgtctcttggcagtgtattaatccctgcttcttgtttttctccctcagccatctcatactgattcttcatggaaccttttcctggtgttaatttgcgcttgatcccatctaatcctgctgcaaggctgactgccagtgcaaggtaaggattcgcagcagaatcagggcttctaaattcaagccttgttccgcttccacgggctgctggtactctgataagtggacttctattcgatggtgaccatgaaacatccacaggtgcctcatatcctggcacgattctcttataagagtttaccagtggatttgtgatcaggcacatctcatttgcatgttccataactccagccatgaagtgaaaagcctcctcactgattccaagatcattcttagaatcagcgaaaatattctttccattcttccataaagacatgttaagatgcattcctgaaccgtccactccagtgatcggttttggcataaaacttgcataaagtccatgtcttttagcaatatattttacgatgaatttaaatgtgaggatgttatcggccgttcttaaggcattgtcatacttaaagtcgatctcatgctgtgctggtgcaacttcatgatgagatgcctcgatctcaaatcccatatcttcaagattcaagatcatatctcttctggcactttctcctaaatctaacggagctacatcaaaatatccggctttctcatgagaaaccgtcgttgggcggccttcttcatctgtgtggaataagaaaaattcacattccggaccgacgttaaatttataacccattttctggcactcaaccatcactcgttttaatacatttcttggatctccagcaaatggaagtccatcttgtccgtatacatcacagatcaatcttgccacgcggtttcctcccgcattccacgggaagattgcaaagctgtcaagatctggatataaatacatatctgattcttcaatacggacaaatccatctacactagatccatcaaatgtacacttattatccaacgctttctcaagctgtcttgcggtgatcgcgacgttcttcattgttccgaacaagtcagaaaattgtagtctgataaattcgacatcattttctctgacgaggtctatcacatcctgttttgtgtatcgacccataacatcactccttcttaattaaatctgtgcgatatcaactacgctgagctgatctctgtttcctgtttccaaactagtcagtagagcatctgccgtatcaagacttgtaaggcatgttactcctgtttcgattgcgtaacggcggatcaggaatccatctctgcttcgacctacaccctgagatggtgtatcaatgactaaatcaattttatcatctaaaatgagatctagcaagtttggagattcttcttctaatttattaatctgttttgcatgaactccagcttcatttaagactctgcaagtgctctttgttgagaaaatctcatatcctaatgcttcaaatctgcgtccaatatcaatcgcatcgatcttatcggagtctttcactgttaagatcatcttcttgtattttggaagatttactccagctcctaagaatgctttatataacgcttcatggaagttcttagaaattccaagacattcacctgtagatttcatttcaggcccaaggctgatctctgctcctcttaatttttcaaaagagaatactggtttcttcactgcatagtattcagattctttctgaagtcctggttcatatccaagatctctgatcttagctccagtgatcactttcgctgctaacgctacgatcggaatacctgtaactttactgatgtaaggcactgtacggctggatcttgggtttacttcgataacatatacttcatcatctgctacgataaactgaatgttgatcagtccgataacatgtaatgattttgcaagttttcttgtatattctgcaatgattctcttaattctatctgttaaattgatagatggatatacggaaatactgtctcctgaatggattccagcacgttccacatgttccatgattcctgggatcaggatatctgttccatcacaaacagcatcgacttcgacttctttaccaaccagatatttatcgatcagaattggatgttcctgttcgtaacggttgataacttccatgaatgccgtaatatcttcatcagatacagcaatctgcattccctgtccaccaagtacataagaaggtcttacaagaactggatatccaagtttatgagcaacttctaatgcttcttcacatgtaaatactgttgttccttttggtcttggaatacagcattcttccaagatctcatcgaataattctctgtcttcggctgcatcgacattttcagcacttgttccaaggattggtactcccatcttcatcagtgcttctgttaatttgatcgctgtctgtccaccaaactgtacaaccgcaccatctggtttttcaagatctacgatactttctacatcttctgctgttaatggctcgaagtaaagtttatcagcaacatcaaagtctgtagaaactgtttcagggttgttgtttacgatgatcgtctcgtatccttctttacttaatgcccatacgctgtgtacagaacagaagtcaaattcgataccctgaccgatacggatcggtccagaaccaagtaccatgacttttttcttttcggatgtttctttcacttcgttctcaccatcatagcaagaatagtagtaaggtgttgctgcatcaaactcagctgcacatgtatctaccatcttatatgctgcatggatattatattcatttcttaattctttgatctcacgctctgtcttacctgttaagcttccgatcaccttgtctggaaattctaagcgttttgcttcctgtaataattctttgtctaatgtatcagctttagctaatttcttttccatctcaactaaaactgcaatcttatctaagaaccaacgatcgatttttgtaatattaaagatcgtatcgtaatcaaatccacgacggatcgcttctgcgatcacatagatacgaagatcatcgatcttttcaagttcttttaataactcgtcgtctgttaatttatcataatcaccgaagagcaagctgtccacatgctgctctaaagaacggatcgctttcattaacgccccttcgaagtttgttccgatactcataacttctccagttgctttcatctgagttgtcagagtacgttttgcatgaataaacttatcgaatggaagtctaggcattttaacaacacagtagtcaagcattggctcaaaacttgcatatgttttcttcgttactgcattttcaatctcatctaatgtatatccgattgcgatctttgctgttactttcgcaattgggtatcctgttgctttggaagctaaggctgaagaacggctgacacgagggtttacctcaataacgcagtattcaaagctgtctggattcaatgcgtactgtacgttacatccaccatgaacatctaattctgtgatgatgtttaatgcagatgtacgaagcatctggtattctttatctcctaaagtctgagatggagctactacgatactgtctcctgtatgaacaccaactgggtcgatgttttccatgttacagattgtaatacatgttccattttcatcacgcattacttcgtattcgacttccttccatccaccaatgtaacgttctactaatacttcacctacacggcttagacgaagaccattctcaaggatcgtctctaattcttcctggttatgggcgattcctccaccacttcctccaagtgtatatgctggacgaagtactgctggatatccgatcactttagcgaattccacaccatcttctactgttttaacaacctgtcctgcggcgatcggttccccgatcttttccattgtctgctggaattctaaacggtcttctgcttttttgatcgtagatggagatgtaccgatcaatttcactccggatttttcaaggtatccgctctctactaattccatggccagatttaaggctgcctgtccaccaagtgttggaaggatgctgtctggtttttctttttcaatgatcttttcgatgacagaagctgttaatggctcgatatatactttatctgcaatgtctttatctgtcatgatcgttgcagggtttgagtttactaagactacctccactccctcttcctgaagtgctctacaagcctgtgttcctgcatagtcaaattctgctgcctgtccaataacgatcggtcctgatccgattacaagtactttctttatatcttctctcttaggcattttttgctcctttcattctatccataaattcatcaaataagtaagctgtatcctgtggtccagggcatgcttctggatggaactgaactgttcgaatgtttttatttttatagtctaatccttcaattgttttatcatttacattaataaaggaaacttctgcaacatctggatcaattgtttcttccttgatcacatatccgtggttctgagaagaaatataaactcttccgctctttaagtctttcaccggatgatttcctccacgatgtccccaacgcattttttctgtgtctgcacctgttgcaagtgccatcaactgatgtcctaaacagattgcaaagataggtacctcgctgtcatataatttcttgatctctttgatgatctgtacacattcttttggatctccaggtccgtttgataacatgataccgtctggctgatctcctaagatttcttctgctgttgtatctgctggataaactgttacatcacatccacgtttttctaaagaacgaataatgttattctttgttccaaggtctaataatgcaactttaaatccatctccattgaaatgttctttttctgttctggaaacagtttttactgcatctgttactgtatattcttttaattttggaaggatttcatctaaattgaaatcaggatttgtggtgatcattccacccatgcatccatgttctcttaagatctttgtgatagctcttgtgtcaacaccacaaatacctggaatgtcatgttctttcagataatcttctaagtcttcttctcttctgaagttgcttgaagttcttgagatttctcttacgataaaggctgagtgccaaggtttttcagattcgatgtcctctagacatactccataatttcctatcagtgggtaagtcattacgactccctgtccctgataggaaggatctgttaatacttctaaatagcctgtcatggaagtattaaatacgacttcacagatcacttctttttgggctccaaaactttttccctcaaatacgtgtccgtcttccaatatcaaaaatgcgttcatgtaatttttcctcctaaaaagtctctttcatagggttgtattttgtcaggaagaactaacttcctatttataaaataagagttttgccaaaacccttgattttatataaaaaaaagaaataccctaaaataaaaattacaaagctaagtattggaaattcagcgatcttgtccttccaatacccaagttattttttatttcagaaatatttctctacaaattgtaaaaattttatcatatattttttgtcgttgcaagtacttttttgtatttttatatgtttttttctttattcatccgctcttcactctctcttttagaaaaaacacatccgcagaaattctgacgatacaaattatattctttcgataattgaatagatctctgataaccacctttctttttaaaatcagatggaagaaatctgactcctgctaattctcctgctttctgtccaagttcattcagccatgcagcattctttaatggactaatcgtaagggttgttgtgaaataatcatatccaccttcttgggcaagttttgccgcctgatccaatcttaatttgtaacaacgataacatctcttaccaccttctggttcctgttcatacccctttgccatatcaaaaaaagtctgcggggcatatccagcatcgatcactttaataggaagattcatttcactgaccagacgctgttgttcgtggactcttttttcatactcttctttggagtcgatatttggattgtagtagtcaatggtgatatcaaaatattgggagagatattccatgacatagctgctacatggcgcacagcaactgtggagtaatagggttggtttggtttctcctaagttttcgattactttatctaattgtttttggtagtttattttgttcattggttgtctctttctgattttgttttttactgttttctttctattatactagtatttatataaaaagaaaacaccggcagttaattgttagcactcttttttcatgagtgctaatttttacttgacttttatcaactttggttctacaatactctttgtaaaagttctatttggcatagaacacttgattaagatcataatatttttagataaaggagtgtacaaattatggcagaaacaaagggaactctttccattaacagcgataatattttcccaatcattaagaaatggctttattccgatcacgatattttcttccgtgaattaatctctaacggatgtgatgccatcacaaaattaaagaaattagatatgatgggagaatacaatttcccagaaggacataaaaacaaagttgaagttatccttgatcctgagaagaaaactttaaaattcatcgatactggtcttggtatgactgctgatgaagttgaaaaatacatcactcagattgcattttctggtgcaactcagttcttagaacagtacaaagacaaaacagaaggtgaccagatcatcggacattttggtcttggtttctattctgcatttatggtagcggacgaagttacgattgacactctttcttataaagaaggagcaaaacctgttcactggacttgtgatggtggtacagaatacacaatggcaacaggtacaaaagaaacggttggtacagagattactttattcttaaatgaagaaagcacagaattcgcaaatgaataccgtgcaagagagatcatcgaaaaatactgctctttcatgccaacagagattttcttatctgtagaaggtgccgaacaggaatttgagacaatcccagaagatcaggtaaaagacgatgatgtcgttgtagaacacatccatgaagatgcaaaaactgaagaaaaagaaaacgaagacggtacaaaagaaactatagaagtttcccctgcaaaagatcttgttaagatcaataaacgacctgtttctttaagtgatacacatcctctttggaataaacgtccaaatgaatgtactgatgaagaatacaaaaacttctatcacaaagtcttccatgactttaaagaaccattattctggatccacctaaacatggattacccatttaacttaaaaggtatcctttacttccctcagatcaatacagaatatgattctatcgaaggaacaattaaattatataacaatcaggtatttatcgccgataacatcaaagaagtcattcctgaattcttaatgttattaaaaggtgtgatcgattgtcctgaccttccactgaacgtatcaagaagtgctcttcagaacgatggattcgtgaagaaaatttctgattacatcacaaagaaagttgctgataagttaactggtatgtgcaagacagaccgtgaatcttatgaaaaatactgggatgatatcagtccatttatcaaatttggattcatccgtgaccagaaattcgcagataagatcaaagattacatcttatttaagaatatggaacataaatatgtaacattaagcgaccttgttccagctcctgcaaacgatgatgatgtgacaactttatactatatcacagatgaagttcagcaaagccagtatatcaatatgttcaaagaacaggatatggatgctgtcattttaaatcataacattgattctgcatttatcacacagattgaacagcagaatcagcatatcaaatttaaacgtatcgatgcggatgtcgaagatgcccttaaagaagatgtagatgaaaaagaattagatgaaatcaagacttctttaactgacctgtttagaaagactttaaacaaagaaaatcttgaagttcacgttgaaaaattaaaagatgcaaagatttcttctatcatcactttatctgaagaaagcagacgtatgcaggatatgatgaagatgtatgcaatgcctggtatggaccctaatatgtttggtgctcctgcacaggttctgactctaaatgcaaataatacacttgtgaaatatctgtttgagcatggagatgccgacaatgcgaagatcatttgcgaacagttatatgatcttgcgatgttaagccatacgactttagctcctgacgaaatgacgaagtttgtccagagaagtaatgagatcatggaaatgatcgcgaaattttaatttgtagttggccaactgtagattttgagtatatgataaaaaataaataaacgatcggaagagcagctagagaatttttctcacgttttttacagatcgctgatccgccggctttccttgcgtaactcgccttcaatgatattcaaaccagaactctttgaagctcaaacaacgcaccaagccggctgcgaatccgtaaaaaacgtggcaaaattctaatgctgctcttccgatcgtttatttattttttatcatataccagaagtc

SEQ ID NO: 832 - DNA, 276 bp, Unknown
  gut microbiota DNA sequence
aactcgccttcaaaggtattgaaaccaaaactctttgaggctcagacaacgcaccaagccggctgcgaatccgtaaaaaacatggcaaaattctaatgctgctcttccgatcgtttatttattttttatcatataccagaagtctaaagtgtggacaattacaagattgaaaaatttaggtggacgtgtatgttaaatcttatcagccaataccgtttaacatacacactgtgtagtgatttgaatagcgttccgttgtatgagtcagaaagaaga

SEQ ID NO: 833 - DNA, 115 bp, Unknown
  gut microbiota DNA sequence
cgattgtttgaacgtagctgcgggcattttggctcgcagcaagtgagttatcgaaggaacaggcgcggatcagcgatttgtaaaaaacgctttcaaaaatgcggagtgtcatcct

SEQ ID NO: 834 - DNA, 186 bp, Unknown
  gut microbiota DNA sequence
gaaatatttataagaaaaaaggatgacaacatgagcactttttgaatgcgttttttacaaattcgcagcgccctgtggttggatgtctgaccatagctgcgggcattttggctcgcagcgagggagacaatatgtaatgacccccaagtttgtaggatcgtggatttacctgtatactatgaattg

SEQ ID NO: 835 - DNA, 14693 bp, Unknown
  gut microbiota DNA sequence
tttcttcttatcttctttttgactcatacatgcaacactacctacaaactacaatttactcaccaaaacttattccaatcgtcttagcgtccttaatcatctggcacttcggatcaacatattttaattttccggcaacttcagataatggaaccttttttgtatcttcatcaacgataccaaccatatagccatactctttattaaggattaattcagcggcatatgctccaactcttgtagcaagtacacggtcgtaagcacaaggagcaccaccacgctgtgtatgtcctggaacggtgactctgatctcacgatttgttttttcttctagtgcagctgcaatctcataagcaacagaaggatatcttctttctgcaagttttgccttatactgtttcttctttaacttcgcatcttcttttgaaatagcaccttcagcaactgcgataatcgagaatttctttccagctgcaaagcggttttcaacaacttcggctactttatcaatatcataaggaatttcaggcagcaggattacgtcagctccaccagcaattcctgattgcagggtaacatgtccgactttatgccccataacctcgatgataaatacacggctgtgagaagaagctgttgtatggattcggtcgatcgtatcagttgcaatatcaacggcactctggaatccgaatgtcatttcagttccccaaagatcattgtcaattgtctttggaagtgttacaacatttaaaccttcttcacgaagcatatttgcagttttgtgagttccgttaccgccaagaactacaagacagtctaatttatatttgcggtaattacttttcattgcctcgactttatcaagaccgttttcatcagggatgcgcatctttttgaatggctgtctggaagttccaagaattgtacctccacggtttaagattccagaaaaatcatctggtgtcatacggtcagcaatatcgtagatcagacctttatatccatcgcggaaaccatagatctccagatcatttctctttacacttaaaccttttactacaccacgcatggcagcattcaatgcctgacagtcgccgccactggttaaaattccaattcttaacatgaatctatctcccttcgggttttatatttgcatttaaatcatctaacattagttaactactattttaacatataattatatacaaaaattataaaatttagtaaataaaacgttaagaaagcgtaaaatctgataaaaagataagatcatgatctttgttttcgtacaatcaaaatatccgataaaacagattaagaaaatataaaaatgtgcattgaaaataaataaaaaaccagataatataaatatagaaagtcacatatgaaatgtggcatattcacgacggaggaagccagatgaaaagtgatcgttttttaataaaagcagcagaactttattaccgtgatggattatcgcaacaagagattgcgaaaaaattacatacatcaagaaccagtatttccagagcattgatccaggcgagaaatgaagggtatgttcagatcaggattcaatatcctgaacaaagtgatcttgcattggaacggaaattagaagaaaaatatggattgacagaagcattgatcgctgttccggcatatgaacagtcatcggatcaagaagtagcgtttcaagcggtagactatattctaagagttttgaaaaaaaacatggtatttggaatgacatggggaagagccatgcatgaatttgtggagcagttggcgaaagatgaacgtcttagatctctttcatttcagaatgtaaaagttgttccatttcttggaacaccgggagcgatacagtcagattcatggaatacaacaacatattccaatacacttgcaacgaaagtcggaaatttattacactgtgcaagttataacttgtctgcaccaatgtatgtggaaggtacaaaagaaaaagagttgatcgaaagtattgatgaaatcgctaaagttcttcatatggcagaaacagcggacattgcattgatcggaatcggatcgatgcaggacgattcttcgattatcaaggcagaaatacggacaaaggaagaatacaaggaactagtgagaaaaggtgccgttggagaaatcgttggaaggatttatgacaagaatggccagacggttgatgaggatctgaaaagaaaaatggttggaatttcattggataagatcgcaaagataccagtcagagtcggaatgtcttatggaaaagataagatcgaagcaatcaaaggtgcgatcgcaggtggattagtgaatgtgttggtaacagatgtgccgacggcagagttattattaaaataatatagagataagaatatgaagctgatatgcaaataaaagtaagcatatcagcttcttttttattgtaaaaatcttgtaaatcagcactttttgtgtgatggaaaaataaaaaattgtattgacaaataaaaacgttgaatctataataaaaaatatcaaatgacaatgtacatggtcatatgaccacacgacgcaaacagaaaggaaaagggataagctatgaagacaagagcagtcagactttatggggaatcagatttaagattagaagaatttgatatgggagaactgaaagacgatgagatcttaatggaactgatcactgacagtgtctgcatgtctacttacaaagaatctattcagggagcaaaacatcagagagtcaacgatgatatcagcgaacatccgatcatcgtaggacatgaatttgcaggaatcattcgtgaagttggggcgaagtggaaagataaatatcaagttggaacaaaatataccatgcagccagcgatcaatatcaaaggttctatggcagccatcggatattcttatgaatactgcggaggagcagcaacctttatcaaagttccgccaattgtaatggaaaaagactgcttattaccttttgatgaaaacagtgcattttttgaggcatcactggcggagcctatgagctgtatcattggagcattccattctatgtaccacagtgaacgtggtgtttatgaacataagatgggaattgtagaaggtggaaagagtgcacttcttgcaagctgcggtccaatgggattaggagcaatcagttatatgttaaattgtaatcgtaaaccttctttactggtgatcacagacattgatgaagtaagattaaaaagagctagtgaattatttacagaagaatatgccaaagaacgaggtgttgaaatccattttgtcaatactgcgaaagtcgatgacccagtgaagacattaagagatttaactggtggaacaggatttgatgatgtatctgtatatgcaccagtcagaccagtgatcgagatggcagatgagattttaggatttgacggatgcttaaacttctttgcaggaccagtggatccaaaattatctgcgatgtttaatttctttgacgtacattataagatgcaccatctggtaggatcaagcggtgggaataccgatgatatgaaagaatgtttaaaacttgcaggagaaggaagattagatccagctgttatgatcacgcatatcgggggaattgatgcacagattgatacgatattgaatctcccaaagattccaggaggaaagaaactgatgtatcttggaaagaatcttgaactaacagcaattgaagattttgaagaaaaaggaaaaacagatgatagatttaaagaattagctaagattacaaaagaacataatggattatggtccaaagaagcagaagattatctgttagctaatttttaaaaatgatacaagtggaacttataaagtaaaattttagaatgaattttcgggaggatgaaacagatgttagtaaacagtaaaaagatgttagaagaagccaaagcaggacattacgcagtcccagcagccaacattgtaaaccttgagaatatcaaaggagtgatcgaggcggcagaagaaacaaaacacccattgatggtgtgtctggcggaggtacatacaccgacattaggtattgaagaagcagcagcgatcgtaaaatattacgcagaaaaaagtaaccaagatatcgcgcttcattatgatcatggatttacgatcgagttggttaagaaagctattgatgtcggatttacctccgttatgattgatggatcaagccttccatttgaagaaaatgtggcaaagacaaaagaaatcgtagcatatgcacatgaaagaaatgttacggtagaagctgaaatcggacacgtaggagaaggagacagctatcatgttgaaggaaatacaatgttaacaacaccagaagaagcaaagaaatttgtagaacagacaggagttgattcccttgcagtatctattggaacagctcatggagaatacaaaggaattccacatctgaattttgaaagattgcaagaaattgcaaccgaggtttctattccactagtacttcatggaggatctggttctggagatgaaaacttatccaaagcagtagaacttggaattgcgaaagtaaatatttgtacagacttattaaatgcagcaagagataatacaaaagatggatatgccgaaagaagttactatgatagtgtaacacttgcaaaagatggatttaaagattgcctgaaacattattacgaagtattccatacaaaataaacaaaaagaaatgcgaaaacatacaattcaatattgacgaatcgccattttaagtgttaagatagctctatatgataaaagcgaagaaggagacagtacttctatcatgaacgcatgagcgagtccggggcggtggaagccgggtgttagtaagataagaaggaagatcactccgaagctgcaggctgaatgaagtaagctgtgccggtatcctccgttaacgggataacatatgatagtatgtgaaataggtggtttagaagcaacagcgttgtcctattttggacagcgctttttcttattttttcctatttcattagattttctaagaagtaaaaggagagatgaagatgtacaagaaagtatcatctgacatgaactttgtcgatcgagagaaagagaccgtaaagttctggaaagaaaacgaaatttttgaaaagagtatcgaagaaagaaaagacgatccgacatatacattctatgacggaccaccaacagctaatggtaaaccacatatcggacacgttttaactcgtgttatcaaagatatgatccctcgttaccagacaatgaaaggtcataagatcattcgtaaagctggatgggatacacacggacttccagtcgaacttgaagttgagaagatgttaggtcttgatggaaaagaacagatcgaagaatacggtatggaaccattcatcaagaaatgtaaagaaagcgtttggaaatacaaaggtatgtgggaagatttctcagatacagtaggtttctgggctgatatggagaacccatacatcacatatgataataactttatcgaatctgtatggtgggcattaaaacagatctgggataaaggattactttacaaaggatttaagatcgtaccttactgcccacgttgtggaacaccattatccgcacaggaagtggcacagggatacaaagatgtcaaagaacgttcagcgatcgttcgctttaaattagtagatgaagatgcatatttccttgcatggacaacaacaccatggacacttccatctaatatcggtctttgcgtaaacccagaagaaacatacgcaaaagtaaaagctgcagatggatatgtatactatatggcagaagcactgcttgatacagttcttggaagattagcagacgaagaagcaggaacacctgcatatgaagtcttagaaacatacaaaggaaaagatttagaatacaaagaatacgaaccattatatgactgtgcagcaaaagttgcagagaaacagcacaagaaagcattctatgtaacatgtgatggatatgtaacattaacagatggtacaggtatcgttcatatcgcaccagcatttggtgaagacgatgcgaaagtcggacgcaaatatgagatgccttttgtacagttagtagacgaacgcggtaatatgtcagaagaaacaccatttgctggattatttgttaagaaagcagatccagaagtcttaaaagatttagagagccgtggattattatatgatgctccaaaattcgagcatagctatccacactgctggcgttgtgacacaccactgatctactatgcaagagaatcttggttcatcaagatgacagatgtaaaagatcagctgattgcaaacaataatacagttaactgggtaccaaagagcatcggtaaaggacgttttggagactggttagagaacgtacaggattggggaatctcaagaaaccgttattggggaactccattaaatatctgggaatgtgaatgtggacatcagcattcaatcggttctatcgaagaattaaagagtatgtctgataactgtccagacgatattgaacttcaccgtccatatatcgaccaggtaacaattaagtgtccacattgtggaaaaccaatgcatcgtgtagaagaagtaatcgactgctggttcgattcaggatctatgcctttcgcacagtggcattacccatttgagaataaagaaatcttcgaagataacttcccagcaaactttatctcagaagctgtagaccagactcgtggatggttctactccttaatggcaatttcaactttattatttaataaagcaccatataaaaacgttgttgtattaggacacgttcaggatgaaaacggacagaagatgagtaagtccaaaggaaatgcagttgatccattcgatgcattagaagagcatggagcagatgcgatccgttggtatttctatacaaatagtgccccatggctgccaaaccgtttccatgcaaaagccgttacagaaggacagcgtaaattcatgggaacattatggaatacgtatgcattctacacattatacgctgagatcgaccagtttgatccaacaaaacatgcgttagaatatgacaagttatctgtaatggataaatggctgttatctaagatgaacacaatggtcaaatctgtggatgataacttaggaaactacagaattccagaagctgcaagagcattacaggaatttgtagatgatatgagtaactggtatgtaagacgctgccgtgaccgtttctgggcaaaaggaatggaacaggataaggtaaatgcatacatgactttatacacagcattagttactgtatgtaaagcagcagctccaatgatcccattcatgacagaagagatctaccagaacatcgtaagaagtgttgatgcatctgcaaaagaaagtatccacttatgcgacttccctgtatacaatgcagaacaggtagatgagaaattagaagcagatatggatctcgtcttaaagatcgtcgtattaggacgtgcatgccgtaatggagcagcgatcaagaaccgtcagccaatcggacagatgtatgtaaaagcagaagcatctctgccagattatgacgaagcgatcatcttagacgagttaaatgtgaagaatatcacatttacagatgacgtatcaaacttcacaacatacaacttcaaaccacagttaaagactgtaggaccaaaatacggcaaattagttggaggaatcagaaactacttagcagcagttgatggaaatgaagcgaaagctcagttagactctaagggagtattaacatttgaagttgatggaacaccagtagaattagcagaagaagatttgttgatcgaaatggtaaaacaggaaggattcgtaacagaagcagacaacggagtgacagttgtacttgatacaaacttatccgaagaactgttagaagaaggattcgtccgtgaagtagtcagcaagatccagtctatgagaaaagaagcaggattcgaagtaacagatcatatcacattctcttacaaaggatcagacaaagccgcagacatcatcggaagaaacgaagcagcgatcgctggagatgttttagcagatgaagtgaaagccggagaagttgccggatatgaaaaagaatggaacatcaatggtgagaaagttactttaggtgttgaaaaaagataatttcatataatgatgagagtgtcaataagtataaattgcttatttgtgcaagcacaaacgcaatctatacttttgacacttacatcatataacgaagaaaatataaaaaagatcagctgtagaaagttttacagctgatctttttgctattatttatgaaattttctttgaaagtgaaatcacattaagaccatgttcttccagaaaaatattaatatcaatgagattccatttttcattattaatatgcatcatgatcgctgcatcccttgggacctttgcataaagttctcctaactgagcgatccgaagagcatgctgcgtcgttttcagattcatgtgagccccaagacacaaagcaagcagataatctctggaaggatgaggcttcgttccatttaagatttcatgggcatagctttgtgatatcccactgtttttgatgatctgcgaaattttcaggtcatgctttgcaatataaacagagaaaaaatcctgcaggcttggtaactgctgaagattcttaagataatccgaaaaattctccaaagaagtagattttaattgttgatctaaatgatcagttaattgatcctgcatatgtaaatatcctttctctctttgtgcttataataaacgatcattgccccttctttaaggaaactgctgcaaataccgcacaaatcagacaccaggcagcccatacatttaaatctgcataacttcctgccatagtaaatccgcaaagtgcaccaagtgcaaataaaacgatcagtgcgatattaccgccctttgaaccatttcttgtagcaatagaaacaattccaccagccaataaaatgatcgcaacgatcaatccggcagaaccgccactttccccattttctgctaaagaatttgaaattccagcagcacaagactgaaacataacaaaagcaaaaagtacaattgagatgattccagaaactaatttccatgtcttcatatttaaattctcccttctatatttaacaatattaagattagcaaatattcacatagaaatgtttcgctgacagcgtaaatttttactgcgagcgataaagaacctaccatatgatttcttcgatcagcagcataaagatcataagaatgaccaaaatccccaaagaaatcagacactgtagaacaactcgaagtacaaaagggagagaatgacccagaaaagatctggttcggatatttttgtagttgaaattataaaaaataaggctgagtaacatcagaaatacaaaaaaacgttcatgccatagttgtagtccagttagaggaagtccgtttttggcatttgtgaaatctgaagtcatactacagtaaagaaaagagagatacccgaagaatgccaagatcattttccacagctttccagtacgaaatcctggaatatcagaatgtatcgaagaaagcgtaaatccagtttttccaatatcagaggaaatattatcgtgtaaagctgtcttaagttcctcaaccgtctggaaacgttcctcaggattccatcgaatacattttgaaatgacggaacgatatctgtcatctgccaattgatgttttggatattctcctgtcaataagcggttaaaaataatccccaatgcataaatatcagatcgggcatcagactgcccaaatccatactgttctggaggggcatattctttggtcccaagcaattcggtatcttgttcctgcccagattcataatatctggcagtatcgaaatccacgatatagacaagattttcactggtcaaaatgatattcgacaatttcagatcacgatgaatgatcggaggagtcagagtatgaagtgattttaacacatcacaaagcttatgcatgattgcaagagcatccgaatagaccagcgttgtctgttcctcaagcaactgttccaaagtttgtccatgaatataatcttcaatcaggatcaaagaatcattttcaaggatcaggtcatgaatttttggaattccggagatttgtaagtccctcaactgtttataaacatccaaagaaaatctggataaaactttcttaacgaaaatttcacccgacagtttatgtttaactaaatatatatgattgtgatttccaagagtcgtcagttcctcatagcaggatagacgatattcttcttctaaagtcatgtgttaggattccttttggtttatgtaatatgtcgttgaataattgttatataattagtttaacataggttgattatggaggaaaggtgtagagaagatggattgaaaacatgaaataactatagtatactaaaaataaataaaatatgtggaataaactggaaaacacttaaatgtatttgagatagtatatctgacagaggaacaaatagagatgtttcagagtgatttcggaattattgaggattattttgtgaagagaaggaaagggtataaaaccattgaaaattataaacaaattaaacatgtagatgagatgctgaagtttatgaggatttttgttgaagatgaaagattttgaagttaaatttagagaaaaagaagaagggagcaattacaatgtgtacaatattagatgcagcagaagaaagaggagttaatagaggcgaaacactaaaattgattatgatggttcaaaagaaaataaaaaaaggagattcaatagcaaagatagccgatgatcttgtagaagatgaaattgtgatttcgccaatatataaaatggtaaaagaatatccagaagatacggagagagatatttatcagagattaaattaaagtgataaaataactcagataaaacaggaactaaatatagaaagaagaaatttacatgaaaacaagacaacaagcaatcacttacggtctaactttcccgcacacatatgtagaatctccattcaaagatcctaattgggaattagtaagggtaaaaggaagtaaaaaagctttcttatgggtctatgaaaaagatggttatatcaatctgaatatcaaagtagatccagaatggagagaattctggagagaagcctacgatgccgtcatcccaggatatcatcagaataaaaaatattggaatacgatcatcttagacgggactattccagaaaaagacatcaaaaaaatgatcaaagaaagctacgatatcatcacggacagtccgacaaaaagaatctacgaagcagtcaaacaaattccaaaagggcatgtggcaacctatggacaagtagcagccatggcaggaaatccaaagatgtcacgagcagtaggaaatgccctgcataagaatccagatccagagaatataccgtgttttcgagtcgtcaatgcaaaaggagaactagcagaggcatttgcgtttggaggagaaggaaaacaggcgaaattgttagaagaagatggagttgtggttgttgatgggaaggttgatctggatgtgtatgggatgtagggaaatatgatttaaaagaactagaatttttccatcaaatccattggaaaccactactcaaaatgttaaaataaccacaaaggaagtgatgcacaatggaatattacggaaccttgggaccaacctgttgcgaaccaacgattttaaagaagatgtttgatgccggaatgacagggatccggttgaatttatcacatagttcattagaaggaagccatgcatggatttatcattattttgaggcagcgaagcagacaaatggagagaagaaattaatgatcgatctgatcgggccagaacttcgaattggatatctggaaggagatatgggcctttcaacaggagcacatgtggttataggacatggtggaattttagtaccagaagaaatcatgccgcatatcagaagagatcaggaaattttattagatgacgggaaaataaaactgatcgcagaacggaaaatatcaccacgatcctggagatgccgcattgtctgtggaggagtattgacggcacgtaaaagcatagctttgccaggatgtaatatcaacaatccgacgttaactgaggctgatctgaagaatctatctttggcaaaacaatatcaagtaactgatgttatgctgccatttgtacggaataaagaagatctgatcatactaagagaagcactaaaacaaaacaacagtgaagatattcgaatctttgccaaaatagaaaatatgacaggagtagagcatttggaagaattacttccatactgtgattatattgttatagcaagaggagacttaggaaatgtcatgccattatccgaacttccaaaagtgcaggcatatattgcaaaggtatgcaaagaacataacaaaaatttcatggtagttacacagatgctagactctatgatccgaaacccttatccaacaagagctgaagtaaatgatatttatcatgcagttcatcaaggagcgaatgcattgatgctgacgggggaaaccgctcacggcagatatccggtagaagctatgaagatgttagtagaaaccgcaaatgggagtttagaagaattatgatgaataaaaaatggtggcataacaaagttgcatatcaaatttacccaaagagttttaaggatacaaatggtgatggaatcggcgacattcctggaattatcagcaagttagattatttaaaagacctaggggttgatattttgtggatatctccgatgtatcagtctccgatggtggataacggttatgatatttccgattattatgcgattgatccgatgtttggatcaatggatgagatgaaacaattgatcaaggaagcaaagaaaagaaatatgtatattctgatggatctcgttgtgaatcattgttccagtgaacatggatggttccagaaggcaatggcagatccagaaggggaatatggatcatatttttatatcaaagacgggaaagatgggcagccaccgaccaactggagatcttattttggaggcagtgtctgggagaagatcccagggtatgacaataagttttatttgcattcttttgcaaaagaacaaccagatctgaactgggagaatgagaccgttcgtgagaagatttatgagatgatctgttggtggatggaccaaggactttcaggctttcggattgatgcgatcatgaatataaagaaagatctgacatggagtaatctgaaaccagacggtccagatggactcgcagatgtatataagatcacaggaaaagtcgaaggaatcggagattttttgatggagatgaagcatcgttgctttgaaccatatgatgcactgaccgttggggaggctatgtttgtaaaagaagatattcttccacaatttatcggtgaagacggatatttttctacgatttttgcatttgaaccatgccatgcctatcggaaaggcaaaaattatatgaactatgactggccacagtcatttgatgaatggagagaggaaacttttcataatcaagagattgttgctaaggcagggtttgaagcgaatatcattgagaaccatgatcagccaagaggggcaagtctgtttatcccagaagaagattatggattttacagcttatcagcacttgcaacgatcattttctgtgagagaggtctgcctttcctatatcaggggcaagagatcgggatgagcaatcgtcaatggaaatatgatgaatttaatgatctggaaacgatcaatcagtatcagatcgcattgaaggcaggaatgtccaaagaacaggcattggagatcgcaagacatcacagcagagataatgcgagaacaccaatgcaatggagttcagaagaaaatgcgggattttcaaaagggaaaccttggatgccagttaatgaaaactataaagtggtgaatgtcgcagaagaagaaaaagaatatggatcgatcctgaatttttacaagcgattgatcgcattttataaatcggaagaatataatgagatactaacatatggtgatttcagaccaatatatgaaaaagaagatcatatttttgcatacagcaggtcttatagatgtcggaaactggtattgatctgtaacttcagttctaaggaaaaagatattgaattatcagaagactatgaaaatgttatatttgtgaattatgaacagacaactgtcattggaaatacgttaaaaatgaaaccgtatgaatgtgttatttatgagatgtagattaaaaaagaatcctgaatgatcaggattcttttttcagactgtagacaaagtcccggtatttgccgggacttttactatgagcactgtttttctggtataataaaattatcagaaaggcggtgttttttatgatgacgaaaaatgcagacaagaaacgagaacagatgatgatgttctcaatggattccatggttccgcaggatcat

SEQ ID NO: 836 - DNA, 24097 bp, Unknown
  gut microbiota DNA sequence
ggaattgacggaacgatacgttgaggggattctgttatcctgtggggcgcagcggagcaaaatgacctgccaagacgggatggtccctttcatgagcaggcttttgactcaaaatagaagacggatcgaatattccgcagtgataccgtgaagggagggaacggcatggaggcgcagcctatgaggctacaggacctgagactcaaggaaggaatgtctctagaacagctggccgagctctccggcgtggatcatgatcgtctcgtcatgttcgaaaacaatccggaaaccatacgcaatatgcatttggacaccgctcgccaaattgccaaagcattgcactgcaacgtgttggagctccatcccgacgaaggttggagaggcggaatccactgcgctgaatccgggctaagagacattcgtcggactcgcggctatacgcaaaacgagttgtcagagatgacagggattccccagccgaacatttcttggtttgagacaggctatcgctcgacctcaggcatgcggctggatacagccaggcgtctgtcggaagcgcttcgatgcgatccgacagatttcctaaaagaagcgtatagccgatatgaaaataaatgttgtatctgatttagataaaacacttaaatttcatcggacgccatacttcaacaaacgaatgcatcccgcgcacctcccatctcaccaaaaagattaggcaagaaagaagcccatcaatcattgacttcacaaacctttcccttccagaaagctggataacgtccgagattttgcgcactttcggacgttatctggcgcggaggacgcatttgcgcagttcggaagcgatgagcacgatcatggcaaggccgaggcattcgacccatgcgccgacgctgagcggtaccgtaccgaaagcggtgttgaggaacggaatgtaaatcaccgccagctgcaataccatgctcagcgcgatcgcgccccatagccacttgttggagaacagtccgacgaacgctgactgcaagtgcgagcgcgaggcaagcgcgttcagcatttgcgcgaacacgagaatcgtgaagcccatggtgcgtgcttccgtcatttgtgcgtcgtgaccgatcgcatcgacggaacggtcggtgaacagaccgccgtccaagtgcatgtccatgccgatcagggtgacggccgccataatcacaccgatgaaaatgatgtcgccccacatttcggcgtcaatcacgcgatcggtgagtttgcgcggcttgcgcgccatcacatcgtcggtggacgggtcgacgcccatggcgagcgcgggtgccgcgtcggtgagcaggttgatccacagcagctgcgtggcaagcagcggcacggtcacgccttggctgccgggctgggtgatgccgaggaatccggcgagcatcaccccgccgaacacggtgaacacttcgcccacattggagctcagcaggtagcgcaggaacttgcggatgttgtcgaaaatgccgcgtccttcacgcacggctgcgacgatggtgctgaagttgtcgtcggcgaggatcattttcgcgctctgcttggtcacttcagtgccggtaatgcccatggcgacgccaatatcggcggttttgactgcgggagcgtcgttcacgccgtcaccggtcatggccacgatattgccttgccgttgcaaggattcaacgatcttcagcttgtgttccggcgcgactcgcgcgtagacggacactccgctggtcaccttgtcgaatgccgcttcgtcgggcagttcgtcgagttggctgccggtcatggccgtgccgcccttgtcgataatgcccagatcggtggcgatgcgcgccgcggtcagcgggtgatcgccggtaatcattaccgtacgaatgccggcgcgatgcgcttcggcaaccgaatcacgcacttccgtgcgcggcggatcgatgatgccgatcatgccgacccaaatcaaatcgttctcaagcacatcgctttgttccgcaatatcggcaacatgacctgcggaattcagcatgattcccggcacttgcgcaagagaagcggtaccgagcggacgataagcctgacccaacgtgcggtatgcgtcggaggaaagctgttcgacagtcgcaagaatctgctgacgatcaccttccgtaagtgggcgaacggcaccgccgaccgcaatcctgctgcaatatccaagaagtacatcgggggcacccttggagaagacggtcaggcggccggcgtcagcgttgtcttgcgccacgatggacatgcgcttacgttcggaagtaaacgggatttcgccgacgcgctcgtagttggcgtacttgcgatccgccttcacttttcgtgctgcgacgatgagtgagacttcggtcgggtcgccgaccgcctcccacgttacgttttccgcatttccggcagaagcagcagattcgcgcagttcgccgtcgttcgccaacgcgcccacggcaagggtcgcaacggcttccgattcgatgatcccgcgtatttgcgcatgttccatggtctgtggatcgaccaccatgcggccttccggcgcatagccggtgccagtaagctgcacttcgccgctcggagtgaccacacgctccacggtcatctcgttgcgggtgagcgtgccggttttgtcggagcagatcaccgacgcagatccgagcgtttccaccgaatgcagcttcttgacgatcgcattgtgcatggccatgcgctgcacgccgagcgcgagcaccaccgtaagaatcgcagccaaaccttccggcacggccgcgaccgccagcgagacggccaacagtagcgaatcgatcacatcgtgaacgtcttggaagccttcggtaagcgcgagcgcgaccagcaccacgaccgcgatgatgcataccgcgctgccgaggattttggaaacgtagttcatttccttttgcagcggggtttcgtcgtcttccgtggcttgcagcagatcggcgattttaccgacctgcgtgcccatgccggtgctggttacgatggcgcggccggtgccttgcgttacggacgtgccgttgaacaccatgttggcgcggtcgccgagggccttcgcctgtgcgagggtgtcggtctttttgccgacgggcacgctttcgccggtgaggctggcttccgcgattcgtaggctggcggcggcgaagaggcgtccgtccgcggaaacggagtcgccttcgccgagcacgatgatgtcgccgggcaccacgtcaaccgtgttgatgcgttcgattttgccgtcacgcagcacgttggtttgcggcgcggtcatgctggagagcgcttcgacggcggcttccgccttcgattcctggatgtagccgagcaccgcgttgacgatgaggatcagcacgatgacgatggcgtcgaacggcaatgcttcgccgccttccgcacccggtacggcgttggctcgttcaatgaaccatgcgacgagcgaaatgccggttgcggccagcaacaggtagacaagggggtctttgaattgttcgaggaatttcttccatttcggcaccggtggtgcggacgcgagttcgttcggtccgtacttgtcgagtcgacgcttggcttccgcttgactcaggccggtattcaaatcgacaccaagcgattgcgctacggtttgcgcatcggcgagcgacggatcgacttgcgtttgcgtcgcggtttttgctgcttgttcgaaatttcccgaactggtatcgcggaattgggtggattgatcttccttgcgatcaaccatgatgatctccttgggagcgccgcggagtagtcagccctcccctgccgttgcgatagtgcgaaaactgcggaaaattgcgattttcacagattccgtctgacagggcaatgctgcgcggttgtggacaccggacgtgcgccatcggtgcattcctgccattattacacaccgtgaccattttgcaagagcgcaacgcaccgtcttttgtcaagatttcacaaaatcgtgaaacataatctgcaatcttatttcgaccgcgcattcgattacacggcaacaccgacggcaatgtcgctaccatctttggcggaagtgtgatatgttatcggatgttagtaaacaaaattacttacgctatgattcgtagcgtacattggcaacgtcgcaatggataggggtagttatcatggcagctcaagaagccgcgcgatcacagcaaacgcaaggggttccggaatcgcgcatcctgcaggcgcggcaggcgaacgcaagctggctcaccgatccgaccgtattcgcggtgaatcgcaagcccgcgcactccaatcatcggtatttcctgggcgaagccaccgaaccgaagcagaatctcgacggtgtatggaaagtaaacgttactcaggccgcatccatcgacgtggaaaacgcgccgttcgccgcagctgacttcaacgatgccggtttcggcgcgatcaacgtgcccgaacacctgcagatggccggctatttgaagaacaaatatgtgaatgtgcagtatccatgggatggccatgaggatccgcaggaaccgaacgttcccgaaaacaatcatgtggcgatctaccgccgttccttcacgcttgaccgtccgctcgccgcgacgctggaaaatggcggcaccgtcagcatcacgttccacggcatggccaccgcgatctacgtgtgggtcaacggcacgttcgtcggctatggcgaggatggtttcaccccgaacgaattcgacatcaccgaagcgttgaacgttgacggcgacaacgtgctcaccgtcgcctgctacgaatacgcgagcgcctcttggctggaagatcaggatttctggcgtttgcacggcctgttccgttccgtggagctcgccgcacagcctcgcgtgcatgtcgaaaccgtgcagatcgaagccgactacaatccctccatggccgccggaacgctgaatgcaaccctgcagttgcgcaatgcaaacgacgcggccaccgtcaaggcgaaactgcgtgacgcaaacggcactgtggtgtgggaatccacgcaatgcgccaacgaaaccatcaccctcaattccggcgcgctgaagaacattgcgccgtggagcgccgaagagccaaccctgtatgagctgacggtgcttgtcgtcggccacgacggcccgctggtcgaaaaaatcgtgcagcgtatcggcttccgcacattccgtatcgaagacggcatcatgaagctcaacggcaagcgcgtggtcttcaagggcgccgaccgccacgaattcgacgcgaagcgcggccgctccatcaccaggcaagacatgatcgacgacatcacgttctgcaagaggcacaacatcaacgccatccgcacctcgcactaccccaaccaggaatactggtacgacctgtgcgacgaatacggcatctacctgatcgacgagaccaatatggaaacgcacggcagctgggttgcgaacaacatcgaaacccccgaaactgcggtgccgggcagcaaaccgcagtgggagggcgcgtgcgtggaccgtatcaacagcatgatgcgccgcgattacaaccatccgagcgtgctcatctggtcgctcggcaacgagtcgttcgccggcgaagtgttccgcgcgatgcacgcccacgcgcacgcgatcgacccgaaccgtccggtgcattacgagggttccgtgcatgatcgcgcgtttgacgatgtgaccgacatcgaaagccgcatgtacgcgcacgccgacgaaatcgaggaatatctcaagtccaacccgaagaaaccgtatatttcctgcgaatacatgcacgccatgggcaattccgtcggcaacatggacgaatacacggctttggaacgctacccgcagtatcagggcggatttatttgggatttcatcgatcaggcgattctcgacagcaacggccgcatgtgctacggcggtgatttcggcgaccgtccgagcgactacgaattctccggcgacggcctgctattcgccgaccgcacgccgtctccgaaggcgcaggacgtcaagcagctgtacgcgaacgtgcatatgaccgtcgatgcttccggcatcacgatcatcaacaacaatctgtttgtttcgacggctgattccacgtttgtgttgcgtattttggctgatggcaagccggtttggtcttcttcgcgccgcttcgatgttgctgcaggagcaagtgaacatgttgagatcgattggccagttgacgattaccgtgcaagtgcgcaggagctggttttggaggcgtcccagcagttgacttccgcttgcgattgggctccggctgggtatgagctttcgttcggccagtgcgtggttgcgggtggcaagaacgtctctgcgggcgatgcagttaacaccacttccgatggagcgatcaccttgggccgctggaatatcggcgcacgcagtgcgggccgtgaagccctgttctcccttgcacagggtggcatggtgtcgtacaagcttggcgagcgcgaattcgtgttgcgcaagccgctgatcaccacgttccgtgcgctgaccgacaatgatcgcggcgcgggccatgcgttcgagcgtgcgcagtgggcggttgccggaaagtatgcgcgttgcgttgatacgaaggttgagccgctcggcgaaaccgcagtttccgtcacttacacgtatgagcttgcgattgcgcagcgcacgaaggtcaccattcgttacgttgccgacgtgcttggccacgtcgatctgcatgttgcgtatccgggtgaaaaggacggcgatctgccgacgattccggcgttcggcattgaatggatgctgccggtcgagtattcgaatctgcgattctatggcgtaggcccggaggaaacgtatgccgaccgcaagcatgcgaagctgggcatttgggatacgaacgccttccgcgatcgcgcgccgtatctgctgccgcaggaaaccggcaaccatgaggacgtgcgttgggctgagattacggacgattctggtcatggcttgcgcgtgagccagactgcgaatactgaaaccggcgttacgaagccgtttgcgatgagcctgctgccgtattcgagcacgatgcttgaggaggcgctgcatcaggacgagctgccggagccgaagcacatgttcctgcgcgtgctcgccgctcagatgggtgtcggcggcgacgattcctggatgagcccggtgcacgagcagtatcagctgcccgccgaccagccgctcaacctcgacgtagccctcgacctgttctagtttcaaggattcagtcgattcctacgtgcgaaatgtctcccgattcttgatttcaaggatcgggaggcattcgttgtgccgcaaggtgactttcggcctcacgattcgcagttctgtctcacgatttcgcaagatcgtgcgacaattcggaaaaaacatgcgatcagaccatcaaaatggacgatgagggggattttgttgatggcttaaattagacggattgcctagaatgagggcagaacttccgaaacgttcgagcgcaggcgggcaaattcgcgcgcgtccgagcgtcacgaagcacgctcttccaggaaaggggccatcatgagcgacgcaatgaacaacccgtatgcgaacaatccgaatcaaaatggcagcaacggacagcagccgcaaggccagccggaatacggggcatacgcaccaaaccagcaatcgcaatcccagcagcagggcggcaatcccaacaattcgggcaatccgtatcaaagcgagcctcagaccccatgctacttcgacggtcccaacgccaacccgaatcccaaccagaacggcttcttctacgcgagctacaccaccggtcagccgtacggccaaccatacggacagcagaacagccaatccgacgctgacaacggcaccaacaattggcagccgatcagcccgttcaagctcgtggaggaatggctcccgaagaaggcaaagaacgcgatccgcggcacgtatgcggtactcggcatcgccgccgtcattctcggcctggcactgctgatctggccgggcgccacactgaaggtcgccgcaatcgcgctcggcgcatacttcgtggtttccggtgtggtccgcattgtgaccgcaatcgtggaactcgggcttccgggaggatggcgcgtgcttgacattctgatcggcctgatgctgtctgtcggcggtgtggtcatgctgaaaaacgcggcgctttccggagccacactcgccgtgctcatcaccatggtggtcggtctcggctggatgctggaaggcgtgatggcgctcgtggaatcgtggcgcatgccaagctccgcatgggccgtaatctacgcactgctgtcgatcgtcgccggcttcatcgtgctgttctcccccgtcagctccacgacctggctgatcctgttcggcggatgcgcacttgtggcgatcggcatcgtcgcgatcgtacgtgcgttcaccttcggcaagtccaagagcaagtaattttttgcggcgcgggccgtaaagtctgattatctctgttttcccaggggcaccaagcaacagctcggtgccctttccatagcgaaatcgctttttataccaagattcaaagtcgcacaaccatgaatcttggtattaatactggtatataattgggtatgaaattcggttttaagaaaggtttatcatggcaagcgcacttgacatactcgatgaccttgttccaatcagcgagctcagcaatggtcgtacttccgcattgttgcagcgggccgaccacgatccagtcattctgatcaaacgaaacaagccgtcctacgttctcatgaatatcgaaaactatcgcgctctcatggaacgaatcgaagacaacgaagacttgcttcttgccgaaaaaagactcgacaacagtactggcacaactatcagcaacgaagaggtcatgctcgatctcggcatttccccaagcgacctcgccgaggcacctgagccggaactcgcatgaactggcaagttgaatggcttgacgaagccaagaaagacatgcgcaaactcggcaaagccgagcaaatccaagtactcaagggaatcgagaaagttcgcacaaacccactgcccacctcgcaaggcgggtatggcaaaccgttacgcaatgccgaacgaacgaaactttccgggctttgcaaaatcagattcagggatatcggcattcgcgttgtttacaaaccgttactgcgaaatggaatcatgaccatcatcgtcgttggcattcgttccgatagtgacgcttacatcaaagccaacaagagacgcaaagaatatggactataagatgcgtccgccaattttcagcgaacgttactttttcttcaagattagccgatgattttacaaaagaagtgacgatcgtcgcatgacattgtcgatttgcccgacgtaagatgaaggcacaacagaagaacgaagaaaagaaaatagacaacaaacacagacttacggcagcggccagaggaataaacaagaaaacagatacgcgccgccaagccgaacgaaaggaaacatcatgaagaacaacactttcaaccaggtcatcaacgccaacctcgcttccatcgatccgggcttcggccagttcgctctcgccaaggcttcctccgacctcttcaagaaggtcctcaacaaataagaccgcttcctagacgggaggcaaggcgcaggcgccacagcacctcgcccctcttctttccaatccttaaatcacatagcgggaggccgcggttccaaacggaatcgcggcctcccgcttttcacgtacgccggctacccctcctcaacagcgagattgcgggcggcggcgcgttcgcgtgggccgcgcgtcacgtagaagccgattgccacgatgacgaacatcaccgtgcagcagatccacagcacacggctgccgaacgcgttgagaatccagcctccgaccaacggcgagaacgcgttcgacagcgaccacaccaggttgtataacccttggtaggtgccgcgcacatcctttggcgcgatgttcgccaccgttgtggcggcaatcgggaacgtgcccagctcgccaagcgtccacagcacggtcgcgattgcgaacgccacccacgaattcgcgccgatctggaacgcgtatccgaccgccgtgatggacatgccgagcaccagcactcgagtgttgctcatccgctggaacagaccgatcgcgggaatctgcagcagacacagcaggccgccgttgatggtcagcagactggaatattcatccgtgccaaggccgatctgcgtcatggaaatcggcaggccgctgacgatctggtaatacgccagcgtgtacaggaacatcagcaccaccatcgacatcagcgcgccgtcggcgcatgcgcgacgatagctgcgccatacggagaaccgctgcggccgctgcgattcgccggtttgtttcacagcatgttccacggcatttcccgcagctgattccgcggcttgcgacgcccgcgccggcgcgacctcgccccgcgggcgcttgcccagcccgacttccttgaagaacacgatcatcaagatcgtggcgaacaccagcaccgcggcttccgcgtagaacatcagcgcataggagatcttcaccaactggttggcgatgatcgggccgatcgcgaagccgaaattcgcggcccacgtctgcagcgaatacgcgcgcttctgtttgcggaacggcaccacgtcggacacgtacgccgcgaccgctggcgtcggcatggatgagatggcgccgtaggccagcagcgcgatcgccatgatccacggattgccgatgaacgccagcaggaccagcatcgcggcggagccgagattgccgatgacgatcatcgccgggcggccgaagcggtcggacagcgcgccgccatacaggcagccgaagatgccgccgaaaccgtacatggagacgatggtgccggccacgcccgcgctgacatgcatgtcagacaccagatacatggaaaggaatgacgtgacgaagcggcccatccacaggataagcagcgtgacccacaagccccagaacatgaggggcaatccgaaaatctctttgttcttctccattcttgccatcatatcgagcaatatcgagcggacgcgacgccagtagccttttcccggggtgctgggagaatggacaactatggcaatgaaaaaaggaccgaccaaggggtcgggtggaaagcatcgtaacgcgctgaggggcaagggaccgacccccaaggccgaagatcgcgtatatcacaaggcttacaaggaaaagcaggctaccaatcgtcgtaagatggctgatccgcgactggcggcacgccgtcgcgcggcaaagttcagctcagaatccgacgatctcgtcatcggtcgcaacgccgttctcgaagcgttgcgctgcggcgtgcccgcgagcacgctgtatgtggccgcacgcatcgaacacgacgatcgcacgcgcgaaatcattcgtctcgccggtattcacggactgaacctcatggaagccgaccgactggaaatggaccgtatcgcacgctcctccaaccatcagggcgtggtgatgaaggcgcagccgttccagtattcctcgctcgccgagctggtggaacgcgcggacaagaagtctcgtgccatggaagcggccaactccgcaagcgcacgcattgcggcacgtccgctgttcatcgcgcttgacggcgtcaccgatccgcagaatctgggcgcggtcatccgttccgcagccgcattcggcgccaacggcgtgatcctgccggaacgtcgttccgcttcggtcaccgcagccgcatggaaggtgtccgcaggcgcagccgcgcacatgccggtcgcccgcgtggtgaacctcaccaaagccattgaaagcctgaaggaacgcggatactacagcgttggtctcgacggtggcggcgacgccctcgttggcgaaaccggtttcgaaaccgatccgctggttgtggtgctcggttccgaaggcaacggcctgagccgtctcgtacgcgagacatgcgattccatcgccggcatcccaatgtcgaacatggtcgaatcgctgaacgcttccgtcgcagcgggcatcacgctgtattccgtcgcacgcgcccgccgcgaggccggtgccgccgctgacgcgaagtaatcaacacgaagcaacaggaagtaagcacaacaaggcagcaagtccgaaatacatatgagcggatagtccatacggattatccgctcattttgttgcgcaaatctgtacttggattgattttgcgcttaccgcagacccactcccccgccaacgatctctcgcaacacgttctctcactttcaaaagtcaaaatttttttgagttttgaaagtgaggagtgtgaagggataacaaaaagcggaggattattagtggtcctccgcttaacggctcggccctgcaatttttgactgcggctacgccgcagactcaatactgccttcggcgcggctatcgcctcgtctcagggcatattgatagaaaaagctccactggagctttttctatcaatgtgcccatacagctgcgtcgggatcgtcgtcggggttgtagccgtcgtcgggatcgtcgtaggtgtattcgtcgtcgatcacaccggaatcggcttcggcgttcaacgcgtccacatccttcgtggtgagcttgtactgcggaagcaccttctccacatagctttgcaccgcctcggccatcggcacatcatgacccgccttctcggccaggaaccaacggtggtcaagcacttcatggaagaactgagccggttcgatctgcgaacggtattcacgcggaatcatgcgcacggtcggttcgaacacttcgcgcatccaatcagtggcgacaatctcaagatcctcaccctcacgccatgtggaagcgcggtaggcatccaaatcgttcaacagtcgacgagcctgattctcctgcacatcaagaccagtcaaacgcagcagcttacgattcgcatagccggcatcgaccacacgcggacggaccagcacacgcttgccatcttcggcggtcttcatttccagctcatccacatcaaaaccaagctcattgagcttgttgacgcgcttctcgatcttccacatctcatccggaccgaacttgtcggtatcagtcagcgcgctccacagcgaatggtaacgatccaccaaacggttgccgatcgcaatttcgtcaacaccgctcggcagcagcgaaccggacgaaagatccatcaattcgccaataatgttcgtacgggccaaatcaacgtcgtactcgcgctggccttccgtcagattaatctgcagatcaccggtttccgcatcaaccaaaaatgcggagaacgcgtaggcgtcgcgcaggaacaacacgttcgacagtgacacatcgccccaatagaagccagccaaatgcaaacgcaccatcagcacggccaacgcgtcgatcagtcgttccgcggtatcagggcgcagattacgcgcgaacagcgcacgatacggcagtgagaacttcaaatgcttggtgacaaggatcgcttccagcggctcgccttcacggctatgacggcctgtgaccacggcgatcggctgcacggtcggcagttccagcttctgcaggcgacgcagcagctcgtattctcgttccgccacattgcgcgtgatttccttcatggcgtacacttcgtcacctacgtgcacgaaacgcaccacatgcctggaaataccacgcggaagattggccagcaggtcttccggccaagtagccagcggcttttcccacggcagggtgaacatctttggattcgagcttgcggcggtgattttcagcgcatgcggctccggagatgaggcagccggatcttcggccttcacggaagttgctttcagcacacggggatccatctgtggcaattcaagagattccatgaatcaacaatttacctgttgacctacccgaagaagcaagtatggacgaatccgtttcacctgccgatatgcgatgatctcaatactggaatctcactatccctctcatattacgatcgaatattgcgatcgatgctacaaacagacattacaagccgatatcgtgcttgcggaaaacaaaagaagccccgcaccgacgcggggcttctccaacgagacgataagagaggaagagcacgtctcgtttaatggttgacggaagttcgcgctcccgccaagtttttattcagccacccgccagccgatttccgtaaaggatattcccctgaagaaacagccaacggttggttactcgatatcagctcagttcagacgcagctcggtcgacggagcgaacaggtgcatcttggacgggtcgatcttgatcttgacggtatcgccgaccttcgggagagcacgcgggttcacgcggatcgtggtgagcttgttctgatcggacatcatggtggatgcctcggcagcggagccatcggtgatgatgttgccgtagatgtagccatcggagcccagatcctcaacgttcatgaccttgagggagaaggcgttggcgtcatccggggcggccagggaagcgtcttccggacggaagccgacgacgatctggttgttgtcttcagcggtgagcttgttgacggcctcggccggcagatccacagtgtcttcgccgatctttgccttgccgttgaccaccgggtgggtgttgatgttcatcgacggggagccgatgaagccagcgacgaagacgttggccgggcgatcgtacagctcggtcggagcgccgacctgctgcaggacaccgagcttgatgacggcgatgcggtcacccatggtcagagcttcggtctgatcgtgggtcacgtacagggtggtgacacccagctggcgctgcagagcagcgatctgggtacgggtctgcacgcggagcttggcatcaaggttggacagaggctcatccatgaggaagaccttcggctcacggacgattgcacggcccatggccacgcgctgacgctggccaccggacagagccttcggcttacgatcgaggtactcggtcaggtcgaggatctcagcggccttctcgacgcgcttgcggatctcttccttcggggtgccggcgatcttcagagcgaagcccatgttgtcggccacggtcatgtgcgggtacagagcgtagttctggaacaccattgcgatgtcgcggtccttcggctgcatcgtggtgacgtccttgccaccgatgaggatgcggcccttgttgacctcttcaaggccagcgagcatacgcagagtagtggacttgccgcagccagacgggccaaccagcaccaagaactcgccgtccttgatgtccatattcaaatcatccaccgacggcttatcgttgcccgggtagatacgagtaacatggtcgaatacgacttctgccatgatttgtcatcctttcagaggcaggtacgtgcctcacgatccgttgtaaagggatttcttttcggtgcctcgccttgcggcttacgacttcgacaaagccacaattcaaagcgttaatttatttctttggtttggcgaaggttctcttcgttgagccacgttccatgatacatacaacgctaaaactgtcaatgcgtgtcgcgagtcgcgctgtttacccacgctggcaaaagggggttaacggcgtagtaaatacacgcctttatcgccatcatgcaagacaatggtgcggagcgaaagacagaacagggaggttgcagtgcgcaatattagaatcggcgtggtcgaggatgatcccgcaagctgccagctggtacttgactatctcaaccgatatcagcaggaaaatgacgaacaattcaccgtttccgtattcgacgacggcgcgagaatcgtagagaaatatacccctgtttacgatattttactgctcgacatcgaaatgagcgaaatggacggcatggccgccgcgagacgcattcgcgagcgcgacgacaaggtcgtgatcgtgttcatcaccgccgcaccgcagtatgcgatcagcgggtacgaggtgcgcgcattgtcgtatctgctcaaacccctgccgtggttcgcgttttcacaggaactcaagaagtcgatcgacatggtgaggcgcaatggcgacgattccatgcttatcgaaaccagcaacgggcagatgcggctgaatcttgccgatattctgtatctcgaatcgatccggcataccatcgtcatccacacgttggaaggcaaactgtcgatcaatggcacgctcaaagatatggaagcgaaactcgccgaccaccatttcttccgctcgaattcctgctatctggtgaatctcaagcatgtgacgggcgtcgccgaccaggattgcgtgatgtcgaacggcgaacagttgcgcgtaagccgaccacgcaagaaggcgttcctcgccgcgttgaccgactatataggaggtggcaggtgaccagcgtgatattgccgaatgcgctggccggattggcaggaggactggcaggaggctccccttccataccttccgttttggtgaccgtgctttcggtgccgccgatgacgccaatcaccaacgctctgcccgacatcccccgttcttatacggcgatctgcgaatgggccgcgtgcatggtgtatatcgcggtgttgtatcgtcgcgtgccgctccgacggtcgatcatcgtcagtgcggccggattggcatcgctggtcgcggtgcagtatttcgacggcagtatgccgatctggttctggatcatcggtatgctgctcgccttcgcctgcatgtatgcgacgattctgctcggcgcgggcaccggcaaacgcgagggcctgtatattacggcgcgcgcgttcgtgttggccgaattggtggcgtcgctgcattggcagatcgttacgttcattggcgtgcgcgacggattcgccgattacgattggcgcgcgatcgcgctgcttgtcgttacgtatgcgctgtgcttcggtctagcttggatggttgaacgcggcaatttcagccaggccacacctaccttgccgaccgcttccgccgcgattgcgacgatggccattatgatcgtcacgttcgccatgagcaatttgagtttcgtgtcgacgaatacgccgttttccggttcggtcggccaggaaatcttctacattcgcacgctggtcgatttctgcggtttcgcgatcctatatgcgcagcaggagcaggcgcgccgtattgaggcgaatacggaactcgcgtcgatcaacgcgcagctggaaagccagcatcaggaatacctgcaatcgaaggaaaatatcgaatcgctaggccgtcttgcgcacgatctgaagcatcagcttgcggcgttgcgtgccgaagtcgatccgaagcatgccgcggccggcttcgagcagctggagcaatcggtgcagcgctatagcgcgcagcagcataccggcaatcccgtgcttgacgttattttgaccacgaaagagcgcacgtgcgccgatcgaggcattacgttcacggcggtcgcggacggctcgctgctaagcggcatgtcgtcgatggatatcgcatcattgttcggcaacgcgcttgacaatgcgatcgaagcgacgtcgaaattgccgaaacgtgagcagcgtctgatcaaacttgcgttatacgagcagaatcgctttattgttatccgggttgagaattattacgattcccgattgaagaaggatgcggaaggcaatctgcgcaccaccaagcgcgacgatcagcatcggcatggtttcggcgtgaagtcgattcgtcatatcgcgcagcagtatggcggcgaagtgacgattcgcaccgaagaccactggtttgtgctgaccgcgcttattccgcggaaaaccggccttatggccatgtaggactggccataaggcttaaggcggctccgctagttttcaagattctgcgcagcggcatcgccgtcagacgcatcaccggcatcaccgcctgccgatgcgtcgccaccagcatcgccggcattcgccgcacctccagccgacccgccagccgcgccgcccgccgcagcacctccagccgtattgtccggactattcgcagcaccaccgttagagcccccgttagtgccgatattggtgttgttcgtcacggtgttaggagtcgacgacgcctcctggtattggtccatcgcctgctgaacggcgtctttggcggcattcagcgcgtcaacggcggccgtcacgtcgttttccttgagattggtgccattggcaaggtttctggccgagtcaatcgcctgctgcaatgccacgcgcacgctgtcatcggccaccatgccgtcggaattgtcgagcacggactgcgcctgctcgatcgcgtcattgagctggcccttcagacgattctgcgtggccagcactttggaagcgtcgacggcttcggccgcatttgtaatcttttcggccttgtcgttcatgctccgtgcctcggatgccatggctttcgcggatttcttcagcttgctgatgccctgcgacgtgtcgcacgacaggattttcgcttccttcgcgttagatatggccgcattgagcttagtgacggtgctggcgtcggcgacttgatcggcagtgaccttcgcgccggtttttccgatttccaaagcgtcggaaagcgtgttattggcactttgcagctggcttgtggaatcctggcattgcgcggctgcgctggtaatggctgatttcttggaattattcgaaagcatccaacatgcaataccgccaatcaaagcaatcacgacgatagccgcaatcacgatagcgacgattttgccggtattcttcggtggtaccggaatttcattgctgtaatcgccgtaatcctcgaaaacactgaaatcgcttacaccgttcacatcgctttcttgcgaagcgaccgtcggaggcttcggcggttcggacatgtcagcccccatcacctcggtatccgtcggaaattccagcctgaaattgttgtctttcgtcatacgtccttcttcatcatcgggcgctcagcatcgaccatctatacgccgaccccctagtttaccgcctaacacacccttcaacgcgcattcgccttaattaccttcttttccgcacttttcgataggcgcaaagcggcaagcggcttccctaaacgcgatgcggtgaacgcactcaccgcaaccgcgaatccaatgggcacaaacagattgatcggagcatccgcaagttccatcaccaagcaaatcgccataagcggagcctgttgggaagctgcgagcaatgcgcacgcacccagcagagcgtacatgccaatcgaattcgtgtgaaacacctgcatccacagaacacccagcacagcaccccccgaagcgccgagcgcaatacccggctgcagcacaccgccggaagcgccggaacggatcgtcagcaatgtgacaatcgccttcgccaggaacgaaaccagcaaaatcggcaccaccgccaaatcggccttggacgagaaactcaactgcgcggtggcacggccattgcccataacctgcggcacccaaatcgccaccacgccagtcagcaggccggcgagcggcaacatccacagaatgcccgcgcccgacggtttggacttctcagcccactgcgagccgcgacggaacagtgcgccggcagcgccgagaatcatgccggcaaccagtgcgaacgccatgtaatcgagggtaaacaaaccgtcggtttcaccaatcaaatagaacgtgtgtgtgcccttgaccagcgacgccacccacgaagccagcgcggaacaggcgaatgcgagcgtcaccgtttcgagggttatgtcggcgagcagaatctcgaccgcgaaaaacgtgcccgcaagcggcgcgttatacacgcccgcaaggccggcggcggccgtaatggccaccaacatacgggtgtctttcgcatcgagatgcacccaacgcgcgaaccgctgaccgaacatcgcgcccaactcgcgcggcgccacttctcgaccgatcgacatgcccgtgccgacgatgaaaatctgcagcaacacatgcacgacggtctgccaaatcggcataatatcgccattcaccgcctttttgacggacggcaccttcgtactgcgcgtacgcaacagccaccaaatcacggccgcaatgaccgcacccgcggtcacggaaatcagtcgacgaatcacaggaacgttgaacgggccggattcctgcgaattctcaacatagccgagcgtaagatgctcgacgccgtacagcataagcgtcagcaggccagcggccgcgccaatggccactcccacaatcgccaccgccgcaatcagcgccggaattctgccaatctttggctgcgttccttgaggattctgcgactcctgcgattctcgtgttttttgcgattcctgcgattcccgcatctgccgcactccttgcacaccgtctccttcgttcaattcattcccccaattgtcccacctgccgcaacgttcatttgttacgccccgagcgtggcgatcggcagcaccagaatgccgtcatcacgccggtatgcaatatcaccacgcccgacaataaatgccatgaattcaggctcacgaacttgagatagaggatttccgcacactttttctttgaaagcatgtagtttgtccacatttttctccatgactttcaagtcgctcagcttaatctccaccgcagcccagcgaccatccaccaattcaagaatcacatcaacttcaaggcctttttcatcccgataatatgcgattcgattcgtgccacccatcgattcgagatacacgcgcaaatcacgaatcaccaatgtttcaaacaaatctcatactgaatcagagacaatagtgatgacgctctcagcttatccagcacaactcattgcacatcatttgatagggattgctgcgagagctgcatctttaggtcatcgacttttaattccaaacgtctgatataaagcgcctgtcgacggataatcaaatcacgcatatcatttaccggtttcagggttaccttcattcgtgcgactggaagtaacctcagaatcggggagattcactctgtctaccgtgcctggatcttctattcgtattgtcttcctccaacgatgcatgcaccgttcaatacgcttttcgcctatcaactcaggaccgagccccgcttcgcggaacagcacagtgggagattcaccattttcagcactcgaaacgcattcacgcttgaaccactctgcatatcggatacgtgaaccagtaatacttatgaccgcaggcagcgaaaccagatattgtgcttgttccggagagaatcgttcgtcgttcatgcttactttttcacttcatcgtgcaatcatctgtatgggatttgccggccgaattgacgtcccgtatgcgacgcctcatgcgcaatctgaacaaaatgaacgcaacaagtaacatgagccccgctgccgcaacaatgctgcctacggcggcacccgtacgaccgataaggccaggattgcccggctcctcgctcgggttattttcgggcgggacaacaggagttccagtgctaaatttcggctctactgtgatgttgagatcagcggatgtgtctccactgccaggaatcgagatgaggaacggatcacagtcgtatgctttgttggctttcgccgagctcgtgcgggagaccagatataggccgagcggcagattctggaaagtgagctgaccagctacgttagtggtgccggaatgctggtacagcttgtttttcgccgcgtgcgtagcgagcttcttggcagcatcgtgatattcacttgatgtcaggcgttcccaatcggcagtgaggccggaaaaatcgccgacggttttatatgaggagacgctaccatcattgttcgttgtgacggtggcgacgcgcacgatggaataggtgtcgccggcaagcgatttgggcgaagccgtgtctcggccccatacggcattgatggtgagagcgccgaaagaatcagcttgcgcatacggcaccatagagccgaaggctgcaagaacagtgaggacgatagtaacggcggcggcaatcatggcagcaatgcgcgccgcaccatattcgcttccgctatgcaggtctaacatgtctgcccggtcctttccgccgtgatgaacgtgaatgctgactgcgtatatcttctgtcgcgctggccgaattttcgcctggttcagaggcagcagagcctgatggttcggttgtggtctgttccgcggccgcactccgctggagccgctgctcgcgccgctgccagattcgccatccgatgagcagcgcgatcaacgcgagggacggcagcaggtactgcaatgggatgtccacgtggaatgtggatttggcgtcattctgctgctgtggcgtgtatggaatacgatgaccgcgcaccagcagccgatgcgtgttgaccgcatacggtgtgcaggtaatgagcgtgaccaaatccttgccgggctcaatcgccagttgtttggtatcggtcggcagaacggtagtgatcttatcgacctgatacgcatacgtgtctttaagtattgtgatatagaacttgtcgccttttttcataaggttcaagtccgtgaacagttttgccgtgggcaaccctcggtggccagacagcgccgcatgagtggacgcgccgccaactggtagtgaggtctgttcgagatgtccgatgccggattgcaacactttctcggaagtgccgtgataaatcggcaaggtctccttgagcttaggcacagtgatgtatcccatcatgccgtcaccgtcaatattgagcagactgttgtattcctcgtccgcggatgcggaattgacggcactggcaagagcgtcggtctctcctgcatcgttctgggcgagcttttcgttataggcgtgcgcagcatccagcaccttctggtactgttcctggctcaatgcttcaacgctggcgtcgtagttatttacggcgcggctggcgttgcgcataatgaggaagttgctgatcgtcggatagaacagaatgagcattccaccgagaatgaccagtaagggcaggatgttgcgcagtcgtttcatcgagcgttcttttcgcgaggaaaccgtgttgtgggcgtagcgggtgtgtgcccttcacgttcaaaacacggccatgctcgtcaggcgttcttgcgcttgagagtccaggcaacgccgagcgcgatgaccagcacaccaatcaccgtgaaggcgatggtacccatgccaccagtgccaggcaggataacaccggacttgttctggaccgggatgacaccgttcgatgcggtctggtcgtatttgctgccattgtcgttgttgtaggtgatgtggacggtggcatccgtggtgtcagtgccgtcgttcaggccgtcaaccttcacgccgagggcgctggcgagcttgttgtagccggccggcgctttggtctcggtgagcgtgtactcgccgttcttcagtccctggaagacaaccttaccgtttgcaggagtggtgatagtcgtggtggtacctgtctcatcatccttagctacacggtatacagcgttctcggtcgcactaccggcagtgacttgcacgaagctcatagcgtcgccgttcttaggtgcgagtgtgaactcagcaccagcaagtcgagtagcggtatcatcatacttgtcaccagtgtacttatcgacggtgaagccataagtgaagacgcgaaccttgctgggttcggactcaccggtgccctcgatgcccggtttgttggagtactgaatcgttgcggagttgacgttaccatgaccgcccacaacagccttctcgttcagcgtggccgtgtaggtgacggtaatcttcttgccggcattggcctgc

SEQ ID NO: 837 - DNA, 34886 bp, Unknown
  gut microbiota DNA sequence
cagagtctaaaggtatcggagcgtatgaggtatcgctccgataccttgttccatatccatattcgttctattgttcgtcaatcattccatgggggagtaatggccagggaacaggcgcaagtggcatttcaaaacggcaccaagaagtggcgttacaagggtgtttccgctgacggccgcaccaagcagaagggcgttatcgaagcgcagacgcgagatcaggctatcgatcgcgtgaataagctcggtctgattccaacggaacttgttgacgtgaacgcaggcaccggtctcaataccaatattgaaatcaaagcgttcgaaaaatatccaagcaaaaaagacttcgcggttatgtcacgtcagcttgccaccatggtggcggcaggcgtctccctgattcgcgcactgaatatcgttactgaacaaatcggaaatgtgaaactgcgcaatgcggtacgtgactgcatgcagcaggttgaggcgggatcatcgttttccgaagcaatggacaataatcccgaccatctgttcccgcccattatgaccaacatggtgcgggccggcgaaaccggcggcttccttgacaaatccctgattaccgtggccgacagctttgaagcggacgtgcgtttgcaaggtcagatcaaaggcgcactggcttacccggtggtggtgctcggcattgctgtgctgctggtgggcgtgatgctgctgaccatcgtgcccatgttcgacagcatgtatgcgtcgatgggcgcggaactgccatgggtcacgcagatcatggttgatatgggcaaggccgcaccggttggcattcccgtgatcattgtgtgcgcggtggcgttcgtcatgttttggaagcgcaatcgcaacaaagacatcattcgtacctggtgggatccgttcacgttgaaggcgcccgtgttcggcaaactgaccaccaatgtggcattggcgcgattctgcaacaatttcgcatccatgctcgcttcgggcgtgcccattctgcaggcgcttgacattgtcggatccacatccggcaattatgtaatcgacgaagcatccaaacgagtgtctcgactcgtggaacgcggctataggctggcggacagtatgggtaccgaaaaagtgttcccgaacatgatggtgcagatggcggcgatcggtgaggattccggcgccatcgaccagatgctcgccagcgcgggcaaagcgtatgacgaagaagcgcaatccatcgccaaacagctcacttcgttgctggaaccgttgatgattctggtgctcggtagcgtggtcggcttcatggtggtggcattgtacatgccgatgttctccatgttcgacgccatcaacgggcaagcgtaagcgaaagcgggaaggttgaacatgaagaacggattgtgggccggactcaaccgcaggtatcgtgccagattatgccaacgcatgggggagcggggcgcggccatgatgctcgcggtactgttcgtaatggtggtgctcaccacgtcggcactggtaatgaccatactgctttcgcaagcattaccgtacaggaataataaggagaacgcgcaagtcgggtatgccgccgaatctggactcgaagtggcattgagtttcctgcgcgaagcggaagcaagcaaggactataagaaactgctaccgtcgaccgcatcaaacactggcaatgccagcttggatgagaccttcactacagcatcggacgggtcggtgctgctcaacaatgcggaagtcagcaacgacgtgtcggcaacgggcgtgagctcgttcactccagacgatatctcgtaccgagtgcaaatcggatattatgacgacgatccaagctcatcgccggccaaacgactcacatccgaaagcgagctgaagaacgcgaaatatgcgtgggtgcgttcctacgggtatatcaacaggtatccgaatgggcgaagcgcgggtacggaaaccagcgcgcgccgagccatgagcgccatctaccaattcgagacagcgagcggtgatgacagctacgtgatttccaccaagggtggacgtctcggtatgggcttctacgcggcagcgccaaacaacgagcgccgtaccaaccagccgacctggaaggaaatcgcctcatatgatgtcgatgagaacggtgatccgaccggcatggtgaactatgtcaacaagcctggctccaagaatgcggccgacgctatgagcaataccatcactatgaatccggcaaaccaaacttgcatgcttgccaccaccaagcctgtagacaaggtcgaaacgcttgacgccatgcttgacccgaacggcaagccggtggaaggatcggcgttggtgattcttatgcaggcacataagaaagactccagcagcgacgacctgtattacacggaacagtgcaaagccaacggcgcctacaaagacctgaacacatgggtgtattggaaggatgattccattcgccctgcatccaatctgacattgtgcgttaccggagctgacattacgcatgttggcggaggcactgcaggagccgccacattgcagaaatgtggcgagtcgtacggccccaactaccaaagcgactattacaccgatcctgacaagaaagcgcagcaagacgaaaagaacgatccgtcaagcctgctcaacaaataccagaagtgggcgttctataacggtttcatcaatgcgggctactacaacgagctagatagcgtgcgcgatgaggcgaacaagtatgatgcgtctctgccggaatcgcaaggctatgccgtcggcggtgtgcaaatgcagaagaagacccgcttccaagtgctggaagtttccaacaaggcgaatgtgggcgccactattcaatatctgagcggcggtcactgggcgtccaacgtcgatgatgctgccgatttgactccgcatttcctgatggtgtcgaagtgggattattcgctcaccgacgtgaaatcctggttcgacgtgaacggtgatttcgaagacgccaccgcatcgttcggacaggcgggagaagccggctatgccacgaagcagatcgtcaatgaaacgtccggattctgcatttcgtcatcgcaagacggattcgacgcatacacgtcaacctgccgagtgggtggcggtgatttcaacccatactgctaccacaacaccatcaatggcaatccggcgcaatcatcttccgatctgcatcagatcgactactgcggggtgtccgattccaccaagcgtaaaaccgatcaggccgaatatgttgaagacacgtcgagtgacggcagtggcgtgaacacgcagatttggacgatggtgaacgggtcgaagcgttgctatgggttcggcggttcgggcaaattccaacttatggaatgctcggctgcgccaacattcacccgatacaacgaaaaagcgtctgacgagcacagtaaaggtacgttccaactcaacggtcaatgcctgacggaagtgtatccgggagacaaaatcgacggcaatccctcatactccggacgtatcgacgggcatgccgacgtgattatggccaaatgcggatcgtcacgagactttttgaaccgagaaatcaaatcgcaggtgtggaatgcctcggttaacctcggaacaggcggctcaggcggcggcgtgatttatggcggtggtagttctaccacattggagccatcctccaccaaaggctacgtgacatccaaagaactgaacccgtccactatcgcatggtgagcgctgcgcgagatggatgtgaacatgagcattgtgaacgatacgccaactgtggtgctgctactcgtggcatcgctggtaatcggctgcattttcggatcgtttctgaacgtggtgatttggcgcgtgcccaaccacatcagcttggtaaatccgaaacgcagtttctgcccgaactgcgaagccccgatcgcatggtatgacaatattcccatcatttcttggctggtgctcggcgcgaaatgccggcattgcaaagagccgatcgccgtacgctacccgattgtggaagcgttgggcggactgtcgttcctcgccgtcaccttgggggcgctattcggcgcgtattcgccatggatattgccggaactctacgtattcgcagcggtttcgatcgtgatcgcatacattgatctcgaccatcatctgatcctcaatgttgtgctattgccaacgctgattgcaacactggcactgctggctttggcatcactcggtacgaatgagtggaacaggctcggtcgcgctgtgatatgtgcgatagtgctcggcgcgttctacctattgctttccatcatatggaaaggtggcatgggcgatggcgatatcaaacttgcgttcatacttggcttgattacgggctggctcggatggtcgcaattcatcatcggggcgttcgcagccttctttattggaggattcttaagtcttgtgctgattatcggcaaaaaagtcgatatgcatggaggcataccgttcggaccgtccatgctgctcggcatatggcttggcatattcgtcggggctccgatcgccacactgtacttgcaagtgacgggactcgcctgaaccaatccccagccaacctgcaacacgttatatataaggagagagcatgagatcaataacggcgctgtcgatcgcgaacgacgccatccgtgcggcggtcatagcagacccgtattcggatctgcccaccatcaagcatttccaggcgatcccgttgccgaacggagccgtagtggatggcgaagtggtcgaccatgatgtggtggccggactgctgaacacactggtgaagcgattcaaattcccccgcgaggacacggctctcgtctactccagccgacgcatggtgtttcgcgaggcggactttccctacatgtcgctgaacgatctgaaatccaccttgcctttccaagccaaaggcatgattccgctgcctattgaggaatccgagctcgacttcgtaccattgaacgtcatcgacagcgaacaaggcaaacagttgcacggcatactcgtggcgacattgcgtaacggattggaaaaaaccgcgcgcacagccgaagacgcgggatttgtgatcacatcgatcgatgcgggcccgttcgcgcttgccagactgttcgccgacaccaaccagcagcagaccgaagcggtggtcaacatcagcggcaacggcaccgacgtgatcgtgctcgaaaacgggcagcccgcctacatgcgcgtcgtgccatccggcgcggatgacgtgactgacgccatcgccaacgcgctcagtatctcattcgaagacgccgaacgcatcaaaaaccagatcggcctgcaaaacgtgaccggcgacgaacgactcgaaaaagccgaggaagtcatccgcgaaaccacggcgcagctgatcgtcggcatccgcaatacgctcaacctgtacgacgtggaccatgcgggcggcaccatcagcggcgtggtgcttaccggaaccggcgcacggctgatcggactgccgccggtattggccagttccatcaacaaagtggtgcggatcggcgaccccttcatccgtttccggctttccaaagaagtggaacggcagaacatcatggcgcacgcgatcgatttgggcgcagtgcttggactggtaatcggaaagaagccgaggtgaacggacgatgagcagaaaaaacaacggaagcatgaagcagatcggcagctcccaccgcggtcgacgcggcaaaatcaaggataatccgaatcctgaaaccagtgatggcgagaaaacctcgattttgtcgatgaatatttccgacatcggcaaagcgctgcgtgcgagcagttcgaaaacctccaaaaaggctgatctgcccgccgaatggaatgtgcgcgccaatctgctgccacgttccatcgtgacgctcaaccgtgatcgtgccatcaaatacttgctgtcatacgtgcttatcgtggtggtggttgcggccattgccatcagcgcgggcatggcggtgcgcgtgagctgggccgaccatcgcgtggaggaggcacaggcgaaaaccctgtcgttgcagaaggaaaaggcggaattcaaagacgtggaagacacgttgaactcgctgtccgattcgcaaaggtcacgtatcgccgcgctctacgacgaaatggattggatgaaggtggtggattcgctcaatggcgcgctgccagccggaggccagtacacgaacctgtcgttgagcagcttccagattggcgggtctgacgcttcttcgcatagcgctacatcttcagtatggtctgggaatggtgtgatttccgttgattttaccgttctttctccagatttcatatctgcaaaagattttatcggtaattttgctgcaattcctacctataaaacaggctatgtgagttccattaccgaaaacagcgatgaaaacggcaccacctatacatacacgggaacggtgtcgttgaagatggataccaataccacgtcacgaagcgacaacgcggccggtgctgacgaagccaaccgagcattgcagcagcagctacgcgacagcctgaacaaagccgcggcaggggagtcgactgatactaccgacagcgcgaccgcaactgacgaaacatccaatgaatgatcgggagcaatcatgaacaagcataaaatcgcatggatcgcattggccgcaggtattgtcttcgtcatcatgctgacatggctggtcggcgtttccccgcaaatcagccatatcaaatcatccgacgcgcaaactgcgcaaatcgatgagaacaataaggaaacacgcgacgaaatcgaaacattacgcatcgccagcgaaacgatcggcctgcagaaagaccgtttgcgccagttgcagcggcagattccagacggctataaccagcaggaattcatcaattcgttggatgcgtccgctgcgggaaccggcgtcgccatcaaatcggtgaatttcgatgatgcggtcgacgccgacattccagctgaaatgcaaggtaccattcaagccggtcagctggtgcaggtgtcggtaagtatcaccgccacgggaagctatgatgccatgcgtaatttcgtggcatccgtgcagaacatcaaccgtatcgccgtgccggaaaatgtgacctacacacttgacagaaacggtgacgaaacgaaaaatgccgtggtgatcgattgcaagatctggtcgctattgctcgacaacgacacggttgaagacgagaacgccacgaaacagtaacgcgggtggtgttctgtcaccgcgtaaaggtaggctttgcgcttgtaaagaccccaaaccgttcaaaccagaaggtgcattgtggctgtatccaaactcgatgaagtcgtatccctcgccaagcgtcgtggctttgtttttcccgccggtgaaatctatggtggaacccgttccgcgtgggattacggtccgctcggcgttgcgctgaaagacaatatcaagcgcgaatggtggcgttccatggtcgtcacccgtggcgacgtggtgggcgttgacacgtccattattcttccgccggccgtgtgggtggcttccggtcacgtgtccgtgttcaacgatccgctgatcgaatgcctcaactgccacaagcgccaccgcgccgacaagcttgaggaatcctatgccgaaaagcatggcgacaagctgccggaaaacggcctgaaagacattgtgtgcccggattgcggcacccgtggcaactggaccgaaccgcgcgacttcaacatgatgctgcgcacccacctcggaccggtcgaagacgagaactcgctgcactacctgcgtccggaaaccgcacagggcattttcgtggacttcaagaacgtgatgacttcttcgcgttccaagccgccgttcggcatcgccaacatgggcaagtccttccgtaacgagatcactccgggcaacttcatcttccgcacccgcgagttcgagcagatggaaatggaattcttcgtggctccgggcaccgatgaggaatggcaccagtactggatcgacgcgcgtacccagtggtacatcgaccttggtgtgaagccggagaacctgcgccattatgagcatccgaaggagaagctggcccactattcgaagcgtaccgtcgacatcgaatacaagttcggcttccagggttccgattggggcgagcttgaaggcgtcgccaaccgtaccgacttcgatctttccgcgcatgccaagcattccggcgaggatctgagctacttcaaccaggccaccggcgaaaaatacgtgccgtacgtcatcgaaccggccgccggcctgacccgttccctcatggccttccttgttgacgcctacgacgttgacgaggccccgaataccaagggcggcgtcgataagcgcaccgtgcttcgccttgatccgcgcctggctccggtcaaggccgctgtactgccgttgagcaagaagccggaattgcagaccgtggcacacgatctggccgccgatttgcgtcagcatgactggatgatcgactatgacgaggccggtgcgatcggtcgtcgctatcgccgtgaagacgaaatcggcaccccgctgtgcatcaccgtcgacttcgacacgcttgacgatcaggccgtcaccattcgtgaacgtgataccatgcagcaggagcgcgtcgcactcgacaaggtggctgattatgtggccgcacgtattggcgagaagcatgtacgttacccgcaggtgccggttgagatgggcggcgaggcttggcctgagtccgtcaagatcgccgaagccggtggcttgtattaaagctggatactggttaccatagcgttcttatgccagatagcattgtgactgcttacgaggaatccgacgtgctcgacccgcgtaccgacgcggtgaggccgtcggttcctccggttatgaagcctgttgatttagggccggtacacgttgaaaccccggtggtgctttcgcctatggcgggcgttaccaactggccgttccgcgtgatttgcgaaagctacggaccggacggtctatacgtggccgaaatgatcaccgcgcgcgcgttggtcgcacgcaatcccaaagcgttgcggttgtgccatttcgcgccgagcgagaaaatccgttcgctgcaactgtacggtgtgaacccggcgatcgtggaacaggccgcgaaaatcgtcatcgacgaaaacatggccgaccatgtcgatctgaacttcggatgccccgtgccgaaagtgacccgacgcggcggcggatcggctttgccgtggaagacggatctgtttcgcgagatcatccagcgtgtggtcaaggtctgcgatgctgccaacgtgccggtgacggctaaaatccgcgtcggcatcgaccatgagcatgaaacgttcttggaagcgggccatatcgcgcaggaggaaggctgcaaggcggtgaccttgcacgcgcgtaccaccgccgaatattacggcgggcactccgactggagccggattggcgagctggtcgaagcgcttgacattccagtgttcggcaacggcgatatttggggtgcgaacgatgcgcttgccatggttgccgaaaccggttgcgccggcgttgcgattggccgcggctgccaaggcaggccatggctgttcgccgatatcaagaatgcgttcgctggcagcgacaagcgtgttgaccccacgttaggagatgtgtgccgtgtggttgaacgccatgcggaactgttgaccgaattctatgatggcgatgagcagatggccgtgcatgatctgcgtaagcatatcgcgtggtatctcaagggattccccgttggaggctccacccgtcgcgcgttcatggaatgtgaaaatcttgaggatgtcagagccgaaataggcaagctggatcccaacatccgttttcccgagcgagtggtcgacaagccaagggggcgcgtgcgcttcgcaaagaaagtgcatctgccttacggatggttggaatcacgggaaacaacgcatgatgaacgtcaggcgttgtttggggatgaccctatggacgccagctattgaatatgacatgctgatgtggttaaatcgtcgtgggggcaccgaaagagggtaaatcgcaggcgaaatgaacacgttagcaataaaaaagtgaaaaaacgccgttacacacggcgaaaagtgcgcgtactgcagcgtgtctgcgataaagttgtgcgtaaacgcgagtgacaggagactatggtgagcgagattgcccagactgacaatttcaacgacaaaacgaatatcaaggttgtcggtgttggtggagctggcggtaatgccgtcaatcgcatgattgccgagggtcttcaaagtgttgaattcattgcgatcaataccgacgcgaaggacctgatgcgttccgacgccgatgtcaagatctccttgaacgatgccaccagccgcgggcttggcgcaggtgccgacccggagaagggtgccaaggccgctcaggatcatcagtccgatatcgaggaatcgctcaagggcgccgatatggtgttcgtgacctgcggtgagggtggtggcaccggtaccggtgcaagcccgatcgtggctcgcgccgcgcatcagcagggtgccctgaccattgcggtggttacccgcccgttcagctttgaaggtccccagcgtgcggcttccgcagcacttggcattgagaatctgcgcaaggaagtcgatgcgctgatcgtgattccgaacgatcgactgcttgagctttccgatcgcaccatcggcatcgtcgatgcgttcaagaccgccgacaccgccttgctggccggcgtgcagggcatcaccgacctgatttcttcgaactcgtacattcacgtcgacttcaacgatgtcaacgctattctgcgtggcgcgggcaccgcactgttcggcatcggctccgcacgaggcgaggatcgcgccacccaggcagctgaaatcgccatcagttcgccgctgctggaagaaagcatcgagggtgcccacggcgcgctgatcaatatcgccggcccgtccgatctgaagttgcaggaagcggccgccgccacccagctggtgggcaaggccatccatccggaagcacagatcatctggggtctttccctcgacgacgcttacggcgacgaagtgcgtgtcaccgttatcgccgcaggctttgatgccaactccaagaaggcggctcaggctgaagcccagaagcaggcagagcctgcggaaagcacggtgccgctgtcggcgttgtccgcagccccgagggcagcggcggttccgcagcagccccagcctcagcttattcagactccggaagccccgaaggtgcagccgctgtccacttatattccgtccactccggaacccgtcgttccgtcattcgaccagaccaccgagcatgaagtggtgtcttcgaacgacgccggcgatttggatattccggatttcctgcgctaaaagcaacgcgaagacgcgaaaggatcgttcatggcaggttttatgaaaagcgcgatgtcctatttgggcatgaccgacgttgccgaaggtgacgaggatttcaacgaggaggctgagagcagcgaaacctcgttcgattccgaccattccgtgaccccgatggcttcgactcctgccgcgacgtccgcaccgcgcgagcagaccaaagccaacccgttccaaggcggaagggtgagccgtatcaccacgattcacccgaaatcctatgaggacgctcagctggtcggacgtgccattcgcgacggcgttccggtggtgctgaacctgaccggtgtggccgaggccgtggcgtatcgcattgtggacttttccgcgggtgtggtttttggcgtgcgtggctccatcgaacgtgtcactccgcgcgtgttcctgctgagcccagctcaggtgaacatcaaggttgaggaaccgcaggcgaataactcgtcgcacgatttgttcgccgactgatatagacgaaagccgttgcgaaagcagactgcatgaagcctccgtcacccgtgatgggggctttgttatgttctgttgctaaggtggtgccccatgattttgtctttgatcggtagcatcgtccactttttggtgaatgcctacattctggtgctgttcattcgcatgattctcgattgggttgctgtgttggcatcggcatggcgtccacgggggttggtgtcgtcgttgatcgacgcggtttaccagttgacggagcccccactgcgctggctacgccaatatatccgccctattccaatgggtcccatctacttcgatgtggcattcatcgttctttatttcattctcattgctattgatttcctcatttaatgtatgtcaaatgccgatttttcgcaaaaaatcggtggtcccgtgctagagtcgaacaatgaaagcaacaacagcaaggcatcaagcccaaagcgaggtgtaagatttatggctctgttgacgccgaaagatatcagagagcataccttccagaccgtgaggttcaaggaggggtatgacgtcgatgaagtcgacgattttctcgatcaggtaaccgagacggtggaggcccttggcaagcaggcggttgccagcggccaggctactcagtccctcggcccggatgttgcggggctcaactccaagatttccgagctcagcgcccaggttcagtccctgcagcaggagaacgcgacattgaagtccgcctccgagcaggcagctggcgctggtgatcaggcagctcaggccgcacaggtcgcagcagccaagctcaccgaggctgaggaaagcaaccgtgctctgtcggctcagaacgaacagctcaagggtcaggtggatcgcctgtccgcacaggtcgaccagctcaccgcacaggcggctgaagctgcaggccaggcggatctgggcgaacagctgacctccatgcagcatgagcgcgacgcattccgtgcacagaccgaagacctgtcccgtcagctggcttccgcacagcagcaggttgtggtggcccagcagcaggcggctgagatccagcagctcaatgcaaggcttgaagaggctcaggagcaggtcgcccaagctcagcagctcacgcagcagcatgcggcacagtcccagcagcaggatgagcgtgcccagcagcaggccgcgcagattcagcagcttgcacagcagctgcaggaatcgcagcagcgtgaagcccagctgcgcgagcaggtcgccaaggtcgaaccgagtaccgaaaccggaagcctgcagaagattgcaggagccgcagccagcgccaacacggagccggagcgtgccaccgccatgctgaccctggctatgcagctgcacgaccagtacgtcgacaagggcaaagccaaggctaaggaaatcaccgacgagtcccagcgtaggtacgatgagctcatcggcaatgccaacgattactccaaccgcactcgcatcgaagccgacaactactccgaaggcacccgttccgaagccgatcagtattcggctgacactcgtgccaaggctgatggttacctgaaccagaagactcaggaaggcgacgcctatctgaccaagcgtgctcaggaaggcgatgactatctggcgcagcgcactcaggaaggtaatgcttacttggatcagaagactcaggaaggcgacgcctaccttgctcagaagacgcaggagggtgatgcttacttggatcagaagactcaggaaggcgacgcctacctcgtgcagaagacccaggatggtgatacctacttctccacgaagcacaacgaagccgacgaatacgagtccgaagtgcagaagcgcgccttcgactacgattcgaagacccgtaccgcagccgacgactacgcccagcaggtccgcgacaatctcgaagcgcagaccaaggtcatcgaaggcaacattcagggcctcaagcagttcgaaaccgaataccgtgcacgtcttaccgaattcctcggccagctcgtgtcccaggtgtccgacacgaacaactatgatcaggactcccaggacgactgagattaggctgtgtctgacatcatgacaaatgatcaaagacggctgcgcacccgcgtggccgtctttgcgtgtatcgccgttgtggcactggtactcgaccagatcagcaaggcatgggcgcagtcggcgcttgccgacgggcagacggtacgtgtgattccgggcatcctctcattcacgctggtgcataatccgggtgcgtccttgggcatgggatccaacatgacctggttgatttcgttgcttgccatcgtggcatgcgtggcgttggccgtactggcaatccgtaccatttccatgaaatggacggtggtgttcgctcttgctttcgcaggagcattgggaaatctcatcgatcgtgtgatgtatgccgaaggtttccttaatggcaaggtcgtcgatttcctcaattacggatggtcggtcggcaatgttgcggatattttcctgatggtggcgggcgtcgccgccgtcgtactgctgtttgtcggagagcccttcagccagaaggatcttgacgaacaggccgcagaacagacgaaacagacgaccggagaccagaacgcatgagccgtcttgttcccgcacccgacgcgcttgtcggcaaacgattcgatgtggccgtggccaagatgcttggtatctcccgagccaaggccgcggaactcatcgaaagtggacaggcgcgcgtgcttggtcgtgacatttccaaatcatcgactctgcaatcaggcgaaaccgtcgaattcgatattgtcgaggaacggaccgagcctgaaccgatcgcacgagatatggcagtggtctacgaagacgatgacgtcatagtggtcgacaagccagtgggtgtggctgctcacgcttccgtcggttggaccggtccgacggtgctcggcagtctgcttgacaggggagtgcacatcacctcctacggcgccgcgggacgtcagggtatcgtatcccgcctcgacgtgggcacatccggattgatgctcgtgtgcaaatctgacctcgcctacgtggaaatgcgcaggcagttcgccgaacatgaagtcgtcaaaacctatcatgcgctcgtgcaaggcaatctcaaggaaaacaaggccacgatcgaagcgccgatcggacgtgccaaagtctccgattttcgtttttgcgttacgcccgccggcaaagaagccatcacccattgggatgtgatggaacgtttcggtgaggcgacgctggtttccgtgaatctggaaaccggtcgaacccatcagatccgcgtgcatttctcgtccatcgggcatccgcttgcgggagacgccatgtacggtgccaatccgcagttgggtgaggcattgggattggaacggcagtggctgcacgccaagcaacttgaattccgccatccgcgaacccatgtgtggaccacggtgaaatcgcattatccagctgatttgcagcatgcgctcgacgtgatgcgcggcaggcacgacacacaagacaagcctgaagtgtgatcgcacgtcaccaatcaccggtagattggaacgtatggctacttccggaaatttcgtgcaactgcataatcacacgcattattcactgcttgacggggcgtcaaagattccggatctggtcaagcgcgccaaagaactcaacatgccggccgtcggcatcaccgatcacggcaacatgcatggcgcatacgaaatgtggagcactgcggtcaaggaaggcgtcaaaccgattatcggcattgaagcgtatgtgacgccggaaaccgcacgccaagatcaaacccgcgtcagctgggataccaactggaatcccgatatcgatccgcaacatcgcaggcgcaaccccaacgacgtatccggcggtggcctgatcacccaccttacgatgtgggcggaaaccgatgagggccttgtcaatctgatgaaggcgtccactgacgcgaatctcgagggacgtgtcatgcgatacccccgaatggataaggaaatccttgccaaatattcgaaaggcattatcgcatcttccggatgcccgtcgggcatcatccaaacgcgactgctgctcggccaattcgacgaggcattacgtgcggcaggcgaattgcaggatattttcggacgtgacaatttctatatcgaattcatggaccacggtctgaaaatcgaaaaacaggtgaccgacggtctgctggacattgcgaaaaaactgaacgcgccgctgctcgccaccaacgattcccattacgtgcgcgccgaagacgccggctctcaggatgccatgctgtgcatcaattcgggatccacgcttgacgagccgggacgattcaaatttgacggcaccggctactatctgaaatccgccgaagaaatgcgtgagctgttcaaagacattcccgaagcatgcgacaatacgttggaaatcgccgaacgctgcaatgtcatgttcgacgatcatgaagatggcgcgttcatgccccaattcgactgcccggaaggttgggatgagacgtcgctgttcctgaaaaaagtcgaggaaggcttggaacggcgttatgacgggcatccgccgatcgaagtgctcaagcaggccgattacgaatgcggtgtgatctgtcagatgcagttctgcggatacttccttgtggtggccgactacatcaactgggccaaatcgcatggtgtgatggtcgggcctggccgtggctccgcggcaggcgccatggtggcgtatgccatgggcatcaccgaactcgatccaatcaagcacggcttgatcttcgaacgattccttaacccggaacgtgtgtcgctgcctgatatcgacgtcgatttcgatccggacggccgcggtcgcgtgcttgactatgtcggagacaagtacgggcgagacaaggtcgcgcaatgcgtgatctacggcaccatcaaaaccaaacaggcgctgaaggattccgcacgaatcatgggctacgaattctccatgggcgagcgcatcaccaaggcgttgccgccggcgcagacgggtggcaaggatattccgctgcatgatattttcgagccgagttcgaagcgttatgcggaggcccgcgaattccgtgagctttatgattccgatccggatgtgaagcgcgtcacggatgaggcgatgggtatcgaaggcttgatccgtcagaccggtgtgcatgcgtgcgccacgatcatgggtagcgagccgatttcgaatacgtcgccgctgctggaacgtaccgatggtacggttacgaccacgttggagtatcatacgtgtgaaacgcttggtttagtcaagatggacttccttggtctttccaacttgacggttattcgcgatacgttgaacaatatcgaggcgaatggcaagacgcgtatcgaccatacgaagattccattggacgatcgtgccacgtacgatctgttgtcgcgaggtgacacgcttggcgtgttccagttggattctgatggtatgcgttcgttgctgaaaacgttgaagccgaataacttcaacgatatttccgcattgatcgcgttgtatcgtcctggtccgatggatatggattcgcatacgaattatgcgaagcgtaagaatggtttgcagaagatcacgccgattcatcctgaagtggccgagccgttgaaggaagtgcttgacgaaacgtatggtctgatcgtgtatcaggagcaggtgcagtcggccgcgcgtattctggcgggttattcgttgggcaaggcagacgtgttgcgtcgagcaatgggcaagaagaagcccgaggtgctggccaaggagaaggtgccgttcttcgcgggcatgaaggagcatgggtattcccaggaggcggcgcaggccgtgtgggatattcttgtgccgttttcgggctatgcgttcaacaaggcgcattcggccgcatacggtttgatctcatattggactgcatatctgaaaacgcattatccggtggaattcatggccgcgttgctgcagggtgcgagtacgaacaaagacaagaccgcgttgtatttgggcgaggctcgtcgcatgggcatccaggtgttgtctcctgacgtgaacgagtcggtgtacgagtattccgctgtcggcgatgtggtgcgttttggccttggcgccattcgtaacgttggcaaggctgcggttgatgcgattgtcaaggaacgtgagaacgatcatggcaagtatgtgaatttccctgatttcatcaggcgtgtgccgatggaggcgttgaatcgtcgattggttgaatcgttgattaaggccggtgcgtttgattcgatcgatccgaaccgtcgtgccttgtttacgattcatgaggctgcgattaattcggtggtcggtttgaaacgcaagcaggccgaaggccagtttgatttgttctccgatttggaagatgccggcgaagacgatgcgggcatgggcgatgccatggtgaatgtgcctgatgtggaggagtgggataagaaaaccaagctgaatttcgaacgtgaaatgcttggcttgtatgtgtccgaccatccgttgagcggtatgcagtcgattctggtgtcgttgcgtgaaatgtcgatcgcgcatctgatcgatcgcgcggcgaatatgcctgacggccaacaggtgacggtggcgggtttgatcacgaacgtggaccgtcgtatgtcgaagaagggcaatccttgggcgattgtgaccatcgaggatttggaaagctccatccagtgcatgttcttcggcaaagtgtatgaggccgccgctcccgaactggcggtcgacacggtggtgcagattcgcggacaggttgagaaacgcgatgagacggtaagcatgcgtgccacggaattcaacgtgccgacgttggaagcgcaggatgagaagccggtgacgattatgctgccgccgattgcgcttgaccaatcgcatgtgcagcagttggggcagattttgacgaatcatcctggaccctgcgaagtgaagctcgccttgatggacgataagggcaacgccaaggtactgacgttcggcgaccgtttccgcgtacgccgcgacacgagtctgttcgccgaaatcaaaatccttttcggtcccagttctctgcctttgggctgaccggtcgtggggatgatgccgaaagttcagctgaatatctcactatgcggctgaacttgagacgcgcgggcgttctcgtgacatcacgttgttaccatggggcgttatgagcgaagaaaactatatgcgaatcattgacctgcgtggcaagaagctgacccgagctgaaatgctggaggctatgcctcgcgccgagatgggcaccaacgaggccaccgatctcgtgcagcccatccttgacgatgtgaaggcccgcggtgctgcggccctgcgtgacttcgcggagaaattcgaccatattcgtccggagaacctgcgcgtgccggtggaagccatgaagaccgccgtcgacgagttggatccggaagtgcgtgccgccatcgaagaatccgtgcgccgctcccgcgccgtgtccgcttcccaggtgccggcgccgttccacaccgatctggctgaaggcgcgcgcgtttccgagcgttggattccggtgcagcgtgtcggcctgtatgtgccgggtggcaaggccgtctacccgagctccgtcatcatgaacgtggtcccggcacaggccgccggcgtggaatccctcgccatcgcaaccccgccgagccgtaacaatgccgacggtctgcctgacaagaccattctcgccacctgcgccattctcggcgttgacgaagtgtatgcggtcggcggcgctcaggccgtggccatgttcgcttacggcgccaagggatccgaaccgcaggacggcgaaatcctgtgcgatccggtcgacaagatcaccggtccgggtaacatcttcgtcgctaccgccaagcgcatggtgtccggcatcgtcggcatcgacgccgtggcaggaccgaccgaaatcgccatcatcgcagacaagggtgccaacccgagctggctggccgccgatctgatcggtcaggccgagcatgacgaactcgccggttccgtgctcatcaccgacagcgaagagattgccgaacaggtgcaggagaacctcaagtaccgtgtgccgcgcaccgagcactccgagcgtgtgaacacgtcgctacacggacgccagtccggcatcatcctcaccgatggcatcgagcagtccattgacgcggccaatgcgtatgccgccgaacaccttgaggtccagaccgccgacccggatgccgtgatcgccaagattcgcaacgccggtgccatcttccgtggcccgtactctccggtgccgctgggcgactacatgtccggctccaaccacgtgctgccgacttccggcactgcacgcttcgcctccggtctgggcgtgcacaccttcatgaagccggtcgaagtcatcgaatacgatgagcagggattgaagaccctcgctgctcgtgtgaacgccttcgccgtttccgaagatctgccggcacacggtgaaagcgtgctgagccgtttcatcgacgatccgtacaacaaggaaaccatcaaggaacaggaagagcaggcaggccttcgatgagtgagacttccagcaacgccattccggcatatcttccgctgcgcaacgatctgatcggtgaggagccgtacggtgcgccgcaattggacgtgccggtatgcctcaacgtcaacgagaatccgtatgcgccggaaccggcagtggtcgaaaccatcgcgcagcgagtcaaggaaatcgctctgacgctcaaccgttacccggatcgtgagcatatcgcgttgcgtcaggcattctgcgactatctcgaacgcgagtccggcgtcaagctggaagtcgaccagttgtggggtgccaacggatccaacgagatcatgctgcagctgttccaagctttcggcggtccaggacgcattgcgctcggctgcgatccgacgtattcgatgtatccggaatacgcccgcgacacgttcaccacatggaagctggcgcaccgcaacgaggatttctcgctgaacgtcgacgccaccatcaaggccatcgaagacgtcaagccggccatgatcgtgctcaccagcccgaacaatccgaccggcacaccgctgaagatggacgatctcaagcgcgtgctcggcgccgccgaaaccgctgaagtggccggtgccgccgaaggcgtgcatccggtggtcgtggtggacgaagcctacatcgaattccgtgatccgggcacgcccaccgcgctcgaactcatcggcgagtatgagaatctcgccgtgagccgaaccatgagcaaggcgttcgccttcgcaggcgcgcgagtcggctatctggccgccaacaagggcattatcgactgtgtgcgcatcgtgcgtatgccgtaccacctgtcggccgtcacccaggcagccgcgcttgccgcgttcgaacataccgacgaacagctcagccgtgtggcgcacctgcgtgacacccgcaatcagaccgcggcatggctcaaggaacaaacctacaagggccagccgctcgaagtggccgagacgcagtccaacttcattctgttcggcggtcatttcgacgatcgcgaccgcatcttcgacgaactgctcaagcgcggtgtgctcatccgcaccgtcggccctgacggctggatgcgcgtatgcatgggcaccgacgaggaaatggcgcgtttccgtgaagccttggtcgaagtgttgcgtattgtggaacaagactgagcacatacgggactgaaccaacacaacaggaccgaacattttccaaaaggagtcgcaacatggcgcgtaccgcaaccatcgttcgtgaaaccagcgaatccaaggtcgaactgagcctgaatctcgacggcaccggcaaaactgacatcgacacgtcggtgccgttctacaaccatatgatgacggcgctcggcaagcattcgctgattgacctgaccatcaaggccacgggtgacaccgacatcgacgcgcaccataccgtcgaagacatcgccatcgtgttcggtgaggcgttgaagcaggcgctggggaacaagcgcggcatccgtcgcttcgctgatgcgaccgtgccgttggacgaggcgcttgccaaggccgtggtcgatatttccgggcgtccgtactgcgtgtgcaccggcgagccggaaggcttcgaatactgcatgatcggcggccatttcaccggctccctcgtgcgtcacgttatggaatccatcgccatgcatgccggaatctgcctgcatctgcaggtgatctccggccgtgatccgcaccacatcgccgaagccgagttcaaggccttggcacgtgcgcttcgtttcgccatcgagtcggatccgcgtgtcgacggtattccgagcacgaagggcgctctgtgatgagcgacgatcgaaataacgatttcgacgatttccaaggattcgatggatcaaacgatttcggtgacctcaacgccgacggcatgcatttcagcgaagaggaactggaagcggccatggccggcttcgagcaggaattcaaggatgccgaagcgtccaagcatgagcgggcggacaatccgccatctgaagctttcgattcctccgaagcttccgataacgcggaatcctccgaatcctccgaatcctcggaagtcgacgacatgctcaacgcggctgaggattcgttgaaattcgaagacgagctgcagggactgcttggcaatcgcgcgaaagtggcggtgatcatcaccagactgacctcgccacgattgctgtcggcattctgtgaattgtccgacatttccgcgcaatgcatcggatcggcgcaaggtgctgtcgcggtgctgcgcaatctcgacggagacggtccggaagcggcggtcaaagacatgacgatcgtcgttgccggcatgcccgcgattcttgccgtcaaccgtgcggacaagctcgaagcgacgatgtacgtggaaggcagagcgggcaaaaccttcgctccgccggtgctattcacctccaccgcgccgttcgttgaggatctcatgctgggcatcaccgatatgaacgcgctggaacaggcggatatgaccattttcgattccgctgaccttgatcgggatgcggcgatgagcattatcgccgagcatacgcggttcggacgcggcacatcaagcatcagttaacgacggtaaacgcgagtcatcctgccgaacatgcgttatgcgacacaagacgactcgcgtcacagaacaacgaatgacacaagaaggagaacgcccatgacttccgtggtggttttcgattatggtttcggcaacgtgcgttccatggttcgtgcactggctgatctcgaccttgacgtgaccctcacttccgaccatcggcaggccttggaagccaacggtctggtagtgcccggcgtgggcgctttcggcgcatgcatggaaggactcaagtcggtgggcggagacaccgtgatcaaggatcgtctgcgtgccgggcgaccggtgctcggcgtgtgcgtgggcgagcagatcatgttcgaacgcggtatggaacacggcaccggcactccgggccttggcctgatcaagggcgacgtggaactgcttgacgccgatgtggtgcctcacatgggatgggacaccgtcgaggcgccggaaggttccgtgctcatgaagggtgtggaaggtgaacgtttctatttcgtacattccttcgccgcgatgagtgccgctcccgccgacacgtccggcgaccagcttgatttcggtgacgccgaggagcgcgtgacctggtgcacgtacggacgtagccgtttcgtggcggcctacgagcgtggtccgctgttcgccacgcagttccaccctgaaaaatccgccgaagcgggctcgcagctgctgcgcaattggattgcgacgttctgatggtgcgagatcgccgatgattgtttcgacgatgctttgacatatacgcttttaaaacgaccacttggtacatttatttgcgattgccgtttagtggcggtcggttgatcacagagaggtacagacatgtctttgacattgcttcccgcagtcgatgttcgtgatggcaaggccgttcgcttgcgccaaggcgaatccggttcggaaaccgattacggttcgccgctggaggctgcccgcacgtgggtcgagtccggtgcggaatggattcatctggtcgaccttgacgcggcattcggcacgggcaacaaccgtgaccagctgcgcgccatcgtcaaggagcttggcgacaaggtcaatatcgaaatgtccggtggcgtgcgcgacgatgcatccctcgacgcagctttggaagcaggcgccgcccgtgtgaacattggcacggcagcgcttgagaatccggattggaccgcttccgtcatcaagaagtacggcgatcgcgtggccgttggccttgacgtgcgcggccacaccctcgcagcccgcggatgggtgaaggaaggcggcgatctgttcgaaaccatggcgttcctggattccgttggctgctctcgttacgtggtcaccgacgtggctcgcgacggcatgatgagcggtccgaacatcgatctgctgcgtgaggttgcggaacgcactgatgcgaaggtcaccgcgtccggtggcatttccaagctcgatgacctgcgcgccatcaaggaacttgccgatctgggcgtggattccgcgattctcggcaaatcgctgtatgcgcgcgccttcactttggaagaggcgcttgaagtcgcacgttgagcattgttcgcaaacccatgacgatacggccgtccacaacgtggacggtctcgtcatattcggcgcgtgttaacgactttcgtaacatgcgcatggaacgatggggcactatggataaacagcaagagtttgctttgcgcacagtcgaagaacgcgacgtgcgcttcattcgtttgtggttcacggatgtgttgggaacgctgaagtccgtggctatcgcaccggctgaattggaagctgcgttcgaggaagggctcggattcgacggttccgcagtggaaggcctcacccgtgtgtccgaagacgatatgatcgtcaagcccgacccgtcgacattccagattctgccgtggcgtggaggcccgcaaggcaccgcgcgcatgttctgcgacgtgcttacccctgatggcgagccgtcgttgggcgatccgcgtcatgtgctgaagcaggctctgtcgaaagccaaggaaaaaggcttcaccttctacgtgcatccggaaatcgaattctatctgttcgaaagacaggatgattggtcccagacgccaaccccaatcgatgagggcggctatttcgaccatgtgccgcgcagcccaggcatggacttccgccgcgccaccgtcaacatgctcgaacagatgggcatttcggtggaatactcgcatcatgaggcgggtccaggccagaacgagatcgatctgcgttatgcggacgcgctcaccacggccgacaacatcatgaccttccgtaccgtcgtcaaagagatttcgctggagcgcggcattcacgccagcttcatgccgaagccgctttccgacgctccaggttccggcatgcatacccacttgagcctgttcgaaggcgacgccaacgcgttctacgaggcgggccaggaattcaacatgtccgtcaccgcacgccagttcgcggccggcattctgtaccatgcggctgaaatctgcgcggtcactgaccagtacgtcaactcctacaagcgcctgtggggcggcaacgaggctccgagctacatctgctggggccacaacaaccgttccgcgctgctgcgcattccgcagtacaagccaggcaagggcaattccgcccgcatggaattccgtgcgctcgacccggtcgccaacccatacctcgcatattcggtgctcttggcagcaggccttgacggcatcgacaagcagatgcagttgggcgagccgaccagcgacgacgtgtgggagcttaccgatgcggaacgtcaggccatgggcatccagccattgccggagtctcttgacgaggcgttgaaggttatggagaagtccgacttcgtggccggagtgctcggcgagcatgccttcgaatacttcctgcgcaacaagcgtcaggaatgggaggaataccgcaagcaggtcactcctttcgaactgaagaagtacctgccgaagctgtaagcgaaccgcaatcgtttcattaaagaccgttgttgcaatcatgagaaaactgattgcaacaacggtcttttgctttccgaatgattatttgaatcttcttttgatgtttctgcaagtatcggattaaagttccaatgactcaattgaccgtaaattaacggttttgcgaagaatctcatcaccatagtcagaaaatatgaatgtcacaggcgagttgctttgcgtttcaaaagcgactgtcgtcgtcattttcacgccgggagtgaccttgcgtgttgtggaatagctatcatcgtcaagatacgtgctatgcaactcagtgccgtcttgggtcgcggaaacatccatatagttcaggaaagcccggtatttgcttccattttcgacataccaggatatgcgtgcgaacgctatgtcatgatcggcatatgaggggcttgtcttctcaatggagtctacgcggaaatgcagggtgctttcgtcataatcggttacggatccgtcttcgtcgaaattcgaagcgtccacttgctcgggctgagggacggccgcataatcaatatgtttcaaggatccttctatgtcgacttcgtcaaaggaaaacgcggcgcgaacaacattatgctgcgaataattcatcagctgaaccacaactggtgaattggtgtccgtaagaacgaaactgctggtggtctgcgagcttttcttcggtttcatttcggcgccggagaactccgtgcggtcggaatcctcgttggaagtgaatgcaggggcaagctcgatgccgttttgcatgaccatcagatctgcgacggcatgaggatacatcgttttcttgccgatgttcgtgcaggtgagcaaaaccgtgagcgtggcgtcgccgttcaaatcctccggacctgtctgcacgccttcgatgttcacttccaatgcttttcctccggtggagtagagctttccaacgtcttcgctgacggtttcctgtgtggacagctcctcgaactggcttgtggatccatcgaaatcggagatgatgtttgacatgctgtcagaaagcattccgccaatcgacgctattacagcgatgatgataacgatctccaaaacggtgacgaagccgtttttatggcggcgttgcttcttgtcggaagtggattggaactcgcgtgtggctcgttccgtttgtatgcgcggcggattatagggctgcgatgggcgtccttgcgggttctgcgggttttgctgattttgccgcaacgcctgttgcaagctttgctgcatggactgggcataccgcatggtttgcgtggaccagtcgttcaacatggtttggagcgtgtctcctcgtgtggactgatcgccttgcgcctgttgagatctaccgtcttgcttggatcgggtgttttgtggggcctgcctgtcgcgcgatgcctgatcgctctgcgcgggtttcacatatcgccgctggacataggattcacgccgtgcatggtcacggttcacctgattagacaggcgttcggcgttgctgctgggatcgatgtaatcggaacccttgaatgggtcgatatagtcgttgttgttgagtaggcccatgaaaggctccttctggtcagtcccttccatgagcaattgtatcgaaaaatcagcctcgaggagagccgaacatcgaattgtagatgatcgcgaagttgcgattgccgtaggtcgaacaggcgtcgccttcgccgactcccgcatccaatgcggctgcattcggctgataaggcgtgtaaatgtacagcagtgcggtcgccttgttttcgatgtacacgttgctgccaccgcagctggcgtccggattgtattgaatatagttgagcgtgcccgcatggtatccatagcgatcctcatgttgcacgtaatactggtagcgtttcgccgcgccatacacctgtttgaaaaaacctgcatattccgggtcacagttcgcgtcgtccgggcagctcaatcccatggccgacttgaattggaagtcgcttggatcggtggcggtaagcagatgctgctccttttgcagcacggtgagcagcactttttgactgatgtcgcacgcctttcccgacttgtagatgatcgccgcggcgctttcgttcggctctccctcatatgcttcgcagtattcgttggcgggttgcgattcggtgctaaacgtcatggatttcaagcatttctcgccgctgcatgcggcaccctgtttttcgatgatggcgttcacctgctgctcgctcaacgcgttcccgttgaagaacagaccatctgaaatgatgttgcccggattgaaatcgtattgcgtctgcaattgttcctgcgatgcgaccgcttcatccacttgcacacgccaaccgacgaatcgcaccaatccaacgatcaacgcgagcgcgacgatactggctatcagtgtttcgccgactatgaggatgcgttttggggtgtttgcttttttccaggcgttacggagtttggtgaggcttggctgcttgtttttcttgggtttgcggttgttttttgctgtggtggttgttttgcgtgtcatcgcgcgtcattgtatcgcgtttggcttatcgtttgtttgacgattgattcgtcaatcgattgacgtgagaagctttaatgacaatgcgagtttggcaaggcgtggggagttcgaggggctatggaggagaagtgtatggcgaagagtgatgtggcgaaggaacggtttttcaatctgcctgtgattgtgctgatctcgctgagtttcatgctgggcatgagcgagttcattgtcgttggcgttctgccggatatcgcggctggcttgaaggtgtcggaggtgacggtcggcaatcttgtgtcgctgttcgcgttcgtgtatgcgccggtcacgccgctcggatcggcgctgtcggctcgttttccgcgttttgccacgcatctgacgctggttggggtgttccttatcggcaacgtgctgtgcgcgttcgcgtcgaattatggcgtgctcgtggtggcgcgaattctcatcgcgctggtgtccggcacgctggtggccattgccatgacgtacgcgcccgatgtaacaactgaacagtaccgcacgaagttcatcgcatgggtgttttccggcttctccatcgcatccgtggtgggcgtgccggttggcacgtgggttgcgaacacgttcggctggcgttgggcgttccatttggtgaacgtgctcacagtggtgcttattgtgctcatggtgatggtgctgccgcgcaacagccgtattgtgaagattggttttctgccgcagttccgcctgttcttcgaccgtcgtatccagcttggtgtgctcaccgtggtgttcggcgcggccgccagctatgtcttctacacgtatctgacgccgatcatgcgagacgaagtgcatgttcccgaacagtatttaagcgtcggcctggtgattttcggcgcggcctgcctgtggagcaacctgtacggcggcaagcttgccgaccgtggcaggggagtggaaccactgacgcacatccgtcccatctactgcgcgcacgccgtgctcatggcatcgctgatcgtaacgcattgggtgccggtgtatggtgcgttgctgctggtggtgcttggcatgttcatgtatctgcagaattccgcctcgcaggtgctatatatggatgttgcctctcagtcgcatccgggatcgctgaatctggccgcatcgctcaattccatgtcgttcaacaccggcatcgcggtcggctccgcggttggtggactggtcaacgcccatttgggactgatgtggcttggccctgtgggcgcgatcttcctgctgtgtgcggttggcaccacaacactgctgcgcccgttcgtagctcgagaacgcgatttctacgccaaacagcaagcctgatggcatttggtcgggtttgaacgagcggtttctgaaagcggcaaagttatagaagttttatctgtaattcgttgagattgcggaaagcgattagtggactgcgatgttggcggactgggcagtagatccgccgacttgcggagcgtagtcggctagatcgattacgcgatcgcaggcgtcccgcgtgtccggatcatgggttgccaccagcacgatcatgccttgaccggccagattgccgagcacatggcttacggaatgtgatgtacgcgtatccaactgggcggtcggctcatcaaccagcagcatgttcggcctggaacataccgcacgcgcgagcataagacgctgcgcctcgcctccagacaaatcgcagaaacgcctgtccgccgcatacgccagatcgaacagttccatcgcttccaaagcctttggttccgcttcgcggcggctcattcccttggcgagcagtggaaacaccacatggtcgagcgccgtgcgttccgcaacaccatacggattctgaaacacccatccaacacgatccacaccttctctcgtcaccgtgccagcgtaaggctgctcccatcctgcaagaatcgacagcaatgttgacttgccgcatcccgacggaccgcatatcgcaatggtcacaccaggttcggccacgaaactcaaattctcgaacagcagatcggttccctcaaatcgatgagccaacccctcaaccgcaacgcgcatagccaacctttcacgaggcaatcaccttaccgacgcacccttgccaatcatttgtagtcccctaattgcagccacgcaacacccaccctacctcatttgtgtatatgtggaatgtaatgttcaatgcagtacgcgatgaggtatgaaaacggttaatcggcaacaagcattcctgacgttacaaaccagcccgtgtaagaggaacgaacgcatagaactcccaccgtccatgctcctgcgtggtgtagatttgacctccatatgcggcaagttcgtcggacagttggctcagaccatggcctcccggcaaattttcctgtgtttcggcatgatgatcattgacttctgtgatttcaatcgaagcacgtttgaccagtacggaaacattgtattcgtcatcacatgtcgcatgacgggaaatattcgcgtaaacctctttgatcagccgaatgatgatggcagacaaatcggcgtcgacatctgcgggagattccaaaacgcttacttggcttgttcccttgaaacgcatagattcaagtgccttgccattacgctccatctcctgtcggatacgacatacgaggtcggcgtcctgcccggactgtgcaacctgatccgcatgatcaccccctttgatgtagtcgatcacatgatggacgttctgtaatgcggaaacgatatggtcgttggtctgcttccactgcgcggcgtcgggattgttttcatcgagcatctgctgctgtgcctgcagggaagcgagggacaaatccgacgtcaccgcatcatgcatttggctgacgatttcggcgtcgcgtttcaaccgtgcgttgtcgtattgcgcgcgttcagcggcccattgcgcctgagctttctccccgtgctttcgtaatgcggtgccgaacatcgcgaccaacatgaacatgatgacgaacaccggataagcgcggaaattatatccgggtccgttgaaaagcgttgtctccgctgcttggctgagggatatttcaagagccagacccaaagcgtaaagatcattggtctcgtaagacagtatgccaagcgaaaacagcacgccgtagaggccgcactcattatcgtatcccccgaaaacgtaatccgtcacctgcagaagcacaaaacagataagcgggcatgctcgcgggtagaagagcgtgagcaatgcaagtacggcatgtattacgttcactacctgtgctgacgttggttgctggtagctcagtgtcgtccaaatcagcagatattcccatacgagcacgagaagaagacggaaaggatgctggaaaagcttgaatttcgcaagaaacgactgtaccgacgtgattggtgttctactcatgattgttcatccaaatggcgattgcctgccgttgggtattgcagtgcagacgttgaacgatattctgcatatgtttgcggacggttgcttttgctatatgaagtcggtcggcgatttcgtcgtcggtcaagtattcttcggcgcacaagtgcatgatggtttcctgtgtgacggtgagggtcggcttgagcgcagaccggtttttgagctgtatatgggcgacgagcggggtttcgaaaccgtccatggtctgccctcggacgatgcgcggaatgcattgggtgaattgttcgctgctgcttttgtcaacaagtccttgcgctccagattcgatggcactgtttcggtatcggttgaggctgaaactggtcatggccagaatgggcgtgctattgttgatgaggcgtatacgtttgcagatgtctggtccttgcaagccctcgagcgacatgtcgagcaatatgatgtcgtattggtttccgtacgctctgcacagtgacagagctttcgtgccgtcggtgacgtcgtcggcgacgtaggcgttggggagtgctttgctgagcagtgcagtgagcgcttcgatggcccgcttgtcattgtcgaccatgagaatacgcggatgaacaacgatgtgactcatctacacactccttgcttgatgaaacgcagcgaaaacgtattcactggcaccactttacgagaggatgggggcaactcgaagacaaagtgatctgaggatttgacgatagcaaagcggtattagttgaagagcggtatgggactgatactggaacaagtaatattacaactattgtcccgataaggatgtcattcatatttaccttcctaagacgtcatgcttcaccgtacatcaggatgatgaaatgtatgaagtgagtcatacgcaatatgtgtatcttttatgcgcaaaatgatgaaaaaaattttttattgggaaaaatactcaatttgagtatcgtcagcttttctttgagcagcattcctcgctatattgtcctcggtcattcttaaaggaaggaagagaaatgaaaaaaggaaacgctttctatgctttctggatgtgcggcttttgccatggtgctcagtttgggggcgcctatggcccaagcggctgcgggcaacatagataacgcaagaatcaatggatcttggaattattcgtggacaaaatctactgcgagtgtatgggcgaggaaacctgcatatacagggtatgcgcaggcgtgccaagacggtgtttgcttcaccggacatacgacgcaacgtatacaatcaacgactgctgtagcatacggtagcgcgagcaatcatactgatagcgccagagtgtggggctgatggcagatgccgcatcgatttcggattattcctctaattagcgtagttggcttgacgttgtcattgatgtcttgcgcgtctatcgtagatggacaaaaaggtgaggaagttgaagcttcgtcttctgctgcgcagtcgggagctgcacagcaggggtcaaccagtggacagaaattggcggcgtcgttgagcgaatggatcgaacagcgggaatcgcaaggtaatatcgctgaatcgcagaaaacgatattggacaaagccaaaagtacgggtgagatttcgacgtcggattatgagaaagcctggtccgattaccggcagtgcatgatcgacaaaggatataaggaaatcaaactcatcaaatatccgagcggactctatgccgaagctggacacaaacaggggacgaccattcaggaatcccgatattccgatgattccacggaatgcggcgatgagtatgttgcagatgtgcaagatgtgtacggtattatcgtaggcaatccgaatctgtatgccgatcaagcgcaggccgtggtcgattgtttgcatagagactcgctcgtgccgaaggactataccgtaagccggttcaacaaggagttttccggaacggatggcaatacttcgtttgacatgcagaacctgcaagtgcgcagttgccttgtgtcgaacggctacaacgtgggatatgcgaccgacgatacggaacagttgtggtgagaaggtaagtgattccaggggaatcatggtgatgtgttcgctgatggtgcttgttggctgtgagtgaatgggtatatgtgagtatgacgcgacgattcggaatgaaacaaaggacgggcggtaagcgttcgaagtgcactgctgtgacttggactctgctggcggctgtcacggcagcttgtattgcggtcggatcctgcgcattgtggctgcctgaccgcacgccgacattactgagctcggcggtggagaggaccgtggctcccgccagtgtgcaagaatatacgggcatgcagcaggttactgtggtgcccaccatttccgacgaccgtgacctt

SEQ ID NO: 838 - DNA, 13301 bp, Unknown
  gut microbiota DNA sequence
agcgtgccctgcatcgtcatcaaccgtggtggcgagcagaccgtcgaattcggcaagaagagcattcctcagatgcttgatctcatcggcgcgtgacaagcgtgtgacaaacggtgataagcgcgtgagcacgcttcggcccacgggattccgtcgcctgattctgtgaaccgaatgccacgcgatgacgaatatgcccggaatcaggttttggcttgattccgggcatatttatatgcgatggcgcaggcacctagttcgtgggattatccgctgtaatcccacgaactaggaaccacgaacctatgggggactaggcgacggcgacgcgcttgcctgcggccttgaccagcgaaatactgatcagcgcgattatgaacagcacgatgagtaccggaatcaacgcggcataacggtgcgcctgatcgggggcgtgcgtgacgacgaacgacgccagctgattgccggacaagccggcgaatgcccaggcgctcaaggtcagcccatgcgtggtggatacggttttcgtgccgaagtgctgatcgagcagtaccggcagggtggagaagccgccgccgtatccggcgttgacgaggaacagcatcatcaacacggcccacaacaaagcgcggtcgatactgttagtgcaaacctgcagcaggcatacggcgatcgatatcacgaaaatcacctgatatacggtttcgcggcgcttgaggtgatcggacagcgtggagaagcccacgcggccgacggtgttgaacacggaatccacggcgagcaccaaaccgataatgccggaaatggcggccgcgaacgcgctcgggcttagcggagcgtactgcgggaacgccttcagcacatcatgcaggatgtctttctcttggctgataagagctagaccacaggtgatgttgatgtagaaggcgagccagatgccccagaacacgggtttcttaagaatcgagacgcggctgacataggaggtcgcgggatcatagacccagccggcggggcggcgtatgagcaggaatcccacgagcatcattatcgcgtaaaccacggcgagcgtatagaacatgttcaccaggccgatcgagccgatcaggtattccatcaccggactggcaatggctttggccaagccgaaaccggcgactgcgataccggtggcgaggcccttgttgtcggcgaaccacagcatcaggttcttgaccggggtcaggtagccgatgcccaggccgacacccatgatcgcgccgtagcagatgaacacgccgggcaggaatcccaaggcgatgctcacgcccgtaccggcgaaaccgaccacaaagcagaccattgagataagagcagatttcttgatgtttttctcaaccatcggcccggcgaatgcagcggacatgccgagaaagaagatggcgagagagaagccccattccacggaggcggggctggcgtgaagctggtccgcgatcaactgcttgaacacgctccagcaatagacggtgccgattgggatatggatcaatagtgcggggatgattgcgctggtccaacgattcttggtaaaccttgccatgtataggcgaatcctttcgcaactggcgtacgatgacctgccggttggaacaagaggagtttcgtcgaggaaacggatgcacaccacatgtactgcgaacaattcgctgaacatctttggtgttgttttcatcggcgccgctggctcttgtcgacgccgacaaacagcactataacgccgttacggtgattccgtggccgattatcgtgggttgtgaccgtgagcttattcacatcgaaaacggttatggaacggtatcaatgtgagtaaacttgtgctgctgaaccatgaaagcctgacggttgagtttacaagcgaggcatcccgacctcagattgacgatgagctcgtggacaacgtggtggcgttggccaataccgaaaaaacgggtcgttgtaccttggcatcgaagacaacggcacggtaaccggtgttagcggggaacatcgcagcgttgacgggctggcggtgtttatcttcttcagcaagacggtgccgcaggtcgcgtggtgcgtgctgaaatcatccatgcggacaacgggttgccggtggcgtgtatcgaggtagaccgcaacttgcagattgtgtccagtatccaggggcgggacagcgccgtctgaaggcggatggaacgcccgaggtggtgccgctgttcccgagccggttcgtcagtcgcctatcccagttgcgcaactacgactacagcgcccagcccgcgcggaatcacgattggacgactgggatcctgtcgcgcgcgaacggttgcgcgacaggattcgtctcaccaattccggcgatacattgctgctgttagatgacgatgacctcgaccatgcgttgttgatggtggtggacggtccctacggtccgcaaccatcgcttgccggagtgctgaccatcggcaaggtggatgcgatccgacgttccatgcccatgtcatcggaagtgtttcaagtgatgaaaggggcgtctttggccgtcaacgccgagcccttcgcggatgccgttggttgatatgttctcgcacatcaacgcattgaagccttggaatccgaatcacgaaatcatgagcggtctggttcatgtcaatctgcctgattttggccgtcaggcgttccgtgaggcaatggccaatgcgttctgcgatccttcgtcgccattgagcaatggcattgtcgggaaagttggacgaagtcggcgaagcggataggtggatttgggaacggctggggcatatatgggaacgcctcggctgctggaccggttcatcacagcagccgaggtgtttgataaagactcaaatcttacttgctgaaaaccttcttgaacaaggtgtcggtgtcgccctgtccaacggcatcgtcggcttcatcgccgttgcggcaggtatgaccggcaacgccactgcagccgatatgaccgccgcgaacatccacaccttcgaagtctgcgccttctatgtgccgctcgacctgatcgtgctcagcctgctggtgttcatgttcaaggtgaagatcaacgagaagatgcacgccgaaatcgtcgagcagctcgaagccaagctcgcggccggtgagatccccgacgaggaagtcaagacggtcgagacggttgaagcgtcaacgagaaggccaagattctgaccgaataaataaccaatacttgccactccttcctttctctctgatggaggccccaatttcgattggggcttccattggtatatgcactgttttatagccgttcaaagtttgtcaaatgaacaaaacgaccgatgtcccggagcataatgcaaccaatgttgtttcgttttttcgctcaaggcatatcttgccatgttccgaggtgaaccatgtattttggcgaatgaccaatcgaagaatcgaattagatttcattgtttcggatgagaaggtcccagcttcacagggggtattaatgacattcatctcacgagcggcgcgctatgtgctcagaaagcgagtgcgcaccgcagtgctgttcattgtgctgaccatcataacggcgagtatgctgtccgcaaccgcagtttctcgggcagcgcaacatgaggccggacagattgagaaacaggcggtcggcggattcgtgctggccagtaacctgcaaggcagcatgctgacacctcgcggaggcggaatggttcgtcccgctgatgtgcaacgaatctcgaagctgtccggtgttgactcgtacatggtcaggcagaacgccaccgccgatctcgtgggagccagcgtggtgaaggtccccggcggcgatgattacgatgcggagaaagaacagcagttcggcaatgcggccaacgtcatgggcacaaacgattcgtcgaaactcaatgtgttcacgtcgcacacgctcagcatggtcgacggacgtcatctcaaggcatccgataagcatatgtcgatgatccatgaggatctcgccaaagccaatggtcttaaagtaggtgataccctcacgctcaaggccaatccatatgatgccgacaatgagtcgcattcgacggcaaccgtcaaaaccaccatcgttggaatattcaaaggagacagcgacagaaaggtatccagccgcgcggaactcacctccaacactgtgtacaccgatttggacactacaagtactctgtaccagtacaaggccggcaaggaaatatatcaggatgccactttcgttctggacaagggtgtcgacgtggagaaaaccatggaagcggcgaagaagcttccagtggattggaacaactaccagatcacacgcaatgaccaatatacgtcgagcatgctgaatgctgcccgaggtgtgcgttccatgatgctcagcgctttgatcggcgtgaccatttcggccgtgatagttctcagtctcatgctcttactgtggatgaacgaccgacgtcaggaaatgggcgtactggtgtccctcggcatcggcaagccatccctgatcgcccaatatctaaccgagatgattctgatcggcctgccgtccctggtcctcggatggttgtgcgcacgaggagtggcccaatggcttggcacctcggccctccgttccgtgaacgcctccgcggcgaaggagctgagcagcatgggacaggttggcggcgatctcgagtccaatatgtcggttcgcaccttggattcgctcacggtatcgatcgacacgactgccgtactgtatgtgtcgctcggcctgctggcggtgatgctggtatgcgtcgccatatcgtgcataccgatgctgcgcaagtcgccacgaagcctgtcggagctccgatgacgggcatgaacgtgtggaatcgtgccacgctggcaatcgtgcgtaaaccggtacgcagcggaatcatcggactgctgatgctgatggttttcaccagtcttgtggctcaggttggagtgtcaacggcacttcagaaaatgtccgacgatatcggcagaagcatgggaataggttttactgtcgacacaggcgagaatcctgcaagtctaaaggaagcgagccggttctcgcgcatccccggcgtaggaaaaaccgtttacgagcgtaagaccttggcaggggtggatggagcgcatccggttgtccccgaacatggtcctcggctggattccggtctatccacgcaggtcagcgtgctgggcaccactgactcctcgttgtccgaagagttccaaagcggtctgtaccggttggaacaaggacaccacatttcaggtaatggccggaacgtactgattcaccgggatttcgcacgtgagaatgggctatcggtgggatcaacactccggctcagtcaggaagaccgcgattccaccgttcgcgtggccggaatcttctctggcaatgtgcaggcacagagccctatgccatcggacgcatcggagaatcttatctatgcgggtgcccaagtggtttccgcgctgactggagaggaacgggtcggcacgatccggtgcctctcggataatccgcaggctctctccgccgcagtggcccaagcgaaaaaaatcgctggaagcaagtatggcgtcaccgatgactcggcgcggctttccggcgtgctgcagtcggtggaaacggtgcgcgatctggttcgtatggtgctgttgtccgtttgcttggctgatgtgttggtactgggcatggcgcttgtcttctggatccgctcacgtattcatgagataggcacccttctggctctcggcatcggcaagatgcagattatcgcccagttcgcaatcgaaaccggtctcatggctgtggtcgcagccctgtgctcgctgggcacgggctccctattgtctggatacgtgtcctcgcttctgctgcacgattctggagtcgcgcctcttgaatcattgcaggtggaggctctgccgccagaacagacgctgctcatcctgctgctcggatgcgcggtcatcgcgattgcgcttgccgtgtcgtgcgccgcggtgctggccaaatccccgaaatccattctttcctctatgcgttaggagatattaatcatgactatctgtctgcaattggaccatgtcaattactcatatggcgcggcgaagatccgcgttctttcggatgtgaacgctgatttcgaatccggaaagatgtatgcgataaccggtccatcgggagcgggaaagagcacactgctgtccctgttggccggtctggatgccccctctgatggagtggtccgtttcgagggtgaggatatagctacgacgggttattcaaagcaccgtcgcgagcacgtgtccttggtgttccaggaccataatctgatcgactatctcactcccgaagagaatctgcgtttggtcaatcccaaggccgatatgaagatcctcgaggatttgggactgagccgtgaggaatcgaagcgcaacatcatgcacctgtcgggcggtcaacgtcagcgagtggcggtcggccgtgccctagtggcgcccggccgcgcgattctggcggatgaaccgactggcagcctggatccggaaatgactgatgaggtgattgatcttttgcggcatgccgctcatcaactcggtaaatgtgtcattgtggtgacgcattccaagcgtgtcgccgattccgccgatgccgtttacactctcaggcacaagaagctagccaaggcatagctcgctcgcctaaaccgtgtcttccgtccgaacagcgatccaccatcggtggcctctcggacttccgttacggcaggggcctcttgacacgtggctgctgcgccacgtaatgaacgcgttgggccgcggcatcgccgccgctgcctacgtgtccatgggtggggcggcatgctggccggcttctacttgctgtccgcgaacaacgtgggctgggggcgacgtgcacggcatcgtggatggttcgttattacaacggcagttctcgataaaccaaatcgtcacggactgcaaagccctgccgttcccagaaatcgttgccggcgtcgttgtctgcgggcactccgacagcgactttcggcaggccgattgcacgaagcgtttcaaccacacggcccactaacatcgagccaatgcccctaccgcgtgcgtcggggtcgaccgccgtgtggtagatgcgcgaccgtcttccgtcgttgccggcaagaatcgcgccaatgatccttccgtcatcgtcctcagttacgaagcaggtgtcgggattgcgtttgagaaacgtctttatcgcatcctcgcaatcgtctatatccctcatggtgaaacctgtgcatcgtgtccacagtccgtataccagcggataatcctcgattttcatatggcgtatggtcattgcgattggttcggtcatatttccttctttccttcttaaacgccaattccgattctcgcatcgttcgcggtacttcccgtgtgggtatgccatatttgtgttgcgcggccgtctgcagcgcgcgtgtcggggaagccccctgaaggataatcttcgattttcggggataccccggatgtgaacatacggcaacggtatggtgaactgtgcttaactgaaatcatgcatatgaagaacggaagcatcgcgagagcggcggctgtggtaatcgcaaccgccatattgtgcggcattgtgcctatgattggcgtcgcactgcgcaattcggcaatcgcgacaatgcgtgaaaccaatattttgcaggctttagcggcgctgccagaagggttgcgcgactgctctacggtacttgcgtatttgttttcaacggtaggctgcatcgcaatcgtcgccgcgcttgccgctgtcgatttgcgtattaccggcagcaggcgcgtcgtcatccgcgatgtcgtcgtgtcggcggcgccgatactgtacgtgaccggtgtcaaatggctggtcgaacgcccccgtccgatcacgtccgtcggcagtgatctattgccgggcgatccaagttttccgagtggtcacacggcagccgcggtgatcgtatcggtcatgatgattcttaccgtgcgtaatttcgcgcgcaaacgctttcccgacggagaagatgacgggcgtgcaaacggaagacgggtgttcctccgcagggcggtcatcggcgctgtcgcgcttgtcgcggcggtcgcctgttcgcgattgctgctcggcttgcactatccgaccgacgtgattatttccgccaccatctgtccactcatttcctacgccgtatggtgtgtatggaacgcatacgaaagcgcggcggagcggtaaaaacgtatctgccatgtgagtttctttgattcccaaatcagttaaggaatgtccgattgtgcgggcaaaacgacaggttgtgtaatggagcgcaggttgtcggcgaaaggctggttcaatcaaactagcggcggatgctcacatgcgatgcagccaagaacatccgcaacaagaacagcgcaggctcagggagggccaagcgggttcgaggagttagtgcaagggagaaccaatggaactcgaagaactttcggtcgttgaaaaggccgcaatgctttccggtggatccgaatgggattcgcgaggcaacgaccgcgcagacatccccagcttcgtgatgagcgacggcccccacggcgtgcgccgccagctcggcgaaggcgatcatctcggcatcggcgcatccaagccggccacctgcttcccgaccgcaggaaccgtggccaattcttgggatccggcgctcgccgaagaaatgggcgaggccctcggcagcgaagcgcacgatcttgacgtgaacgtgctgctcggcccgggtctgaatatcaagcgcaacccgctgtgcggacgtaacttcgaatactattccgaagatccgatcgtcgccggacgtatggcggcaggcctgatccgcggcatccagagcaacggcatctccgcatgcccgaagcatttcgcggttaacagccaggaactgcgccgccaggccagcaactccgtggtcgacgagcgtaccatgcgcgaattgtatctgaccggtttcgaaatcgcagtgcgtgaagccaagccgctgaccatcatgacctcctataacgagatcaacggcgtctacgcgcacgaaaacaaacatttgctccaggagattctgcgcgacgaatggggcttcgacggcatggtcgtctccgactggggcggatccaactccgcggtcgcagcagtcaaggcaggcggatcgctggaaatgccgtctccgggcttcacttccgtgcgtgagctggaaggcgcggtcaaggcgggaactctgtctgaagccgatatcaacgcgcgtgccgcagaagtcgcaaaaatcgcggcagcgaccaagctggtcggtgttggacgtaacgatctgctcaaagacgatatcgcagcagcgcatcacgacgtggcacgcaaggtggccgaaggctccagtgtgctgttgaagaacgataacgcgaccctgccattcaaggccggcacccgcgtggcggtgatcggcgatatggccgcaaccgcacgttatcagggttccggctcctccaaggtaaacgccaccaaggaagagaacattcttgaagaggtcaagaacgccgaagacctcgtgcttgccggctatgagcagggctatgaccgccagggcaaggctgaccgcgtgctcgtggaagacgcagtcgcgctggctggcaaggaaagcgttgatgtggtgcttgcagtcgtcggtcttgacgaacgcagcgaatccgaaggccttgaccgttccaccatggcgattccgcaggtgcagaacgatctggtcgaagcgctgaagggcgcgggcaagccgatcgtggtcgtgcttgtcgccggctctccggtggaactgccgtggattgatgatgttgccgcagtactttacgtgggtctgtcgggtcaggccggcgcttccgcaaccgtgcgcgcgctgaccggcgaagtcaatccgtccggccacttggctgaaacctggccggtgcgttacgaggattgcccgagctccggttggtatccggcgattggtcgcgatgcgatctaccgcgaaggcccgttcgttggctaccgttattacgagaccgccggtgtgcccgtgcgcttcccgttcggttacggcttgagctactccacgttcacctacagtgccgccactgctggtgagaacggcattgacgtgatggtcagcaacgattccgatgttgccggttcgaccgttgtacagctgtacgtgcgcggtccgcagggtggtgtgttgcgtccggatcgcgaactcaagggcttcgccaaggtttcgcttgccgcacacgaaagcaagagcgtgcacatcgatttcgaccgttacaccttccgtcacttcgacgttgccagcaacgaatggaagacggaaaccggcgagtggacgctgatggtgggcgacaacgccgaacacctgccgcttacgattccgcacaccgtcgcaggcgatgtcaatccggttgccgcggatactgcgctcggccattatctcagcggccacgtcaaggaagtgaccgacgccgaaatggccgtgctgttcggccatgaggttgtggcaccgggcaagccggtgacgttcggcgtgaacgatccgatcatgtcgtgggtggattccaagggcttcgtggcgcgtaccgtcgccaagacgctcaccaagcaggaggccaagattcgtcagaagaccggcgctccggacctcaacaccctgttcatcctgaacatgcctccgcgagccatgagcaagatgacccaaggcatggtcgattccgcgatggtcgacgccatcgtcaaaatcgccaacggacacaccttccgcggattgggcggcgtcatcgccggcttcttccgcaaccaatccgcaaacaagcgcactgcaaaggagctgaacaatgactgataacaacgcaacgcagccggctgagaaggtcggtccgatccgccagtggatcaaggaccacccgaacatctgggagttcatcctgttcaacgtgctgtcgaacatctccaccatcacccgtttcgtggtgacgtggatcggcaccgccatcttcatcagtggcatgggcctgacgcagccgttccacttcctgatcttcaactacgacactcagggcaacggtctgggcggcttcctcaccttcctgcttgccgaggcgctcgcccaggtggtgaacttcttcgtgcagatgaagtgggtgttcaagtctgactccagcttcaaggatgccgcttggaagtacgtgatcctcgctgtgatcatcgtggttgtgaaccttgtgctgccgggctatgtgaccggtctgtgccagggttggggcatgggcgctggcattgctggcaccatcgcttccgtggtcaacaccctgctcgccgtgatcgtgagctacccgctgctcaagttctgggttatgccgaagaacaaggactccaaggaggccgccaagtaatccataactgacctccttttcttcccttcctcaacccgcccagtcttccctctttcccgggcgggttttcttatgaccttttgctgctttcttgtgatttctcaatatcgaaagtgtaatcgtcagcagtgctgtcggcgtaaaatcgaaagcgagattggcgtaaacttgaaagtgagattggcataaacttgaaagtgagattggcataaacttgaaagtgcggaatgatgagtgatttggcgaggtcctaaagcttcgtcaaccattaaacggggtcgttctcttcctctctcatgacctcgttggaaaagccctgcatagctgcggggcttttctttttgctcagaaagacatacgctaaccggccccagcaaatgaacgttttttgttcttttgtcaacctcttccgtatagttgtatgcagtaatctcccgaaaggggattgcgaatctatgaggggagacaatgagctcggaattgaagttcgtccgttgcgggtttaacggaggaacggaacgggaatctggacggcagtgcctgtctttgaagcgttgcctcgcttcggttattgctgtttccttgtccatcgtgtgcatggtgcctgcagcatatgctcagaatatagacgatgtgagtagctctcctaacgccgtaatttctggagggggggggtatactgtcgtagctgctccttctgcccgcaatgtcaacgttgacgataagacgtcagaagaggccaatacatcaaacggtgcgccaacaccttccgaaacgaatcaagacgcacagcaggattcatctccttcatcttctactactggtgattcttccgaatcctcaaatggtgcgacagacaataaggcggacgactcagcagaagctaccgctggcaattccgctaatgatggagcccaaacgcaggctccaaacgatgcttcttctcaagatgccaagaacgattcctcaaatgcgacggatcaatcgccggcgaaggccgatgtgcaggtcgccgcgacggcgcttggcggccgtgactttgagggtcaggtcaccaaggagatcaacggcaagacctacatcctgattggtaacgagcagcagctgcgtgcgattggttctgggaagaaggttattggccgcatcaacaaggtcacgcagacttgcacgcaacaaggacccctcaattatcagtgggtggacggcacgccgtcttccgaatacgccggtgacgccgatctctccgattcagatattttgcgcgatactgatgcctccgaccacgacagtccactgctggcatgcacggcgttaagcgtcaacaggacccgcaccaagtattacggcgtgggtgctgatggcacgcaaacggactactccgctgccaacaccggcctgacctattccgcagacgccaactacctgatcttccgtgacatcgacctgtccaagaacgcggcagataccaacaacaccgagtggactccgctcatgttctccggcactatgctcggtgcggtctccaatgacggcgacaccgaagccagcctgtggaaggctgttggtgccgatggcgcaagcgtggttcacgctaccgcagctcggccggtcatcagccatgtggtcgtcaatcaacagggcaagcagctggacgtcagcaagcagcagggcatcggcttcttcgcctcgatcacgaacaagaccgtgatgaacaacaccagtctgggcagcgccggtacggc

SEQ ID NO: 839 - DNA, 25352 bp, Unknown
  gut microbiota DNA sequence
taaatcgatggtttgtgaggtatcagtacaatcaacttcggaaaaatcagtgatgattctgtcggcgaattgcacttcctgcaggatttgaccgcgtctggtgccgagttcatgctctttggtaccttccgtatacacccagaacggtttatggaagttgatggagaacagcgtgccatgataggagtccgtaactacaccctccgcatatttcaccagcgagaggaattcttccggccctgcctcgagcacattgacaagctcatcgcatttcggcacattgcccgcctgcggcgtcagcactgcgacaggcaggccgactcgacgagacagttcacgcagttgcctgaatacgccgacagcacgcttgggacgcagcagcgaataaaacagcagatactgttcgggcacgtgttgcgacttacgcaacggtatgcgttcctcccattcgcccgcgttgagcaacagcgtcggatcgcatacgtgttccacatatttgccgcttacctgccgcagtttgccgcatgcggaacgttccctcgccgaaagcgcgctgaattccgccaacgccggtccgatgcgccgcagctcatcgtcggtcatggtggccggcgacgaagcatacgagattttcctgcagttcgcccatttcagcaggtacgggtccatgtacttccagtcgacgcgttccagctcgttggaatgcttgttgatgatctggtcgctgccgctcacggccacgtcgaatgcgtcagccagcgaattcagctcttccggctcctgatagcgtcgttggcccacatgtatgttcgtgctgatgaaccgctcgaaattgcgcatgcgcttcttgcgcagtcccgcaaccggcagcatggttaaatccgcgagggacgatttgaggcccagcccacgccaatataagcgttcatagtagcgttcgccctcaagcggccggtagtcgatgacggtaacgtcatgccccatgtccgtgatggttgattgcgtggcatacgcctgcaataccgaaccataattataggcagcatgatacgtgattagaccgataatattatgcttctcgtccatatttcctcgtcgttcaagtagttatttctttgttttctcgctattgcagaagcactccgctttctcattgttttccactgaattgcttatgacgcacccatgcgatcgcagcgctcacgtaataccatcgatatttcatcgaaagcaacgcgatttgtcgggtcacaggaaaacgacctccccgatatcgatcaagcggctgccgaaaaaccggcatgttcactacttttccatagtgattctttcgttcatgacggttccatggcgcttcgggattgaacagatcattgatcataatgatcgtcagatgaaataatgtgtaatcatcgagcgttccatcagatatttcccgaaattgacgaatggtatcgcgcattgtttcgatcgcagatattgttcgccgcacataatcgttggagaacgaccgcaccgccgaatccgcattgcggcggtattcgtacaccatttcatccacatagccgattcgattcgccgccgcgaccgcacggaacgcatattcggcgtcctcccccaaactcaaggtttcgttgaatccgtcgatccctttgatcagcggcatgctgtacagcttgccccaaacaagcgcgatacctcgctgcggtcggagcatatcctcgcataggtcaagacgcctgcgtccctcgaacaccatgtcagtttcagcataatggtgttcttccacacttggagacccctcgcctttgccgcccataatgacggcaccagcggcgtcgggaacaccgttcgcatcggcatcggcacctgcaagcacgttgcggtacgcccccatcaccacatcgcagcggtatcgcaccgcaaacgcaagcatgccgtcgacggcatgcttggcgagcgcatcatccacatcgaggaacatcgcccactgccccgtggccgcgcgcaatcccgcgttgcgagccgcggagactccggcatgggcgatcgtttccgtacgaatgctgaccaatggcgaattccaattcgagatcggtgccgtttcgaatgccggctcaccatcgaatacaatcaccgcttcgatacggaagccactgccctgctgccgttgcagactgttcacgcaatcatgcaacgtttgcaacgtggcacggtagacgggaatgatcacactgatggtatggctcatcgtcagttcagctcccgtgtgatcaccgaagcatcataccggaacgataccggcgattcgatgctttccgggaagttgccgatcgccacgaacgcaatcagcgtttcgtagtcgggcacgcccaacagcttgcggatctcatgctcctgcttctcacgcatcatggtgttgagagggcaggcggccagcgactcgcattccaatgcggtcaggaacgccatggcgaacaggcctccgtcgatatacggctcgttgcgttcctcaacgcttacgaaactgcgcacgtccacactgatcaacgccagcaccggaggcgcatcgtacccacgccacccgccctgcaacgccaatgcctgttcgatgaatttcggattgctgatcagcagcacgcgatatgcctgcctattgcataccgatggcgttttcatcgacatgcttacggccttacgcaccgttcccatatcaacaggggtttcggcatactcgcgtacgctggaacgccctgcgaacaatgctgcatagtcgagcgatgcgttgtcgcgtttgtctgtggcacgcacggttttcacgcccgcattgcccgcaacgtcggctttttcggcttgttcgacgctttcgatatccaccgaggccacttcgtcggcaaaccatacgcccacaaactcaggaatcggcttctccaacgcccgatgcttgcgcacgtatgcacgaaccacctgccgtgccgcgatatacgtcacatcgtcaaccggatagtcgcgttcccgccattcatccatcacggaacgcaactccccgaacgcggatctgccgaatcccgcacggaaccgtctatgcgacaatcctttttcaatacgatgaatgtaatacaccatagtgccgcgcaattgctcggattgccccacattccattgccccgcgcagaatctcaggaaccgtttgcgctgccccgcatagtacgaagccaatgtcatgttcgctttgcatccttgcaatacgcgccagacgcgatgcggaacgatggttttgatttgctgcttcacgcccatgatctcacctttccttgttttctcgacgcaacgacggcaataccgcctgcaccttggccatgacttcccttgtaaaccagccttcacgcagcttctgccccaattgcgaagcccgtcgtaccattcgcgcatactcgctttgcgtcatgccgtattccacggccatggcctcttgcaacgattcgacggcaacgcccactccctgttcgactacgaatggtgcgagcgccgccttgttccatatgatcaccggcttgtcggctgcaagatacagcgacagcttatgcggattgttgacggtcagatatttgccgtaatagccgccgcaggtgtcgagactgtcgccgtcccagatcagaccgaatcgtccttccagtttgtctggcagttcatcgggtgcgacgattccgcggtaccacgccgttttgccgttccgccggtcatatttcggcccgtacagattgatgtcggctttggggaatcgctcggccagccgatacacgtattcggctttgccatggctgagatttcccgcgatatcgatgccgtgacgctgttccacgggcacaggattcgcttgcggcagcaggtaatcaaaaatgccgatctccacgatcggcgcggtcgcgccgtacttgcgcaacacttcgctcatgcgcggattgtggctgatgagcagatccgcttcagtcacccattgtttgtcgaaatcggtgtaggagtagccgcgtagcgtttccaaatcatgaatcagaaaaacaaacaacgctccgcgcgctttcatcctacgcacggaaggcaaggcgtacagcgacaccttgttgtacatgatgagcggaaattgcaccaacaccacatccccgcagcgaacggttcgttccagccgatgccaatcggcaagcgtacgtccaacgcacaccagcttgtcgaaataccctttgttctcgccgggacgcacttcgaacggctgccaggattggctttcgagcacctgccgaatgtcatcgcgcgctttggatccagcgtgcgcatgatgcagcgaacgttcgcagatcacgtagttcgtcattgccaacctccattgtttgcatatcgtccgtcactcgcattgcttgcgccatacgcgttattctcatcattcgttttccgtacatgcagtcggttgaataccggctgaagcatggccataacgaatcgttcgcggcacagcagcaacgcgatgccatatatcagcgcgaacaggaatccgccgaacatcagccacaggaaggcgttccatgtctcggcaccgcatatcgcgatcgcgccccgcgtaaggcagcctgccgcaatcgcactgagcagaatacgcatcggatcgatcgacgtgcgaatgccaaccaaaaacccgcggcacacatatgagcgcatcgccagcatcaacgcttcgcacaatgaaatgctgatggcggaaccgaccacgccgagctgtggaatcagcagcacgtttgcgagtacggccaaggcaagtccgatcgcgttcaccatggcccatgtacgttccattcctttggaaatcatgacattcgcaagcacgatattcatggccgaacacatcaccgcaataccgacgaatcgtagcggaaccgcggattccgcgaagtcagcgccaccgagcaatgccacgatcgggtcggcaagcaatatcagcagagcaatgatcgcggagccgaataccataacgaaattcatgtttttcgcgatcagttcgcctgcctgccgctctttgcgccgcgcctgataatacgaaaggcgtggcagcatcacgctgccgacggaattgacggcggtgacgagcacggatttgattttggataccagctggtacaggccgaccatatcggtggtgccaaggaagccgagcatcacaatgtctacttgaatatacatgccggatgaaatggatgcgatggtgaaccatagcatcggtttgaaatggcgggaaatattgagatgtccacaattacggaagtccacgaacctgcgtagccgcaggagattgagcacgttggatccatacccggccaccaccacgatcaggccgtatatcacgtagtcgccgcgctgccgtacaaaagcgaacatgagcaccaatgccagcagtttgaaacatacgctacgcacggtgatgtattcgtattgttccaacgcctggtagaaccattccacaccgaacgaggaaagccagatggccaggccgaaaagcgcgaacagcccgaattgcgcgttcattttcggtacggtgaacaggcacgccaagtagaccgcgaacaccatggtggtggagcatgccagaataaccagcaattccagcaccgtacgcgatagttccgcgcggtcgtcgcgtacgcgagcgcagacgcgcactccgtagtaggtaacgcccaggagggccaccagcgaaaagtatgaggccacggattgagcgaacgccacatgcccggtgccaccggtggaaagcacgcgcgacacgtatggcacggtgatgagcgggaagatcactgatgacgtggtgacgatcatgttcatcagcacgttgaatttcacggatcgaatgcgcacgtcggttggatgcttggccggcttgctggacggctgcccgaccggcttggtcggctgacgttcaggcataaagcaccacccgcttggcgaaggcgcgtttgcgtatgcgcacggagttcacgaagaatatcagcaccacccaaataatgatgtttctgagcatgatctggttgaacatggttgacatccaacggttggagaaaaagctgaacgcacagcaatagccgatggcaccgtacagcatcatcgatatgggaatgcccgccttgccgtattgcaatgcgaaaaccgcgctttcatagcaaagctgagaaagtgcggcgatcagcacgatggcaagcatcgcacccgcgatgccccagtcgaaaatgaatgcgtaatatgtggtgaatacgttgccaagactgcgctcgccataccgttggaagggttgccattgcatccagtcaagcacggttttgccgaatatctgggggaacgaggcccgggtggaagccaatgtcatgtctccccattgcgtggatttgaccgccaacgaaggcgacatggagttcgtgagatacgcgtctagattttttatcggcgctccaatgtagatggacaggtattcgtacatggtcgagtcgcccgccttgcgtcccatcagcgacagcagtggcttgaacgaagccaatcccacgagcgcgatggccacgaatttcaacacagtgcggaagccgagccgcatgcctttccaacggttgttctgcctgcggaacaacgcccagtatgtccatgcggcaacgccaagctgaatgaggctattgcgtccgccggaaatcaacgtcatcggaacggccgccaacacattgatgaccgcaagataatcgttgtgcaacgaacggaccaccacgctgcgcatggcgagaaacagccacgcataggccatggcgttggtcgccagatgcagtagcgagggaattccagagagggccacgcctttggtgctgaatttgttgagtttgtcatacaagccgatggctttgtccagagagccgtctcccccgtagggcagtgtcaatgagattatctgccgtgacacgatcagcaatgccaaaccggtgaacagcaggccgccaacgtacacccacatcggcagaacgatatcttgcggctcaccgtattcccgatgtgctgtccgatgtccgacgcagctgcggaaaaacaccttcacaccgtaagccgtcaatgcgaatgcgaacgtgccgaatccaaccacgaagcaggtttgcatcgacaggtcgaaatcccaggtccggtaattggtgagtccattgaataccgcgagcgtgaatccgaccacgaatagtatggatggttccgcgaaatccccgcgatatgccactatcagcagcaccagcaatgccagcaatgtcaagaacagtatggtcgaggtcatctcatcaccatgcctaatgtgatgcgatttccggatgccgtcgcttgtacagcgcgtacatcatgccgtacagcgtcggagaggtggccaggagtttccattgcagcagttgacttttcccaatgattcccttgcgttccaccattggcagcaattcgcgcaattccgtacgcgcataccgttcgaattgcgcccattgcttgcgttgatgcgcgagcatgatgcgattgcaggtaccgacaatggattcgagatgcccatatgcggcatatgcttcaacatgcggatatttggttcgcaccaagtcgagcatggctccggtggattgtgcgaatttgtcggtgatgccatgcgactggctgttttccgacattctgtaacggtacagcggcgtggaatcgtatacgatgcgatccgccttgtcgagcagctggtaggtgaccggcgaatcttccgcatagacggcgtcgagcgggtagcgcaggttatcgaagagttcttttttggcgagtttgtcccacgcggtcacataaaagtagccatgctgattcacataggcgaatgcttcctgcgaggtcatgacgattttcttgtcgggaaaagcgttgcagtaggtgctgccgtcagggttttcccgttcgtacgagatgatcgacaggtcggcgtcggattcctgcagattgtgcagcaacgtgccgaacatatcgggaagcacgtaatcgtcggaatccacgaatccgatgtattcgcctttggcaaggtcgagcccggtgttgcgggccgccgctaagccggcattgcattggcgcaccgcacgaatgcggttgtcacgattcgcccaagcattgcactgttcgccggaggaatcggtggatccgtcgtcgaccagtatgatttccaatcgttcgtaggtttgcccgataagactttccacgcattggtcgagataccgttccacgttgtagaccggcactatcacgctgatgaggggttgggtcgaaactgccataagacctgttttcagcagcttttcacgtactttttgcctacgaatttcgccataaggaaaccggacccctttttgatccagtccactggttcggggctgatgataggcatttcgacgtacgggtaatggttggtttccagccatacatcgaagaggatttcgctgatgcgtccgggaaatcgcatttcgaagacgctgtatgagcttgaatcgatatgcttggccagttctccgatgatgggaagcatccacgagcagtattcgttgatgaggtctttgcgcatcacgaacatgttgaacaggtgcgccgaggttttgttcatttgcgcgtcgaatgcgtcgaggtagtcggaattggtttgcgcgataatgcttcgtgtcgcatcgagctggccttcctgcatggtgtgctcgtaatgtgaatatacggtttcgatatagtagttgcgtcgttccggcacaatgatttcgcacgtatcgagcagacgcgcatagtcttgttttcctgcgatgcagctgaagcgttcgttttcgtctccgtggcgtttcgcactgtcatttttggcaaaatgacggcggtagtgcaccaatccctgatagtcggcatcgcagtttttccacatccaatacagtccggtcagttcggaatattgtgcgttcaactgcgaaatattatcgccggtgttgtcgcacgtcatacccaaatcgacgttcggatgcaacgccctaccgacctgcaacggcatatatacgccgtcgatcggcatacggtacgccttatgcgtggccacggccaccgtgatgtcggagtccgccatcactgtcatcccttctataccggacgcgcactactgccaaagcacgcccttatacttcaccctcccccttgtctggagggtacagcatacgttttcattttatctcaacagttcatctagatttcaccaaacgtcagacactcccgttttacaaaccccatttttcaagctttttcaagattattttacaaattatcatgttttgcaagagattgcagacgtttgcatacacgacgtgaaaacgaactgatttaaagctttaatcacaccccacacacaccatccaacacccccgatatggcaatttcgggatcgcctctttcataaatattgaaaatctcgtcacaactgtttcattactacttcggcgtttcgctgccatcatgttgggattacaagaaaaaacgtttgcagatcattgcaaacgattatgaaaaacagggcgcacgactccaatatcacatattgaaatcgcacgcccctgagatctaccggtcagaccggtggatgtatggctttatgaaatccgtttgattccttatttgacggtgatggtgatggttgcggtcttgcccgcggccttcacattcacctttgcggttcccgtctcgacgccgtacacgacaccggttccggaaaccgccactgccgcgccgtcgctccaccacatgtcgggatcacccgtggcgcccttcacggagaggtttgcgagctggcccttctggatggtgagcttgccgttcgagacgccgtcaccggtgattgcgaacgttaccggcacggtgccgtcctcgttcacggtgttcacatcccaggccacgccgacggtcttggccttgtcggcggtggtcttgcggtcggtggtcggatcccacgtggtcttgccgttcgcgtcgaccttgatcaggcggaaggtcatggacttgccggtcttcacgttcgcggtgccggagtagacgccgtcggctcccgtggcggccaggcggatgccggaggcgcgggtccaggtcttgccgtcctgaccccagtcgcctaccgcgtacaggctttcgccgctcttcaagtcggcggccgcgttgatggtcacgtccacgctttgcgaaacctggcgctcatcccacttgagggtgagggtcttggccttgtcggcggtggtcttgcggtcggtggacggatcccacgtggtcttgccgtcagcggaaaccttgatcaggcgcatggtcatggactggcccttggccacggtcgcggttccggtcagttcgccgcccacggtagtgagctcgacgccaccggcgcggttccaggtcttgcccttgccttggccccagtcaccgaccacgtaggccctctcgccggacttcaggtcaacgccggtcgccttgaacgtgatctgcacgttcttgtcgtcgtcaggaggcaccaccacggtgcaatccacggccttcaacgaagcagacgaaccatcccacgttacggtgccgccgttgtagtcgatgcccggctgccgggagcccggatactgctggctgccaccgtcgttgaaaatcaccttcgcgccggacgcgagcgaatcaggcacctcgtactggtaaccggtctggtcgcagttgtcggcagccaccatctcgacgcccggccaggccgcgttgttcttcgcggtcgctccgtcgccggtgtacacgtacgcgtacatcttgctccaaccggaaggcttggtcgcatagatggtgttcttcgccaccggcggtgtcggaagcgtgccggtcaccgtaacggtgatcgaatcgctctgggaaccggactttgcggtgatggtcgtggtaccggccttcttcggcgtgaccgtaccgttggcggaaaccgtggcgacggccgtgttggaggagctccagctcacggacgaaccagccggatcggtggtggcggtcagctttttcgcaacggcgccattggaaagatcagtggtgtagctgccaccgttgatcttcacgctggtcaccggagtcggatcttcatggccaccgatgttggccatggcaacggtgaacgtgtcttcgtcggacttctcgtaggagttgttgacctgagaggaggtgtccggcagatcggcattgtcgttcatcgccatgtcatacggcagcgaatccattgcggaaaggccgaaggtggctgccagttcaacgccgagaccgtacttttcgatatggtccgcggtggtgccgagttcgctcagcggaatggcgatctcgtagtgatcgtccatgcccgcggagttgtggcccagatcgttgaagttgacccactgtgcggagccttccttgtcggcgctcatgtcgccgaccactcgaccgttgctttcaccccagccgccgttgatgccgatcacctggctgctcaggatgccgttgccgtaaccgaacttgacgccggaagccttggtgttggtcttggcgttggctgccggaccatattcggcgttggaatcaagacctgtagcgtcgcccttgtagatccacggaccgttggaaccgttggtggaaatcgtcacgaccttgttgacgttctgctcaccgctccacttgatgccggaagcccacagggttccgccggtggaaagtccgccgtccttgcccactcgggtgctttcgtccttcgtgtcgatggcgatgtggaacggcagattctgcgtctgccacaggtggccttggctgagcggataatcgtcgccggtgtcgaccacgtcttgcacgttggtcatttcccacatgaggtacagattgtcgtcatcgtaggcaccatacagtgcatacagatcgatcggcacctcatacatggaattcggtcggtagacgcgcggatcgtcgttggctgcgccctgtgcgatcagcatggagctgtcccaatcggagatgctcgcgccttttccggcattgaagctgatggttttcttcacgccgaagccgactttgttcgtgccatatcgcgaggcgaggttctgtttggcgacttccgtcttggtcaccgtggtttttccggtgagtttggatccgtcttccgtgcttgtgccggtcacggtcacggttacggactcgcccacggagatggagctgcccacggtgatgacgtcaccgttcttgaaggtgccggacttgccttcggaggtcgtgtacttgaggttttcggccttgcttgcgcgcagggtcacgtcaacgccgcttccgctgaatgttgcggaagacggttccgcggaaacgtacggcttggcttcggccttcagatagtaggcgctgaccgcgttgcccttggcggtgccggaggtgatcttgccgccggaaacggtgatgcttccgccgttgacttcatccggatacacgccgtcgtcaaggttggtgctcatgccgacgaggctctggtcgccgcccatgttggcgattaccacgccatcgttggcggtgccgtccttggtgaagcgttcgatcatcaggcaggacttgttggcgttgttctgatcggagccgcagttctgcagatattcgctcttgccgtccatggcgttacggaagtggttgacggccacgaccgacttgttcttccacatgtcgtcgcccgcatcacccagctgggactgctcggcgaattgtgcattggttccgccagagccgaccggacggttgaagtacagcggtgcgccggccttgcgggagcccacgatcgcccagccgaatacgatctgatcattggtcagatacgtggattccttgtcgccattggcatagttgtcatgcgactccacccaagtgacgagctggtcttccttggcgccgccggtatcgatgttctgcaccatcttggtgctcagattgcctgagctgatggccgcgcgcacggacttgccatagttggatgcggtgttgccgccgccgtcggaggaattgttggcgaacaggtccgcataggccttgtagtcgaggccggaatcgccctgcagcacttcaccgtactggaactgcgaaccattgttcaaaatggtgttccaatagttggaggtcttgttgtcgaacacttcggtcggcagttcgacgtgcttggcggcatcgaagcggaagccgtcaacgccgtccgcgactgcggtcttcaggaagtcctgcatgcggtcggccacatactggttctgcgtgttcaggtcccacaggccaagcaggtggcactgggtcacatcgcggcggctggaatagttgatctggtcgccgtcgttaccgccgcagttggaacgggagtggaagtagtctttgttctgccaatcggagtcgatggcgctccagtcggaggtgaagtggttggctaccacgtctacgattacgcgcacgccgtacttgtgtgcagtggcggtcatttccttcagatcgtcttcgctgccgaccacgaagttgccgatggaggtgttcgccggctggtacacgtaataccagttttcggtgaacttcttgccgttggcggcgacttccttgattttgctcatcggctcggtttgcacggaggtgtagccggccgcggcgatttcaggcatatgttcggtgatggttttgaacgaccacatccacgcatgcaggatggcgccgttcttcatgctctcggtcaggccgtactgttcgcgggcctgctcgaacgtggcattgccgaccgtatcctggtagctgtcgcggtccgaggcgagtgcggtggaggccacgcccatgccgcccagcatggtggcgacggccgcgactccggcggcggctttcttccacgttttgatggtgcgggccttgcgggccgcctgcctgcgctcgacgcgggtcatcggttcggatggacccccgtcttgcgtgggctgttgcttagtgaatacgtacgcaatacctgcgaacgtacgcgaacttattcgcactttgacctcctgcttccttgcatctttcctttgaaaacgtttgctccttagcgaacgtaatctttaaaatatcacaaatttttggtgaaaaatgagtgatttttaatgaaatcgacgatgaaaaatgattggtttttctgcttttttacaaacgctttcagcaaggttgtcccccatccttcgacccccgatatacgacatgcctcgaaacagccacatgcaaacgtttctgaaaatcgtttcaccgcatgcacccgtcaacagcctctcccccgcttcttcacccctcttcagggcaacgggtacaatacgaaatcgtcggaaaacacgaagaaacacggtaggaaaggacagacccgtgaccttcaaccgctacatcctcttccgcatggtcgttgaatttgtgggagccatcgcctgcgccatccaaatgttccagcatcacacgtggccgggcatcatcaccatgggcgtgttcgcgctggtgtgggccataggcgagatctggctgagcacggtgtacaaccgcgcgcacccccgccgcgacgagctgtccgacgagcatcaggcgacggccatccgtttcacgttcttcgtgcttgtggtggcgctggtggtgttgggcttcgcgggcatgatcgtcacactgttcaggcatgcgccgttcaccgttcccgccatggcgttgccgacgttgggcatgctggcgctggccatcgccgacgcccgctacctgtggctcgagcatgagggcggagacaccgatgaagactagtttgaagttcaagcgtatggaacgcggcttgaaacaggccgatcttgccgaccttgtgaacgtgcgccgcgagacgatcgggcgcctcgaacaggggcagtattgcccgtcgctgcgccttgccatggaccttgcgaaagcgcttgataccacggtcgaagacctgttcagtttcgacgacgaagagtgacgcttcggcgtgttgcgtttgtaaattcttcccagaatggcgattttccaacgaaaatcgccatttttcatattcggtggcatgtgcgaacgtcgtcacatggtgtgacaacgccgtcacatatgtgcgattcacctcacatcccccgagagcgcggttctcaacgggggcgtatagtcagggtcgtagcgggaaaccactacggaaaaccgctgaaatgtacgttttatttagagaggaatcacgattatgaagaagaagatcgttgcaattctcgccaccatcgccgccgtgttcggctttggcttcgctgcaaacaccgctatggcttatggcgcgaccggcaccgtttccggcaacgtcgccaccttcacgtttacgggactgactccgggccagcgctacgtggtgtcctacgatgacaccaccgtcgagaacgtcaccctggctgccaccaagtactccaacgctgccccggcccatgaggatggcaccctgaccgccacctacaccttcaagtctggctttgctggcaccatcgcatcttccatctatgcagtcgatggggcagacaagccgaccggcgccgctctcgcttccgcctccgtgaccgtcgccgctaccggcgaaggcaccgccaagaagaacgagaccgcttccaccggtgctgctatcgctccgtacgttgtggccgtcgtgctgctggctgccgctggcatctccctggttgccgttcgcaagagctctgctcgctgaacaagaaccaagtagatacacaccatatctatgtttcatgaaggggcttgggttttcccaagtcccttcatttattcgaaaacaagcatcgtaaaaccgattgttttctttttccaggaagagatcatgaaagtcctgtttatctgcaccggtaatatctgccgctctcctatgggagaactgctcctcccccaattcatgcccgatcttgaatccgacagtgcgggcacacgcgggctcgtttcgcacgaaatcgcaccgaacagcaaaaggctgctcgaccagcatggcatcgattccagcagcttccgcgcgaaacgagtcaccccgcaaatcgcgcagggcagcgatctcatcctctgcttcgaacacgagcagcgcaaggaaatcgcggtgattgcaccaaccgcggcccgcaaaaccttcctcatcaacgatttcgccaacatgtgcgtctactgcaaggaacaggggtacatggggggtaatacccggcaggaaaaactcgaatcggtaatcgacaacgcaagcatgatccgaccgatgatccccgataccaacaatgtggaggatccgatcggcaaggacttcgccgtatatcaggcagcgtacaacgaaatctgcaaggctttgcagaccatagcaagcgccactgcctgaaaacgttgaaatatcaacgaaccaagctagaaagggtgcccacctccctccatgggggtgctctttgctagtatggaacctgatcaatatgatgtgacaaatgtcgaggggaaacatggctgcagcagaaagcaacgtgccagcaaccaatcaggtggtcgtcgaatccaatgatacggaagacgacggcatcaccttgatggatttgttccgtatagtccataagcatcttctggtgggcatcatcacgttcgtggtggttttcgcagcggtgtgcgcatacacattcctggcacccccgaagtattccgcgaccgcgcaggtgttcgccacctacagtgattcgtcggtgcaagacaacaatatttccaacatcaacagcgccagcacgtatatcaccaaccagattcagtcgtatccgacgctggccaccacggaatccgtgctgaagccggttatcgacgatcttggcctcgacaccaccgtcgcgaatctggccgggcagctgaccgtcacgaacccgacgaacaccgcgttcgtgaacatcaccgccgaaacgggagacgcgaagcaggcttccgacattgccaacagcgtggcggaatccctgagcaatgtggtggagaagtcgctgtatgcctccggcaaggagtcgccggtgaagctttccgtggtgcagcgcgctgcggagccgatctcccccagctccccgaaggtggcattgtacttggccgtcggcttggtggcaggcctgattctcggcgtgttcgctaccctgatccgcgatcttatggcaacccgcgtggaggaagccagcgatctgcaagacattatcaacgcgccgatcatgggtcgcatccccaccgacgaaagcctgcagagcaacaagccgatcatcgtgtcgaacccggccggccgtatcgctgaggaattccgccgtattcgcaccaacctttccttcacatcgaaggttgaaggcagcgatgcgcgcatgatcgtcatctcctccgtcggaccttccgaaggtaagaccactgtttccgtgaacgtggcggccgcccttgccgaaaacggcgccaaagtgctgctgatcgacgccgatttgcgtcacccgtccgtagccgaacgacttagcttggaaggcggcgccggcctaacgcacgtgctttccggccaggccaccgtgaaggatgtggtgcagcgctattggaagccgaacctgcatattctgccggctggtccgaagccgccgaacgcttccatgctgctgaactcgaagaccatgaccgaattgctcgacgcggctttgcagacttacgattacgtgatcatcgacacttccccgatggtggtggccaatgatgccactgtcttcggctcgaagagcgacggtatcgtgctcgtttccggtcgcgacgtgaccatgaagcgcgatctgaaagacatcgccgtgcagcttgacaacctcaatgtgccggtggtgggcttcgtattcaacctcgaaaaggaacgcaagtcttccacgaacggcaattactactattactactattacgacgaggatggcaagaagagcaagcacgctcataagaacagccgcaagaagtccaagcacaactaagctgctgggcttcagggtttccgccctctatcgcgagtcggagaccagtctaagtaaccgaaaaggggttgcagcaaatcgttaagattcgctgcaaccccttttccatgcccaaattttttgccttcagccggcttgcccgcaacttcgcatcagctgcggaggaggatttcctccagggcgccgatcaccgcatcgggcatgccggaggtgacaaacagctcgttgctgaaacggggcgcggtatcgaaggtgcgcagagccccgagcgcacgcactccttgctcacgaatcgcctgcatcgcatgctctttggaaatgtacggcatttgcgcatgcaagagcacgtcaagcacgtcctgttcgactgaattctcagcaatctgcagtccgtctgcaatcgtaacgttcaagcatgcagtagacggcacgtcgcgcacaacgaccgacagactcaacgtctgctgatcgtatgtaatttctgcagtattgcaagctttaccgccaatttcgatacgaacgttctgcgtgtctggctgtgcaactccacggaacacaatctcccagttacgctgtgccggaatggcttcagcacagccttccaccggactgatggtgaactgcgtggcattgtccgtattcttccagtcaaggctcatgcgcgtatcggcaacatgagtttggccatcgcaagactcggcagatgcagaaccggaagcagcagaggccacagaaccatcgtcttccttgagtgtgaacgaaccgttcgcaccggggaacaccagcacctgcagggactccggattgcccagatcattcaccttattgccctcgccaagctgctgcaacggcacgataccgccagccttggcaaacaccggcatacggtcgatcgcacgccacacttccaaacgacgcccggactctcctgccgaaacgtaacggcgaccatcgaagaagtcataccattcaccttgcggcagccatgcttccgtgctacccagctgcgcggaatcgtcattgtcagaaacaattggtgcaaccagcagctcagtgccgaaacggaattcatccggcacctcgtacgcctgcggattgttcggatccgcccaatacatcggctccaccaatggcatgccctcgaacgcggcgcgatagttcatggtgtacaggtacggcagcatcatatggcgcagtcgcagcgaacccaccatggaatcgcgcacttccgcggagaagttccacggctccttgcccatgaactgcgaattgctggaatgcaggcgattgatcgggctgaacgtgccaagctggtaccaacgggcttccaaatgctcgttacgatagccacacatatgaccgccaatatcgtgactccaccatccgtagccgatattcgacgcggtagcagtgaaatacggctggaactgcaaggattcccacgtaacaatggtgtctcccgagaagccgaccggatagcggtgcgaacccgggccagcataccgcgagaaggtgagcggccaacggttgttgcgttccgtgcaactcacgttgcgttcggattgctcgacatgcatttcatgctcatcgcgagcgcccggctcggcgcacttttcgcattcgcagttctcatttacattgcgttcggaagaagtctcgtagcgcccggaatccaggtagtgcaagtggttgagcacccacagcgggtcaagtccgggctggcgggtcacgccgccttgctgccagtcgagccaccagaagtcaacgccttcggcttccatacgatgatgcatgtcgaagtaggcgcttacgaaatccggattcgtgaggtcgaattccactgcctcttcggttgcgggatcgatgccgacgcgcttggccaccgcctcatagtcgtcttcgaacgcgcgcacgccgtctcgcggatgcacgttcaacgtggctttcaggccgcgctcgtgcaagtcgcgcaagaacgcctcatgatcgggaaacagctgcttatcccacgaatagccggtccaaccggaaccgtatttcggatcgacatcgtccacgcggtgccagtccatgtcgatcacggatgtggtgaatggaatgccttcgcgcttgaaccggtccatgagctgcaggtattcgtcttgcgtgtagcggtagtagcggctccaccagttgccgagtgcgaagcgcggcagcagaggcgttggtccggccagcttgtagaagtcttgcaccgcttcggtgtagcggcggccatagccgaagaagtagaagtcggtttccgcgtgatcgcgtggcataacccaagcccccagcggattcggtttgccgttcacttcgtatgcttccacgatcacgttcgcggcggaatcgtcgagtaccgcccatccgtctcgcgaaatcacaccatcgtccagaggaatttcgccgttcgcctcgtcgagcgtgcgcgcggtgcctttaagattatgcttcggctcgtcgccgtaatgccacgtattgaactgggtgtcggccacgcccttgacgactacgctcaagccttctttgctgaatggcttgccatcgtacgtcacatacagcgcgggggtgtcaacaatgagcagtccgtcgcgatgcgacaccgtgaactgcgtatcggcaccgaaatcgcggttgaccaccatctgcgtaagattgtcctcaaattcgccggaatcagaccattcgaaacggatcagcgattccgttagaatgccaatcctccaatgatccccttgtaaaaccgacgattctcgcattttcggacgtgccttgcgcacatagtcgacgaataccgtgccggttgcgttatctaatgcgttgtttgccatactactcctgccttacttgccactgcccgtcgcaatacctgcaatgaactgcttctggaaaatcatatacacaatgatcactggaacaattgccaacgaagtcgctgcgaacaatccgccgtaatcggtgccgtattgtccgttgaaggccttcagaccgacagcgagcagctgcttgttttcgtcggtaatcatcaagaatggccacaggtagtcttcccaattccacaggaaggtgaagatggcgagcgccgcgatggtgttatggctcattggcagaatgatgctatggaagattctggtttcggatgcgccatcgagtttcgccgcttcaatgagttcgtcagaaattcccgagatggattggcggaacaggaagataccgaatgcgctgatcatgccaggaagcacgagcgacgtgtaggtgtcttgcagaccccagttggtgaacatttcgtattgcggaatgatggttactgcccaaggaatcatcatggtgctcataacgatgccgaaaagcaggttgcgaccacggaatcgcattttagagaacacgtaaccaagcaccgcacttgtgtagattgcaataccggttttcagtactgctacgatcagcgagtttgcgaacaatcgcaagaaattgaacttttcttggatgctcacataattgtcaatcgtggatggcttagggaataatcctccggtcactttgacgatttcgctatttggcgcgaatgatgaaatgaacatccaaacaaatggaacaatggtgatgatggcggcgatgaagagcagaatcgtaagaatgatgccgccaattttacgtgatttcatgccagttcctccgaatctccagaaaccttgaacatgatgagggtgagcacaccagtgaacaggaagagcacaactgcctgagctgacgcgacgccgaagttgtatttctggaatgcctgatcaaagatgagatagctgatggtgtaggttgacgtgcccggaccgccttcggtcatgacgagaatctgcacgtatgcctgcaggtagctgatcagtgacgtgatgacaatgaacaaggtggttgatttaagcagcggcagggtgattttgaagaaaatctgcactgagttggcaccgtcgatggcggccgcctcgtacacgtctcgaggaagattcatgagaccggccaaatatagaacggtcgcgtagccgaaatccttccaaatggtcatgatgatgactgccggcatggcccatttggtgtcgtgcagccagttgatgtcgagtcctgtgattttgtttaccatgccgaactgcgggtcgaacatccacatccacacgaaagagactgccacgagcggagtgatggtcggcatgtagaacagacctcggagggtgtctttgcatttgacgagtttggcgctgagcagcagggccaagccgagaccaagcacaatgcggaagagtgtggaaacacctgcgaataccgccgtgttccccatggaagtccagaaaagtttgtctgtgaggatctgtttgaagttgtcgagtccgacccaatcataagtgccaatcagaggattccagttatgcagactgcccgcgaaggctttaaaaattgggtaggccaggaaaatggcgaaatagaccaccaagaagacaacagccatgttgcgtagggtgaaaattctcgataccagagattcaccatttttgtttttcattgaatctcgcctctctgtgagccgattcgaccgttttgttacgcaatacagagtgtcagatcgaatcgaataagaagattgaacgtatctcgtagataaaaggcagccgcggcgcggaagaagaatcgtaccgcgactgcccggattggaaaagggattggaaaggatatatcggtattacttatgttcgtcgaagtaagcgtacttgctttccattgacgtgaagtcagagctcttcatgtcggtatccatctgaccctgggcctccttgagagccttatcgatggacatgccgttctggaagacgttctggaaagcagtggtgccgctggattcaacggtggatggtgccggtcccggccagatcagtcggtctacgcgtggctggatggcggccatgaccggcttggagagaatgtccttgtcgttctgcagcgaggtcttggctgggaaggagttcagttcggataccgcttcacgaatgtaatcatcgttggcgagcaggtacttgatgaagtcctgggcaacggcctgctgttctttgctctggttcttgttgacgcccggagtggattcgccgttgtaacggtcgtatgcaaacggagtgtcgtcggagaaggttggggtggcgaacacgccgtagtcaatatctggatacttttctttcagcgtgccttccatgtggccccaagcgtagatcatcgcagactggccgttaccgaagctttgggtgtaatcgttgccgaagtcaacggatccgaccttgtacttgtcatacaaatccttgaggaactgcatgttttctttggtcacatcgttgttgtagttggctttcttgccatcttcgctgaagagcagttcacccttctgataattcagaccttgatagatggcgctgtaggcgtcgccgttgaagttgaagccggcctgcgtcatcttgctgccgtcggttttggtgagcttttgggcgacctggatgaattcgtcccatgtggtcggaatgtcggcgtcggtgaggcccgcttcgctccacaatgtcttgttgtagtagatgttgccggtgttgatcacggagtcgatgtacttgactttgccgttctcatcttcatgtacggatgcggtggagtagtcggattccaaagacttggtgtcgatatcgtaatccgctgcgtatggacgaatcaacgcatcgtaagagttgtggatgttgaaaacggccggaccgtttttgcctttcagagccaacggcagcttggtccaataatcatcccatgaaacattcaccgttttgatggtgacgttcggatacgtcttcgtgtaggactcaatcatcttgtagacaggatccgtgcccttgctgccccagctccagtactcgagctggattggcttgccgtcgttcacgagatgattggggtcgtaggtgatggtgttgccgataacgtcaagccctttgtcggctttcgtatcggttgtgccggacgcggcattgctgttcccgcacgcagccaagccgacgatgctcaaggccgccactgccactgcgatacctttgttgattttcatatctctccttacgtcctcgtaagccttcatccgccccttgcggacaagcaatagcatacgacaagggtttcatattggcaattcaaggttttttaaaatgtaaacggtttcatttgaaacccgtttcatctcaccgctgtgagcgtgcacacattgtttttcatacggcgtgtcgtatcgcaacccttttcattcatctttcaactttgtagccatgaggacggtaatgatggtaggctgaaacaaacagtgaaaaactttcggaggcaccatgaaagcgagcatcggcgatgtggcactgaaggcaggcgtatcgaacgctacagtctcacgcactttcgcacaccctgaacaggtgtcagaggcaacacggttgaaagtgcaggccgcagctgatgcgttgaatttcagcgtttccagatcggcaggaattcttaaatccggtagaacctatcgcatagcattattggtcggcagcggcgtcatcgaatggttcaccgccgaaatcattgccggacttaacgatgttttgcgtgacgccgggtacgatctggtcatctaccccatcgaggggtcggaggcgcgtgacgcattcttcgaggaacttcccgtacgcagcaacgccgatgccgtattcgtttcctcatttggcatcagccccgacgaggtcaaacgtctcggaaccgcaaaaattccgattatcggtatcaataccaccagcgaaggattcgatgcaactgtcggtatcaacgacaaagaaggcatcaaactcatcgttcgacatctcgccaagctgggacatcgtaacctgctgtatttatatgaaagcttttcctccacattgggattcagctcatttaaccgtatttccggattccaggaagcctgcgatgcagttgacggactgaccgcccgcacactggcagtgcaaaaaggcgacagcattctagatgcggcaatttccgagatcatggcgcaagacaacccacccaccgcattgtgttttcatcaggactcacaggcaattccattgttcttccgccttcaacgcagcggcctttccgtgcctggagatatttccgtaaccggatttgacgacagcaccttcgccaaagaag

SEQ ID NO: 840 - DNA, 52674 bp, Unknown
  gut microbiota DNA sequence
tgcgaagcggatcctaagcagatcagaagcctagcttctcgagctgtttaggatccgactgccatcccttggcaaccttgacatgcaaatcgagtttggctttctgtccaacaatacggttgaccggcgtacgcaacttcttcttgacacgcacaagatgttccgctcccttgccgatgatgatcggtttctgggaatcgcgttccacataaatcgacacaatcacgtgggctttgccatcgtaagcttcgccactatcgttgtcttccggatattcgatggaatccacgactacggccagtgaatgcggcaactcgtcatccaattcttccaggaaagcgccacggaccagttccgcaatggtttcttccggacgctcttcggtgatctgctcggccgggtacatttgcgggccttccggcatgttctcgataagcacgttcttgacttccgcaagattgtcatgcttcagcgcgctgactggcacaatatcggtgaagtcggcgaattcgttgatttcaatgagcttattgatcagcccgtcacggcttaattcgtcaatcttggtaacgatggcaaccagcggcaccttccatttgaatgtgccatcatctcgcttgactgcgaaatcagaacgcagacggctcaaaatgcgcttgtcgccgggaccaatctcctgattaccaggcagcaggaaagcaacggcgtccacgtcggcgagcgactcgtccacaacatcgttcagacgctgcccaagtagtgtgcgcggtcgatggatgccaggcgtatcaaccaaaacgatctgcgcattatccgtggttaaaatgccacgaatggctttacgagtggtttccgggcgagatgatgcgatggcgatctgcgtaccgatcaacgcgttgatcaacgtcgacttgcccacgttaggacgcccgaccacggcaacgaaaccggaccgatatggaacgggcgtggcggaatcggaatggtcggaagtcgtctcggttgttgctgcgtcagtcatgcttgtctttggaatccttatcgttgtcggatgccttttcggcatcatccgcatgttcttcgttacgtgtttcagtttcgtccacgccctcgacgtgggccggctccaccacaatggtcgacacttttttgcggcgtcctgcggagtcgaccgcggtcatgcgcaagcctcgagtgactgcggaggatccgacgatcggcacacgtcccaacagcttggtcagcaagccgtaaacggtgtcgacatcatcctcgtcaatgtcgatttcgaaaatctcttccaagtcggcgataggcgtgcgtgcgggcatgctccatttcttgtcaccgatccgttccggatcggcatgttgcgtgcgatcatgttcgtcttccagttcgcccacaatctgctcgatggcatcttcgatggtgaccatgcccgcgattccgccatattcatccaccacaatggcgacatgctggcgtgtgcgctgcatttggtggaaaagatcgtcgaccggcttggattccggcacgagcatggggtcacgaactatcgattcgacttcgcgtgtcatcgccgcatggttgaaggccgtcgcgcgcacggcatctttcaaataagccacgccgaccagatcgtccacatcgtcgccgatgaccggcacacgtgagaatccggaacgggagcaaagcttaagcatattctccaacgtttcgtctcgctcgatgcaaatcatgtcggtgcgcggcaccatgatctcacgagtcagcgtttcggaaagcgtgagcacattgcgcagcatttcggaaacttcaggatcgaaatcgttggcttcgaccagacggtcaatggttgcccgtccttgttcgatctggattttttcgagctcctcgtcgtcggaaagatcactgccgcgacgcttcgcgcctttttgccccccgatttttgcgaatggggttaatagaaccgcaatggaaacagcatccacatgctgcagcataatgtcgactggcttggatgccccggcactacgcggacgcaccaacagcgaaatcaccgcaatgacgatggcaaaaacaaatccggcaagcaattcggcccatagtggagcgtccaacatgcccgcaatcaccgtcacgagcacaccatcaaccacattgcagcagatgcggaagaacgcgcacgatccggcggtggcatagcgatcggccaccaaccgctgaaccttatgaatgcgcctgattttcttgtcgcgtatgaattgcgaaagctcggcatccgtttgaatttcgagaataaggttattcaggctcgccctggtcacacgtcccacagcgccttcagtcgcggccattgaaagcgacagccagaccaacagcagcgccaccacggcgagcaccacgatcatcgcaatcattgttgcctgcataattcagcccccatcatgccggacgatatgctaccggcaacgtcaatcattatttggcgatctgccgtcccgtgccatgctgcctatcccattcggcgagcgcgtccggcgtatccggcggaaggatggcctgcgtccccgctccctggcgaagcgcgaagaaggtgagtagcagctgtcgctgcagaccgaacatctgacgctcctgttctggggtggcatggtcgtatccgagtaggtggaggatgccatgaatcgtcagcagcatcatttcctccatggtgttatgtccggccgcgagcgcctgctgcgcagccacccacgggcaaatcacgatatctccaagcacgccttccatcacagttcggccgtctcctgggcgcagctcgtccatggggaagctcatcacgtcggtggggccttcaagattcatccaacgcatgtgcagttgggcgatgggatcggggtctacgaacatgatggtcaggtcggattgcgtgctgacccgcatttggtccatcacccatataccaagatcggagaacaccttgccgtcaatttgccagacggtttcgttggttacctcgacgctcattcagcgttcctttcgatttgctcgcttgtttgcctggatgtggttttgcccgtggcgtgtctgctgtggtcgccggcaatggccgcgtgtcggtcgtacgctgcgacgattttgccgacaagcgcgtgtcgcactacgtcttccggtttgaggtgggcgaatgcgatgtcgtcaatgccgtcaaggatgcgttcgatggtggcgagcccggatttcggtactgtcagatcgacctgcgtcacgtcgccggtgataatcattttcgtattgaagcctagtcgggtcaggaacatcttcatttgttgttcggtggtgttctgcgcttcatcgaggatcacgaatgcatcgttgagcgtgcgtccacgcatgtatgcgagcggtgcgacttcgatggtgccgtcgtccatgtagcgcttgagctggtccgccccgagcatgtcagaaagcgcatcatatagcggacgcagatatggatcgactttttcgttcaatgtgccgggaagaaaaccaaggctttctcccgcctcgacggctggtctggtcaggataatgcggcgcacctgcctatcttggaatgcgcgtaccgctttcgccactgcaaggtatgttttgccggtgcctgccggtccgatggcaaatgtgatggtatgtgattcgatggcattgacatatgtgatctgaccagccgttttggcacgcaccggcttgccgagcgcaaaggtgatcactccgggcacatgcggtttgcgtcggtccgcatgattctcgcgattggaggtatgctcctgttgccgatcggccagccgtagttcctccactacacgtccatggcccgggcgagtagcacgcacaggatttttcaacacgttttgatcgagcatgcgtcgcaccgtatcggcgtccatcggagccgtatatgcggcttggatgatgttttcgatcacatgctcggcctgtacggcttgggattcggatttgctggaacgtgacatgatcgcgatgcggttgcctctgacgataatggtcaagtcggggaacgcacgttccacttcccgaaggacctcgtcgaccggtccgagcacggtcaccgggtcaagctgctgcggaatcgcgatggtacgtgtagtagtggccacaaaacctcttctgacgtcgatatatggggaaagggaagattattcgtcaagcttttcgccggtcagcacgtgagcatgcacgtggaataccgtctggccagcatcaattccggtgttgaaaatcaggcggaaggcaccgtggaattcctggtcggcgatattttgcgcgacctgagccatgtgggcgagctgctggggatcggccgccgcaagctcggccacgttcgcataatgcttgcgaggcaccacgagcacatgtactttggctttcggattgatgtccttgaatgcgtaggtggtatcgtcctcatacactttttcgcttggaatttctcctgcgatgatcttgcagaacaggcaatccttgtcgctcataatgctccttaatgctggttgtccttcggtacccatgctattgcgcaaccgggataatccgccgcatttcgccggcgtgtggcgtcagatgaatcgtcccaacgcccgtgcgagcagcgataacgcgacgggaccagctgtcgacgctcgcagaatattgcttccaagcacgcatgcttcagctcccgcattggtgaaggattcgatttcagcatcgctgatgccgccttccgggccgaccaccacgtacacggtgcgctggcgcccgtcctgcaagcatttgtcggaaagcaccgcgatcgcttcctccagctggctccaagttttggtagcatcctggtgcagcacaatcaccatgtcgccgtgcacacaggcacgcttgcaaatggcaatcaactgcttgctggtcacgcactcccccaattccggcgtccaggagcgtcgggattgttcagtggcggcatcaagcacttgccgccacttcttatcggtgcgccccgccttccatttggcgatggaacgatcagcctgccatggaatcacctcatccacaccgatctgcgttgcggtgtcgatggcctgctcatcgtgtcctgttttcgccagcgcttggatcaaagcgagtttggtggtaggctgcggttctttgccgaagctcgacacttccgcgattccttgttgcgcatcgcgcaacaccgcgtggatacgtagccctttaccgtcggaaagctgcaattcgtcaccgtctttcagacgcatggcctgaatggcatgtcgacgcaccgactggggcaacgtcaatttccatccggcgttcaattcgtcactgttcaccggcacatcatcatgttccgtatcaagcaggaaaagggcatcagtcatagtttcagagcctaccagcacctcggataccaatggcgtaattccgcgcgacacgccgagacttgcatcacaccgagcatctgctatagttttcgtttgttgccgctgagcaacgcacctgtccgggtggcggaatggtagacgcgctagcttgaggtgctagtgcctatttatacaggcgtgcgggttcaagtcccgctccggacaccagcaaaccccttggaaacaaggggttttcttgtatctgaaagctattcggcgaaagatcgatcacatgcagttcatccatcttgattccattgacgacgagcgcgtgtcggcatacacgaatctcacggaaatccagcttcgcaacaagcttgaacccagcaagggcctgttcatcgcggaatcgccgaaagtcatcgatcgcgcgctgaccgccgaccgggaaccgatttccctgcttgtcgaagaaccgtggatcggaggcatgtcggaaaccttcgcacgcatcgaccaacgttggggcaccgacattcccgtgtacgtggcatcccctgaacagctcaagcagctgaccggctaccgcttgcatcgtggcgccctggccgcgatgaaacgctggccactgcccagcgtcgaggaggtgtgtcgcggcgcacgacgcatcgcggtcatggaaaacatcgttgaccacaccaatgtcggagccctcatgcgatcagccgccgcgttgaacgtcgatgcagtgttggtgacgccctcctgcggcgatccattgtatcggcgcgccgcccgcgtgtcgatgggcacggtgtttcagattccgtggactcgtatcggcggagatgataaacactactggccattcaccggcatgcaggaattgcgcgatcttgggttcaccaccgttgcgatggcccttgaagacgattccatttcgctggaggagcttgttcgtcgtttgaacaacgacaacggcgaaaaggaccatatcgacaaattggcgctgattttcggcaccgaaggcgacggtctgtcgcatcacaccatctcccgcgccgacctgacggtcaagattcccatgagccacggagtggacagtcttaacgtcgccgcatcgagcgccgtggccttctattcaacagctgttcactgaaacagtcagcaaattttcaagactcgcgatgcaaactccttgcatgttgcaaaaaatatgcaattattgagtgcgtaagtggtttgcgatgatgcagaccgaccaatgtgtgcggtgtcgtaacgacgctctaggagaggagttctcatggcaaagaatccgaaaattctttccatcgtgcttgcaggaggcgaaggcactcgtctgatgcctttgaccagagaccgggcaaagcccgccgtcccgttcggcggcgtgttccgtctgattgatttcccgctgagcaatttggtcaattcaggctatatgcagaccgtggtgctcacccagtacaagtcccattcgcttgaccgtcatatttccacggtgtggcgtttttcgccgttgctcggcaactacgtctcccctgttccggctcagcagcgacttggcaagcactggtatctcggctctgccgacgccatctaccagaccatcaacatcatcgaggacgtgcagccggatattgtggtgatcgtcggcgccgaccacgtctaccgcatggatttccagcagatggtgcagcagcatatcgaatccggcgcggagttcacggtggcgggtattcgccagccgatcagccagtccaaccagttcggcgtgatcgaggttgatccggagcacccgaatatgatcaagagcttccaggagaagccgcagaccacgaccggcctgccagatgatccgaactccattcttgcttccatgggcaactacgtggccaacaccgacgccctgttcgaagctttggcgcttgacgagaaggccgaagacaccaagcatgatatgggcggcgatatcgcaccgtacttcgcggcccgtaacgaggctggcgtgtacgacttcaactccaacgagattccgggagcgacgccgaccgatcatgcctactggcgcgacgtgggtactctgaagcagttctacgatgcgcatatggatctgatctcgtatgtgccggaattcaacctgtacaacaccgaatggccgatttacacgctatccggcaatctgccgccagcgaagttcgtccatgccggtcgcgaccgtctcggacacgccaccgactcgatcgtctcccctggcgtcatcgtatcgggcggtgaagtgcatcattccgtgctttcgccgaacgtgcgtatccactcgtggtcccaggtcgtcgattcgattctgttcgacggcgtgaccatcaatcgtcgagcacgcgtctacaaggcgatcctcgacaagaatgttgtgcttaccgagaattcgaccgtcggtatcgataccgaacatgatctggcccgtggcttcaccgtcacgccggaaggcatcaccgtggtgccgaagggtaccgtggtcgacgactgacgttctgccgcacacagaacaaaagcgtgcttcccggcgtcgggagcacgctttttctgtgccatttttcttgatgatgatatccaatcaaatatcatcaaaatctgttttacaaaaaaaattccgcaacgaacatgcagtttcgctgcggaatcaacatatcagcaatatcaggttgatatatcacagattttctgtcagtattttggcagattgtcgaaattgaagccgagcgcagccaactgctcgcgaccttccggcgtgatcttttccatgctccaacgcggttgccacgtccagtcgatgcggaattcctcgacgaggccggcaagcgtgctcgcgcactcgtcttcgatcagatcagtcaacgggcatgccggagtggtcaatgtcatcgtgataatggcacgaccaagctcatcgatctcaatgccatacaccaatcccaaatcaatcacatcaatgccaagttcaggatcaatgacctgatgcaacgcttccttcacgtcggccgcagtagctcgaccaatgtcgtcaatagccttcaacgcgatgccgtcatcctgttcttcggaacaaccgcatgctccagcctgattgccgcagccacaagcgtcctgcttggtgtcttcgtgttcgatttccactggtttgccgtccttgaatcctttggcgagatttgggttaagcatgacgcgacgcgccgcggcctcgtcattgcccaatgccttggccacggaatcgaaaatcgaggcttgcggttcaggtaccaaggtatcgctcattgtcgctccatatatgattcgaatatgttccgttgagtagcctatcgcgttggctggagtttgtctcacgtgtttcgcccgttgtagaacgcggcacacgaagcacaggagacatcctgctttccaccatagaacaatacttgtcaggctttcgcggccaatgccttggccacggagtccttcatgccttcccatccgagcagcgcgcacttgatacgcattggatacttggacactccttggaacacgatgccgtcttccaacgattcctcggcggattcatcgtccaagcctttgccgcgtgattccatgagcttatggaacgttccggccaattccatggcctcatccacggttttgccttccaccagatccaccatcaccgaaaggctggcctgtgaaatggagcagccgtgaccgtcccacaccagtcgttcgataacgtgcggctcctggtcggaaacctccacatgcacggtggcctcgtctccgcaggtcggattgaactggtgggactcgccgggagtgcaatactcgtgggttgcctgaaccgtggtctttcccgcctgggaggcgttttcggaagccagatccggagcgaaatgctccttgccatgcggattcttcgaggcttcgagaatgacctcttggtacatctgctcgagatcgtcgccagacattgcaaaatcactcatatgcgttactcaactccaaaaaacggacggaccttcttcaacgcctcaaccaatgcctgcgcgtcttcgacggaattgtagatgccactggatgcgcggttggatgcgtacacgccgaagtgacggtggaccggctgcgcgcaatgatgtccgacacgaatggcgatgccctgcgcatcgatgaactggccaacatcatgcggatgcacgccgtcgatttcaaaagccaccgtgccgatgcgctgctcgttggtctgcggtccgagaatgcgcacgccgtcgatctgccccatcttgaggagttcgcctgcgataacgcgctcgtgggcttcgagattctccatgccgatattcatcagccattcggcagcgacaccggccgcaacgacctgcgcgaccggctgcgtgcccgcctcgaaacgcgcaggaggagccatgtattgggcttcctgatccatccaggcaagttccaccatggatccaccgaaattcgccggtggcaacgcctccagcatgtcgcgcttgccgtagaggaagccgacaccggtcgggccgtacatcttatgcgcgctccatgccgcgaagtcaacgtccaaagcgtggaggtcgatcttcaggtgcggtacggactggcatgcgtcgagcacaaccaccgcgcctacctcgtgcgcacgtttcaccatcggcgcgatgtcggtgatggcaccggtggtgttgcccacatgggtgacggccacgatctttgtgcgttcggtgatcacctcgtccgcagtgttggaaaggatgcgaccttcactgtccagatcgaaccatttcaatgtcgctccggtacgcacggcaagctcctggaacggcaatagcacggagtggtgttcggccttggatacgacgatttcgtctcccggcttcacagcgaaacgtcgtgccgcttctcccccacgtcccagcgatgcgttgccgaatgcggtggctagcagattcagtcctgcggtggcgccggaggtgacaacgatctcctcttcgccttcagcggagttggcgccgacaagacgtgcgactttggcacgtgcctcttcgaacgccatggtgctgcgtgcggcaagctcatgcgctccacgatgcacgccggcgttgatggtgcggtaaaaatcgctttcggcgtcgatcacgcattgcggcttctgagaagtcgccgcggaatccaaatacacgagcggatggccgtggatctcctgatcaaggatcggaaattccttgcgaatcgctgcaaaatcggtcatgccagcgcgctttcggaatcggatccttccggcaggtatgcgtcatagccggattcctcgagctcatcggccagttcagggccgccggtcttgacgaagtgaccggctgcgaacacatgcacgatgtccggcttgatgtacttgaggattcgcgtgtagtgcgtgaccatgagaataccgaactggttggcttccttggcgcggttcacaccttcggagacaatgcgcaacgcgtcaacgtcaaggccggagtcggtttcgtcgaggatggcgaacttcggcttgagcagttcgagctgcagcacttcggcacgcttcttctcgccgccggagaaaccctcgttcacggaacgtgtggcgaacttcggatccatcttcaggcgcttcatcgcctcggacagttccttggtccacgtgcggatggccggagccttgccgtcgacttcggtttttgcggtgcgcaggaagttggtcatcgacacgcccggcacttcgaccggatactgcatggctaggaagatgcctgccttggctcgctcgtccggggtcatcttgaggatgtcttcgccgtcgagcagcacctgtccggaatcgaccacgtacttggggtggcccgccagcgtgtaggccagcgtggatttgccggatccgttcggccccatgatggcatgggtttcaccggagttgacggtcaggttcacgcctttgaggatcggcttgatgccgtccttggtttcgacgtgcgcgtacagatctttgatttcaagagttgacatggttttcgctcctacgttctacttctcttccaacacctgggcgatcgcgtcgttctcgccacgtgccaggcgcttgtcgataacgttcatgagatgttcgctgattgcgggaatgccgatttcctcgacgagttcgccaaaaaagcctcgcaccacaagtttgcgggcttcggtttccggaatgccgcgggactgcagatagaacagctcctcatcgtcaaagcgcccgacggaagaggcatgtccggctccgatgatgttgccgttttcgatttccagattcggttcggaatcggcgatcgcgcccggagtaagtaccaaattgcggttgagctcatacgagtcggtacccggcgcggtcggagcaatcagcgcgttgccgacccatgtggagtgcgcgcccttgccgtcaagagcgcctttatataccacacgactcttgcactcgggatggttgtgcacaatcatggtgcgatgttcgatatgctcgcccggatccacaaagtagatgccaagcatgttgagatcgccttgatcgccgccaaaatcctgatccatacgaatccgaacgacatcgccgccaagcgtgaccacggaatggcgcagggacgcaccctcccccaagtggatacgctggttgcccacatgcttggagcccttgttccactcttgaatgaatgtggtggacacatgggagtccctacctgtgagaatctccacaccttcggcgatacgtgcatcgccgtcatgctctaccacaacgtcagcgtgggcgcgatcggcggcaatgatcaccaggtggaatgcgtccagatccgttccggcaccatgaatcttaacgagtatcggctggctgatttcaccgtcgatacgcagaattccggcacgggaggcggagttccattccactgcggacacacgatcgcagggcttggaaacgatgcccgtatcggcgtctcccggcttgccctcgctataggtcacgccttcagtaagagccgtgccgtcgatcatagtgacggcaatctgggtttcgttcgacggcgtgaacgcgttgaagaactcttcgacacgttccacaggggtataacgccaatcatcctgcttgcggtcgggcacttcaaatgcgtccacatcaaatgaccgcggcgagcgatccgccgaagagggcatggctgccggattcgcatacggatcgttcggatccgcaacgggaatattgatttcctgagtttgtgccatggtaatcagcccaccgatccttccatctgcaattccaccagtcggttcagttcaagcgcatattccatcggcagctcacggctgataggctccacgaagcctcgcacgatcatgcccatggcctcctcttcggaaagaccgcggctcatcaggtagaacagctggtcttcggaaaccttggaaaccgtagcctcatgtgccatggaaacgtcatcttcgcgcacgtccacatgcgggtaggtgtcggagcggctgaactcatctacaagcagtgcatcgcataccgtcgagttggacgatccttcggcacccttgacgattttgacgagaccacggtatgcggaacgtccaccgccgcgggaaatcgacttcgccacaatggtggagctggtatgcggggcaagatggatcatcttcgcaccggtatcctgatactggcccttgcctgcgaagccgagcgacatggtgctggccttcgcatacggctcggcgagaatgcaggccggatacttcatggttgccttggaaccaatgttgccatcgacccattccatggtgccgccttcacgcacgtaggcacgctgcgtcaccagattgtaaacgttgttcgaccagttctgtacggtggtgtagcgcacgcgggcatgcggctcgacgaaaatctccaccacgccggaatgcaacgaatcggtcgagtagatcggtgcggtgcagccttccacataatgcacgtacgatccctcgtcggcaatgatcaacgtgcgctcgaactgacccatattcggcgtattgatacggaagtatgcctgcaacggaatatcgacatgcacacccttcggcacgtagacgaacgatccgcccgaccatgcggcggtgttcaatgccgagaatttgttgtcgttgctcggaatgcacttgccgaaatacttcttgacgatttccggatacttctgcaccgcggtgtcggtgtcgacgaaaatcacgccttggtcttcaagatccttctggattgagttgtagatgacctcggattcgtactgtgccgcgatgccggagacaagacggcttttttccgcttcgggaataccgagcttgtcatacgtcgcacggatctcgtcaggcaattcctcccaagtcgtggcctgcttgtcgatcggcttgacgtaatacttgaaatcgtcggcgtcgaaatccttcagatcgacaccccattgaggcatcggacggttgatgaaatcgcgatagccttccaatcgcttttccagcatccattccggctcgttcttatctgcggaaatagcgcgcacgacattctcgtcaatgcctttttttgccgcttctccggcgaaatccgtgtcatgccatccgtacgtatagtcgccgaactgctggatgatctcgtcatcctgcttgatcttgtcttcattcactcgcgtgcgatcagccacatactggctcatctccacgtcagccgcggcgttgggcgcttggttctctgccaccgtacgctgcctccaatcactcgtttgtacctatgacaacctaacagaacgtggggctaaacactagcgcccctttcgctattcggcaatgatttgtcgtgatttatcttacatagcgtaaaggcggaaaccgaacattcagtcttccgcctttgcgtctttctgccgttagcccgcatatcaggcctgaacgtgaaccgtcgttcccatcaggcaccaattgtagaaccattcagcctgatcccagccgacgccgacgcaaccatgggacgtgttcttccccatagcctgaatactgctgtcgttaaacgcactttgagtggcgatgcgatgaatcgcgcaacctgttttcgagaaatagttgacgaatccaacatccttgacatcccacttctcggtgtttccatccgatagggtaagcgtgccactcatatcttgggactggtacttgagccacactttgaagtcaccgtcaggcgtgcagttgtcgtaggagttcggatcgcagtaggttggcgtgcacaagtcgccgctcggctggcactggcccgtctgataatcattgccctgaccggcagacatatgcatgacacggacggtctgcccattttcaatggctgtaacggtatgcgaagacaagctgaccaccacggtacgcgtggtttttttctcattctgtgggtcgcaagtgccttgaatacttactgaatcagaacctttggcaaacgcctcagcggcatcacggccaacattggtgtcgctaccatcagtaacggttataccatcatgcccagctacattggtttgcagcacatcaccgacactattaacgatgacatcaccgtcaactcgatcagcatggaagttcgatttgatggaatcgttatagtattgctgcaatttgtcaccatcgataatcaaagagccatttcgggtttgattatcgccgagcttctcactatccggtccaagcgtgatggccgatgcaatggactgcgcaccgaattccgccactttatggtcgccgatcttgatagccaccggcttcgctatccacgcgtcagcagaagccttggcctcgttggcttggtcatccgtgatggcgggatcagtaaccttatttttaagagtcaccatttgagcggtctgcttgccaaaggactcaagcacgttcttggcttctttgacgatatccgtcacatcgataccagtcccctgctgacctggcgtcacatcgaaagcggtaccatccgcgttgagctgtagcgacgggttggtggcggacacggactgcactcccaacatgtcacctaccgtctgggcgctgactcgagaatcatcgaaagactcgacgtcgacatcctcacgggtccagaatgcatacttctgaaagaaggaatcgtcacgtttcgcgttcatcacattttcggcgatggattccgcgtcaatggcgacgccaagatccttcaacgtgactttcttgctcgttccctcataggaaacgggaaccgttaatgattccgccgtatcggaaatctcttggatgatatgatctcgggattgtcctgtcatggacttgccccagagcgtgacacctggcaacgcatgtgactggaagaaccagtatccgccgccggccacggcaccgagaagaagcatcaccgcaagaacaatccacagccacaacaggtggcgcttcttgctggcattcacagtcaacgctgcaccatcatcaatggaatcggccgtttcggcaaacgaatccaagctcacctgcgagatgacttttggttcatcgcccatgttcgggaaggcgaacttaccgttgccgctttccggagaatccatatcgttcaagctcatgctccctcgtaaaggtttttcattacgaatacgtcttgttgataattcaaggccaagcccttattatgcaacatggccatgaactcctttggactcatgaccatgttgcatatcgggttatccgacgttaatcacaattcgtcgatttagcgctcctgctggtggtccagagcggccttgaccagacctgcgaacagcgggtgcggcttggtcgggcgggacttgaactcaggatgagcctgagtggacacatagaacgggtgcacctcgcgaggaagctcgacgaactcggtgagttcgccgtccggactctggccggaaatgcgcagacccgcttcacgcagacggtccttatatgccacgttcacttcgtaacggtgacgatgacgttcagtgacatgcgtggtgccgtacagttccgcgacgatggaaccttcttcaagctcagccggataggagccaagacgcatggtgtgtcccatgtcaccattgccggcgacgatgtctttctgctcctccatggttgcgatgactggggtcgcgcaatcgggctcgaactcggtggagttcgcgtcctccaagccgaggacgtggcgggcgtattcgatgaccatggactgcaggccgaggcacaggccgagggccggcagcttgttctcacgggcgaacttcagggcaccgatcttgccgtcgatgccacggatgccgaagcctccgggaacgacgatgccgtcgacctggtcgagcgcggcggccgcgccctcctcggtctcgcacttatcggcggcgacccacttgacgttcaccttggcatagttggcgaaaccaccggccttaatggcttcggtgacggacaggtaggcatccggcaaatcgatgtacttgccgacgatggcgatgttcacctcatgcttcgggtggtgcacacgctccagcaggtcctcccactcgtcccaatcgacatcgtggaacggcaggccgagctcgcgcacgacataggcgtcgaggccttcgtcgaacagggtcttcggcacgtcatagatgctcggggcgtccacacagttgaccacgccttcggaatccacgtcgcacatcagggagatcttgtccttgatggactggttcagcgggcggtcggaacgaagcaccagcgcgtccggggagatgcccagctgacgcagcatcatgacggagtgctgggtcggcttggtcttgagctcatgggcggcggcaatgtacggtaccaaggagacgtgcacgaacatgcagttctcggcgcccagatcgcggcggacctcacgcgcggcctccaggaacggctgggattcgatgtcgccgacggtgccaccgatttcggtgatgatcacgtcgacgtcatcggacgcctgcgcacgcatgcgggacttgatttcgttggtgatgtgcgggatgacctgcacgcattgtccaaggtattcgccggcgcgttccttgcgcagcacttcctggtagatctggccggtggtgacgtttgccttctggctcaggtacacgtcaaggaaacgctcatagtggccgatgtcgagatcggtttcggcaccgtcttcggtgacatagacttcaccatgctggaatggattcatcgtgcccggatccacgttgatatacggatcgagcttctgctgcaaaaccttgatgccgcggctacgaagcaggcggccgagggaggaggcggtcaggcctttgccgagagaggaaacgacgccaccggtgacgaaaatatgcttggtaacgtgctcttgagaattgccatgttgtcttctaaccatggaacttcagtctatcagcggcatgagacgcggcgtgtttccttcaatacaaaaaggcggggccatcattgccttgatggccccgcctagcaggaataggagatacattcagtcaatcattggcttatgagatcagtcctcctttctgcgggaggccgcgaacgcgaacacggatgcgatggcaagagccaccgcggccagtgcgaaaccggtgatggcggaaccagtattcgggctttgcacagcatcgctcttcttgtcggaagctggctggaccgcgggtttgcgcacggttaccgtgcgcgtgaaggtggcggtcttgcccctgctgttggtcaccgagtacacgagcgtgtattcgccttccttagaggtatcgaccgaaccttcgaccgtgatcttgtcggtcagatcgccgtcaacctcatcccatgcgctgacgccggacatcggatcgaactttgatcccagagtcacgctgtcggaagccaccagacccttgatgacaggcgcgctgtcggtatcgggcttggtgctgctgtcgagtttcagcacagtggcagacagtgcgcccgcttcgtacgaggccccttcggcgagatcgacattggcgatagcatcatcggagtagaccttgccgtcggctgcaagcacttggtaggagccgtttgccaagccttcgatcgcggtcttgtctgcgttggcgttgaagatcaccacgtaggtgccgtcggactgctcggcctggtaggccacgacgccgtcagcggacttgagcatcgtcacgttggcgttgatgtcgttgtagtcggtcagacgcagcgcgttgatctgcttgcgcagcttgatcaggcccttgacgtagtcgacggaatcggcgtactgggtggtgcggtcccaatcgatggcgttcaccgcgtcgcccgtgttgtagctgttgccgtctccgcccttggtgcgcaggaactcttggccgagctggatcgcggggatgccttccgacagatacacgacggagtcggcaagcttggcacgtgccacggtcgtggcgtcgtcatccgtcgggacggacttcctgagcttgtcgtacagggtcatgttgtcgtggatttcggcatagttgaccacctgtccggcatcggcgtagtgatcctgcgcgttgccgttccagcaggtcgtggtcgcgttctcgtcgtactggcagccgagcacgttgtgggcaatcaggctctcctggtcggccttgccggaaacgaaaccggtgtcggtgtcggagaacacggatcccttcaagccgtcacgcacggaatcgttgaagaacgcgatgccattgttcgtgccgtcggacgcgacttggtacgcgttcggctggatggtcatctcgccctcgtccatggtggtgttcatatcccagccttcgccgaggatgatgatggacgggtcgatctcgtcgagcgctgcacgcacttccttcatcgtttcggtgtcgatcagacccatgagatcgaatcggaagccgtcgacgttgtagttcttcgcccaatacgtcaccgaatcgacgatgtacttgcgcatcatcttgcgctcggaggccgtatcgttgccgcagccggagttgttgaccagggaaccgttgtcatcataacggaagtagtagccgggaacggtcttgttgaacgagtggttggcggcatcgtagacgtggttgtacaccacatccatgatcacgcgaatgtcgttcccgtgcagtcccttgaccatctgcttcatttcggtaacgcgagaggcggggtcggatggatcggaggaatacgagccttccggcacgttgtagttctccggatcgtagccccagttctgcgcaccttgcgcgttgtagctcagatcgccggtctcatcaacggaaccgtagtcgtacatcggcatgatctgcacgtggctgacgcccaactgcttgagatagtcaagaccggaggtggcgccgttcgccgtcttcgttccggattccacaacacccagatacttgccccgcttgtcggcggagattccggaattcgggttgatggagaagtcgcggatgttcatttcggcgatggtggcgtcagtggtcttgccgaattccggcatgcggtcgcctgcggagcccatgtcttcgctggagagcaccacggaacgttcgccgttggcgaccgcagcggtcgcgtacgggtcggcggagacgttcaccgtgccgtccgcgaaggtgagcttgtaggagtaggccgtgccgctagcaaggttcttcaccagggcgctccacacacccttgtcttcagaggccatgtcgatggtcttgtcgacttcggcattcacatcgtcggactggtaggtgacaagctcaaccttggtggcggttggagcccacaccttgaatccggtcttcgcgctcgtgtaagtggcgcccagatcgtcgccgtcataggcgtacttcttgtcgaaggcatccgtacgcaccaccgagcccgcaatggcgtcctgcgaaccgaagcccttgacttcgacggtgtacttgcctcgcacgtcaagatccttggccgtggtgatgatcaccttggtgccgtcggtcttgatgttcttgacatctacagccttgccgtcggcgtcagtgacggagaccttgccttcaagctcatccgcagtgacctttttggacagtcttgcggtcagcttgttgacgtcggagatttcaacggacttcatggacgctcccaacgatggacgtgaggaatacacggtggcgtcgccgcccatcagccacacttcggccgatgcggtgccgtccgattcgttgaacaccaaggcgtttgacgggatcttgtaatcggcgtcatccggatccttggccttccacgcatcctttccgtaacggcgcagcatgccgatgtcggaggttccgtcgacgttgtagtaggtgtagttggtgaaggagtattccgcgacctcgccccagtcatcgtgggtggtgaaggtggcggctccgccgttccaattggaagcccaggtccagatgtcccactggggaacggtgaccgaggcgtcttcggcgttgtagtacaggccgtcatcacggttgtagtggaccttcacggtaacggtgttggccttgcattcgtagtcgctcggagcggagtcgagggtttcgacggtggtcgattcgccttgatcctcatatttggtgccgtcgatccacacttcggctgtgccgtcggcgttcaccgtggcgctacggtcgccaccgtacttgttccagtctgcggtggtgacgatgaagccgaacttgtcgaacttgccgccgaaggtcagcgtagccaccttgccccagcagtcagctccggtgaagggatggttgactgccgagaggctcgagccgccagcgtctgtaccccacacgtacacgccgcgattatcggaatcgctggctggcttgtagtgcacgacgagtcgggtctggccgttgacggattccggattacccacggtcgcggcctgatcggccacacccacgtgcgtgatgcccgcgttggcgtggtagtttccgccgcccttcgggttctcccactggtcggtgccggtatcgtgaaacacgaagtcgatcttcttgcccctggtgtcgatggtggcgcgatagtacccctgctcgtcgagggtcatgtcggcttccggctggttccagtcatcgccaagaccgtagtggaccttcgggctcttccagctggaatcggcgggcttgtagtagatggtgacgcttctgtcgtcgggcagggtctcgtccccttcctggttcacgtcaggatcggacgggtcgttggccacgctggatgccgggtggctgtccttggtggcgcctgcatacagtgcgatggcggaatgcgccggtaccgtggtctcgaccttgccgttcttgacgcttacagtctgggagcagtccatggtggcgtacacgttgcagtattcgccgtcggcgagcgatgtcgtgtaggaggcgtccttgtcggtcttgccgttgttgatggcgatgaagcccttatccccgcgggagaaggcgatgttgtcgccgccgtcatcctgccagtcggcgaccttggtgccgttgacgtagttgcggaaggcgatcatgcctcgggtggaggtccagcgctgctcgcagttccagtcggagctgttggtggaacagacctcgtccatgttcacgtccggaacggatgtggcggtggctcccggtgcgccgttgtcgttctcatcccacttgtagtcggaaagcagacgcggcgtgccgtagtcgtaggcaagcatgaatgcgttggccagctgatacttggcaccgtccttgtaggtcagggcgccctcgttgcgcgcggtgtcccagttggtgacgaacacgttggcgtcttcggaggcgagatccttgctcaaccgctcattaagtcccttgaggtttgcgatcttgtctttgaaggtctggttcatttcggacttgaagccgaattcggtcaccgtgccgttttgcacgtagttgctcggctggatgcccgcggcttcggaggagttcccgatgacctcctggatccagtagatgctgtcggcgttcacgccgatcttctttgcgaacttctccttgatggccttcatgctgtccgtgtggatgtgcttgacggcatccatacggaagccgcgaacaccagcattccacagggcggcaagatagtcagattgaatatcctggaccttttcgctctcggagtcgaagtcccacatggagctcaggcggcattcctggacttcctgctggttggcgtagttggagatgttcttggagcagctgtggaagtcggaggccgtgatgccttccggatactgttcggtggcaaatcccgggtagtcgccggtcgaaccgttgtattcggttcctgcgacgccggtctgcttgccgtcggccacgtcggcaccggtggtctggttcagcacaacgtcggcgatgatgtcaacgccgacggcattgcactgcttgatcatgtttttgaattcggcttccgtgccgagcttggaatcgagcttgtagcttaccggctggtaggacgtccaccattgcgtgccttggatggattcctgcggcggcgacacctcgacgtatgccacgtcttccggaccgtatgtgctcgtgcattccttggcgaccgtgttccatgtctgctggaaggcgatgacctgcacgtctttcttcgcattcgtttgcgcctcgggctgagcctgagccatatgcggtaccgccaccaaggtggcgcacgccatggcggcggcgacgcctatggccaccgcacggctagccggccgattcattcgctgaacgaccattgttctccgttctcatcgttgagatcgaattccggcccccatggcaggttccgcccttcgacaacgtatgcgccatggtcatccgcgttacctgcggatcatctaagacacactctgcgatgaatgtgcatacgtttgcaccctagatcggggttcatcgtacagtagatgctgcgcatcgcaatgaaacagcgtgaccgattgcaatatacggaaaagaaggacaagcgaaagaaaatgctttcagcaacaattcattgtgttgcgcaaaacggcaatcatatttgcgattgttgcagctttttctgcaaacgaatgcaatgctatgtgaaaaccggatgcccatcaagagcatccggcattcatagttcctccgagactatctcaaggggaaatcggaaaatcatcacttcgattccaacagatgcgccaccgcatccaacgccagcttgtagccatagaaccccataccggtgatagtgcccgtcgctactggcgagatcacggaacgcttgcgaaattcgtcgcgtgcggacggattggagatgtgaacctccatcagcggcaatccctcatcgatcaccatatgcgcggcatcggccagaccgtaggagtaatgggtgaaagccgccggattcatcacgaccggggtcttctcgtcggcggcctggtgcatccagccgatcatctcggcttcgtcatcgctttgacgcacttccacgtcaagaccaagctcgctgccccactgcgcgcacagggtacgcagggtttcaagatcctgcttgccatacacgtcaggctgacgcacgccaagacggccaagattcggcccattgacgaccactactttagtcatattccacttccctaccttgtttactgctgaatacgacggaacgcctcttcaacggcgtccgcaggcggatcctcaagatgaatcggatggccgacgccctcaagcaccacgaaacgaagcttattgccgcgagccttcttatcccggtgcatcaatgcgagcacatcatcccatgtgccattgttccaggacgtaggcagccccagagatcccaacaacgaacgatgatagtccacgagatcctgatcgatgtaccccagaagatgcgacagttcggccgcatacacgcaaccgaccgccaccgcattaccatgacgccagcggaaatgctcaagcttctcgatggcatgaccgagcgtatgcccatagttgaggaattcgcgcaatcccgcctctttaaggtcggcggacacatggtaggccttcacgctcacggtatgttcgatcagctccgcgaccacatccttcaggccggaatccaagaacgtcgacccgtcgaaggcacgcaattcaccggcatggtcctcgaggatctgcagaatctccgggtccatgatgaaaccggacttggcgacctcgcccaatccttcgatgaagatgtcgttcggcagtgacgcaagcgatttcagatcggcaagcactccggcaggcgtatagaaagagccgaccaggttcttcccctgagaggtattgatgccggttttaccgccggtcgaagcgtcaaccatggccagcaacgacgtcgggcagttcacgtagcgaatgccacgcatccatgtggcagccacaaaccccgccaaatcggttgccgcgccaccaccaaggccgacgatcgcgtcagaacgagtgaaaccctcatcccccaaacgctgccagataccattggccacttcaatggtcttgccggcctccgcgtcgggaatcacaatatcgtacgcatcatagcccgcctgacgcaacaaagtacgcgcacggtccgaatgacgctgcaccggctgggtgtggataagcgccactttggcaggcttgcttcccaacacctgcgcaagctggcccatcacaccctctccgatacgaacatcgtatggttcgatggtggaaccggtgacatggactatacgttgatcaatcatttccatcagctttctcgccgcggcttggggagactggccacgcgtgcccacatgcacgttcgccacgctcctgaacaccgggtcacgttccttgtagagcttcttccaacgctcattggcatcgccattaagcatcggacggcctccaccgcgatttgcccgctccatggcttcctcaggatcggccataagatacacgaccttgccgccgtccgcgatatactgcgccaatccttcctgaatggaaggcgtcatcggcgctcccccgcccaaggaaaagataccgtcgaaatcctcgagcatatcaagcacgacgtcgctttccagcctccggaattccggttccccatacttttcgaagtactcgggaatccgcattccggcatcatgctcaatctcattgtccgcatcggcgaacggcagattcatcatctgcgccacttccttgccgacacgagtcttgcccgcccccatcatgccgatgatcacggcgacaggcctacgcataccactcatagacgaatcacctcatatgctcaggccatgaggcaacgtactgctcggcgttacgcttggtttcggcaacgcaatcgccgccaaacttctcaagcacatactgcgcgatggtcaaacgcaccatcgcctcggcaacaacagccgccgccggaaccgcagtattgtcggaacgctggttaatggcctgcgccggctcgcccgtggtcacatcgacggtacgcaacgccttcggaatggaaggaatcggcttcatcgccgcacgtacgacgatcggctgcccattcgacatgccaccctcgataccacccgcacggttgcttagacgcgcaatacggccgtcatcgcccaccaccatttcgtcatgagcctgagaacccggacgcatggcctcaaggaaaccatcaccgatctccacgcccttgatggcctgaatacccatcaccgcactggcaagagcagcatcaagacgacgatccgattcaacatacgtgcccacgcctgcgggaacgccgtacaccacaacctcgatcacaccgcccaacgtatcggcgttctccttcgcctcatcaatacgggcaatcatccgctcttccgcattcttgtcaagagtgcgcaccggagaagcgtccaacgcctcaagatcctccggcttgggaagcgtggcctgctgcggatcggtaatacctgcgccaccaatggaaagcacatgcgaaacggtacgaataccgaacgcctgctccaagaactgcttggcaacctcacccaacgccacacgcgaagccgtctcacgcgcggaagaacgctccaacaccggacgagcatcatcaaaaccatacttacgcatgccagtcaaatccgcatgccccggacgcgggcgagacaacggggcattgcggccctcacgagcaagctcatgatcaagcggatccgcactcatcacctcagtccacttcggccactcggtgttggcgatctcgatggccaccggagaaccaatcgtctcaccaaaacgcacaccagtcagcatacgaaccttgtcctgctcgaacttcatacgcgcgccacgaccatacccaagacgacgacgcgccaacgcgccaacaatatcctccgtggtgatatgaacgcccgcgggcaatccttcaatcatggcgacaagcgcctcaccatgcgactcgcctgctgtctgccaacgcaacatgccaactccttttctcacgaatgcaactagtggactatcttaacggtatgtggtatatgatttgcctgccaagtctgctttgtggactggccatcagcgttgaagacatccgttcacgccgcattccacgcgcctggatcgccaccggatgcacagcgcaaatcatcgtaaacctcatatacgcactttccatcaacactctgtacctggcattgcaggcaatactcttcgccgtactgtcggccgtactgcaatgcgcgctcgctttggtgaaacctggttcattgggttttggcgatgtcaccgccaccttgctgatgggattggcagtcggcatgttcggtctgttcgccgtggtgttttggtggcttgcgattggtgtggtcggcttgttatggctcgttttgtggacacgtttcgatccgcagaagcataccgcatatgccggtaaaacgccgttcgccccagcgcttgtggcagctggggcgataggcattgcgattggcgttttattctgagatcagttcgcgttctcgttgttgttcttgtactcgtcgcgaatctgccagaactcatcttcggtttccacgaatttcgtttcgccggtctgcaggtttgtggtgacaaagtacagccacttgccgtccggaggattgacggctgctgtgatcgcgccatctccagggttgctgattggcgtgggcggcagtcccttgtggattctggtgttgtacgcgttgctgtcatcgcccaactggtcatcggtcaactggcttgcggaaataccaagaccgtaggcgaccgtggtatccatgccgagagccatatcggcgtcaagacggttgagaatcactcttgccacctggccgtagtatttttcgctgccgacttccgcctccgcgatggatgcgatattcaggatgcgctcacgttcgctgcctgtaggtacgcccaaggaatcgagtttgctcactcgcgcgtcgaccatttccttgatgatgtcttccgctgacttgttttgcacattgtagctgcctggttcaagccatccctcgaatttgccgccggcctcgtcaggaaggattccagcaccgccaccgtccatcacggcttggaactgtgaaacatccaagccggacacactcgccgcattttcgatgacgtccgacacacgttcacccgcacgcacttcggcaaaaccgccggcctggctttggtcagaaagcaccttgaccacatcggacgccctcatatgcgtcctcaatgcgtatgatcccggatacaacgtggcgccagctccgcttactgcggaagtgaaagcggctgcggatttgacgattttagccttaacaaggttgtccgcgatttccgcggctccctgcccggattccacgacaaacgtcacgcctttatcgcctgggcccgtgtaatcctcgatttggctttgagaattcgcttcgttcacggccttccaatgtttcagcgcgcgcacgccgaagaatccgccgacaccgatcagcacgatcaccaccagagcggcgataatggtgatatagcggcgacgacgcttctgctcacggtgacgacgcatgtccttacgtgatttcggtggttgcggaggcattgccgaaacgaaggatgcatcatccgacgaattcacccattgcgcgttatcggagaaaaaatcgtcgagattatcagtcacaggcctctctcctctggtctctctcttcggtcgatggccgtctgcaatatcaccactgcagactgctggtcgaccatcggacggtgctttcgtccaccgacctgcgcatcgaatagctgatgatgtgcagtcaccgtagttagacgctcatccaccaattcgatggacggcacttcctttagcgcatagttctcatcatctactgcgacacgcagtctcttctcaagattaacagtccatcgccgtgcttttttcgcgcttttgccttcttctccgcttagtagcaacggcaatccgactaccacatggtcgaccgattcgtcttcgatgacgtccacgacctcgtccaatgcacggaacgaatccccgtagacctgaatattgcctgcggggtgtgcaagagtgatgccaggatcagacagtgcgagtccaaccctggcatcacctaaatcaatgccaagccaaaccatgcttggtggttcagcccttcatggcctgattggccaaagcctcaagcgcctcattgatcttggtggcatccgcgccgccaccctgggcgaagtccggcttgccgccgccaccaccgccaaggatcttggaagcgccacgaaccaaatcgccggccttgataccctgcttgcgtgcagcctcgttagtggccacggcaaccataggcttgccttcctcgttcacaccggcgagagccaccacaaccgggaattcctcaccaagctgtccgcgcacatccagcacggtcttgcgcagcgcgtcgaaagagccgaagtgctcgacgttcttcgctgccaccttgaccggagcctgggatgccttggtttcggaaaccaaagcaggcacggaagccgcaagctgggattcgtacatggtcgcaagacgacggtcggattccttgagcctggcaagcagtgcgttcacacggtcggcaagctcgtccggacgggcattgaccatgtcggaaagctgtgagaccagcgcatgctcgcgggcgttgaactcataagcgctttcgcccacaaccgcatcgacacgacgcacgccggagccgatggaggcttcggacatgatgttgatggcaccgatcttgcccacatggtcgatatgggtaccaccacaaagctcacggctccatccatcttcgccgatggagaccacgcgcacgacgtcgccatacttctcgccgaacaggtgcatggcacccaaggcgatggcgtcgtcgaacttcatctcctgcgtggtgacggcaaggttttcgcgcagcttctcgttgacacgcgcctcgacggagttcatcgcatccttgctcggggcgctggaccactggaagtcgaaacgcaaacggttcggcgcgtcttcagagccgcgctgggtggcctgcgggccaagctcctcacgcagcgccttgtgcaccatgtgggtcgcggtatgcgcgcgggcgatggcaccgcgtcggtcaaggtcgatgttggcgttgacttcggcgccgacaaccaacgtgccttcggtcaggcggcactggtgcacgatgaggtccttgatcggcttctgcacatcgtcgacttcgagcacagcaccatcgtcggaaaggatctcgccctgatcggcgagctggccaccggcctgcgcatagaacggagtgcggtcgagaatgacttcgatggtggccggaccggtgactgcggggacggagcccttgccttcctgcatgatgcccagcaccttggcgcgggcggacatgtcggtgtaaccaaggaagtcgatgggctggaccagcgtcttcttgaaatcgtcatagaccgacagatccacattgtgacgcttcttcagggcatctgcacgggcacggctcttctgctcggccatgagctcgcggaacttcgcctcatcgaccttgacgccctgatcggcggccatttcgagggtgatctcaatcgggaagccgtaggtgtcgtgcagcttgaacgcatcttcgccggaaacggcgtcggatccggattccttggccttggccacagcgaggtcgaaaatctcggtgccggattccagcgtgcgacggaacgcgtcctcttcaccatatgcggcttcggacacatcgtggaaggtgtcgttgagttccggatagctcggctccatagctgccttggaggtcggcagcagggtcggcatgaccggatcggtcacgccgagctcgcgcatggccttgactgtgcggcgaagcagtcggcgcagcacgtagccgcgaccgttgttggacggacgtacgccatcggacatgatcatcaatgcggaacgcacatggtcagccacgatgcggaaacgcacatccatggcttcgtcatcgccatacgtgcggccggacagcttctgggcggcttcgatgaccgggaagacctcgtcggtctcatagatgttctgcttaccctgcatcagataggcaagacgctccaagccggcaccggtatcgatgttcttgttctcgagctcgccaacgatgtgcaggtcggtcttggacttgacgttgtcgacctcgtagttttcgaacacgagatcccagatttcgatgtaacggttctcatcggcgatcgggccgccttccacaccgtattcaggtccgcgatccacgtagatctcggagcacggaccgccagggccagggccgccggtggtccagaagttgtcctccatgcccatgatctggatgtgttcggggtcaacgccctcgttcttccacattgaacgggcttcctcgtcgtcggtgaaggtggtcatccacagcttctccggatcgaagccgtagccgcccttgtcttgcggggtggtcagcagctcatacgcatagtggatggcttcttccttgaagtaatcaccaaaggagaaattgcccagcatctggaagaacgtgccgtgacgggtggttttgccgacctcgtcgatatccaaggtacgcacgcacttctgattggatgccatgcggctcttcggcggagtctgctcgcccatgaggtacgggatgaacgggaccatgcctgcgatggtgaacagggtggtcgggtttggagagatcagcgatgccgaaggcacgataagatggccgtgcttttcgaaataatcaagatagcgcttcgcgatttcagaagtgcgcatatgagattaagctccttttttgctgaaaggcctggtgcctttcaaacgaattcgtgattgttgtccgaacgtacgttacgggaataagatcagctgatcttatccgcgtatttggtattaagttcagcctcgcgggctcgacgcgtttcgttgaactcattgaacaaaccttcaagggtgcgcacggcgacatgatcttgatccggcccgaacagaaattgtcgagccgcatcaggggtgttggccttgacgtacgcctgtgctttggtcactgccaccgcaccgatgcccacaccaatggagatccagaagagacgcttgaacatcactcccccttgttattgctgttgacgttcttcttgttcatgaaggactgcgcggtggttttcagggcatatgcagcggaagcaaccttgataaccggcttgcccaagaaggatccatacagatcggtcagggcgctgacattattggcggttgtggaagccgctgcggaaatcttgttgacgtcttccagcgacttgttgacctgctgcaccgtggtcacactctcatcaagcgcaggaatcgcatgatctcccgtttctttgactgtctcggcgagctggtcgaacagtttgccgagacgaatcaacgggtagatcatgaaaccggcaagaatcgcgaaagcgattgccgcaatcagaccggcgatttctccaacacccatcttgtacctcttttcagtcccacggttgcccgcgaacacaacacgcgcataacagtagtaaaaagcccagacctaaggcaagtttcgtccgccggtcactggttatacgatacgacggttaccgcttcagcgataggcttactggtgtcgaaatcgagcgtggtgaccgatccgttcgcagggcgttcgctgaggtcatagccttccggcgcgaaacggtgcataaggctcagcagcgtgttgccgtgggaaatctgcaacacgtcatcactgtccctcagcgcaggattcgaagcgatcagcgcgaatccctcctcgactctcgaccaatattccacgtcggactcggcatcgtggaatggatccgcttccttaaggaagtcgcgggtcgcaccaagaccgaactttgcgacgatgtcgttgtagttcttcgcaccgtgcggccctcccgcggcggtccacgccacgcccatatcctgtccttcgaaatagccgtagaactgttcgcggaaatgcatgtcactgaccagttgggggcgggtgtgtcctgcggcctcattcacgtcgaggatgcgctgggctgtcatttgcgcacgcgtggtgtcggagcaatatgccgcggcgaaatcaaactccttcagtttgtttgcggctttgtctgcgtcggcgatgccggattccgtcaatggagaattagaccagccctgcaacctgttatatcggttgaaaaacgtctgcccgtgtcggacaagatgaagatgaagcaacatgggttccatgctaccctcacggtttgagcaaatccgtgctatacgatgttgttatgggacattttatttcacgttggctaattcttaccgtcgcggcgggcgttatggttgcggttctgcccggcatgcacgccattggcgagccccctgtgcttggcatcgcggcgttcgccttgttcatggcgcttatcaacgcttccatcaagccgattatccatgtcatagcgttgccgttctcgattgtttcgttcggactggtcgcactggtgatcaattggctgttcatgcagcttgcgtcatggttggcgctgtcgtttttctctgtgggcgtcactattgacggattcgcatggtctgtgcttggctcacttgttatgacgattgtgagcggcatagtaggcggcatcatcggcgactgaaggcttcccgttgcttaaaaaggccgcacatgcgcttgagatagcgaagagcctcgcaatcctgacgattgcgaggctcttgctgtatgtccttatactgtatgttcttatagtatgtaaatccagatcagcgggcgtagaattcgaccacgtactggatgttgacctgcaccgggatctcctcggcttcaggcttgcgagtcagggtggccttcaaagaaggcaggttgacatccaagtagcccgggaccgccggcagcacatcgcggtgcacgccttcggcagcggcctggaacggaaccatggtctggctcttagccttgacctgaatggtctggccaggcttgacacggtaagacgggcggtcgacgacgttgccgtcaacgaggatgtggcggtggaccacgaactgacgggcctgagcggtggtgcgggcgaagcctgcacgcagaaccagagcgtcaagacgggtctcaaggtcggtcagcatggcgttaccggtctggccggcggtgtgggtgcccttctcgtaagcggcgcgaagctgcttctcggagatgccatactgagcgcgaagacgctgcttttcgcgcagacgcactgcgtaatcggactcagtgcgacggcgggtgcggccgtgctcgcccggagcatacggacgcttttcgaaaatgcgctgagccttaggggtcagtgcgatgccgagggcgcgggaaagacgcacctggcggcgagaacgctgaacgttcgtcattggtttaatcctttgtttgttctgtcgttgtctgaacggaacgcaaaccggtttcccgatatgcgctgagccagcctctccagtgcttcttcgtgcagaacacgaacggcttgaacacgtgccgtagtacagctcgcatcggccgccgacccactgatgggctaagactccagacggtatgctcccttgcgggcgcacaccaatcgttaataatacacataagggcgggacgagctcgtcgtttcgccctcttcggcatgtcatgccatcatggcgccgctatgcttcagccagcactcccctgtccatgcgatagattcgatccacatacgtcaaggcatccggatcatgggtgaccatcaacactgcggtgccgtcgtgcgccacttcctgcagcagccgcatgacgatggcagtgctttcggcatccagatctccggtgggttcatccgctatcagaagtttcggaccattcatcagagctcgcgctatgctgacgcgtctcatttcgccgccggaaagctctttcgggtagcattccgccaaatcgtcgacctgcagtcggcgcagcaatgcgtgcgcacgttccacggcatggtcctgaacgggatcgttgtgtgttttcgataccggagccgccgcgatgacgtccggaagtccgtcgtcaaccgtctgttcggaagatgcgtcggatacggtttcttccactgatttcgcatcagacgaatccgcaggtatctcaacatcgcgctgcgccgttttgccgttgcacagcacggaaggaagaatcacattgtcgagtgccgtgagattcggcagcaatgtctggctttgcgtgacgaatccgatgatccgattgcgtacgactgacatttgtttgtcgttcaaccgcgtcacgtcattgccgtccaagtcgatagagcccgatgtgggtttcagcagtccggtgatgagattcaacaatgtgcttttgccattgcccgaacggccgacgatcgccacgaactcgccttggtccagcctgaaatccacatggtccacggctgcgaacggtttgccgcgacgggtgaactcgcgagtgagctcttgtacttcgagaaccgtgttttccgccatcattcaccttctctcaaagtcagataggtttcgggagcggaaagtttcaccgccgtcgccacggaggcgagcagtccggtaatcaccgcgaacacgaaactcactgcgatcaatgccaacacattccacatgttggtttgcagatacggcaactgcagctgccgtccgataagcgtgctgaacgggaaaatcgccagcgacgcgaccgcaatgcctatcacaccgcccaaagctccgatcatggccgattccttcacgatgatgccgaccaaagtggaacgattggcaccaagaatgcgatacgcggcgaattcacgtttgcgttcgttcatggcggacgagaacacagcaagcagcacgatcagccccatgacccagaacaccgcgacgaaaagggtcacgtagcgaatgatcacgttcagattggatttcgttgtggctgtgatgccccccggatacacgtatccgaggcttttgattcctgttgttttggtgatgttcgaagcgacctgctgggcggagtaaccgtccttgaccttgatgagcacggcggaaacggctttgtcggcatattcttccggaatggcggcatgccccaccttggcggaatatccgaccacgtcgggaacggtctgcatgttcacgaacacggaatcgtcgagcgacgtgccggtattggcgagttgcgccgccacggggaattcgtgcccatagagtttgaccgtgttgttgcccgacacgctgatgctggctcctgcaacgatctggccgcgctggagcgtgccgtcgaactgcgatgcgatccaaggggtgatcacgaagtcggtatcggggttgaatccgatgatctggactttctcgtcgcagcatgcggcggccaacgatgagatatatgtttgttccgtgatttcgtcgatgccgtcggcttttgccacttcgtcggtgatctcgttggtgaagtagaacgtgcttgccgatccgttggtcagcaacgcttcggcttcgtttttggtgttttgcggcgtgaccatgagatcggcgcccatacgttcctgcatgctgttcaagccggcttcaaggttcatggacagcagcgaaccaccatagaaggccacggtaagcatggcgacgacgatggtgagcgccgcggtacgaaacggtttgcgtttgagattgaccaggggcaacccgccaagggtgatgtgttgcgtcatattgggtcaggcgcgcttcgccggcttgagatcgagatatgctgcgattgccgcaagtacagccagcagcacgccgagcacgatcagcgtcggcaaggtgaccatatggcagcgcatcatggcacccttgcacacgccgatgagcacggtcggcacggcgatggtcagcacgccgagcaccgcattggcgaggtcaagaccggcgcgggtctgatcggatacgaacaggccgacaatgccaagcgccacgatcacgatgccgatgccgagcgcggcctgagccgtgtaatgacatgccatcggcgtttctttgaccgcgcatacgtgagcgaaggtctgcggcgcgatggcgatcaagatgccgagcacgatctgcgaaatgcctgcgtacagtttcttattcatagcttcctctcaaaaaagacaaacaccgccgattattgcagggtctttttgaaaaagaaagtcttgttttttcctccttttcgtgctacagaggagatttcatccgttcttcatctccgtcatagcatttcaatgggtgccatacgcaacagcagacgcttgacctcaccattgccaaaatcaacggtaatgaccgaattcatgcccttgtcctgcgtttcaatgaccgtacccaacccgaaatgatcatgcgtaagcttgtcgccgacatgcacgtctgcaatgttcagatcattatggctaccggccgggcctgcggatgaggatttggttaaatccacaggcttgtttttcggcttgacacgtcgcgtggtgaccttgcccgatttccctcctgacttgccggagccatacgaaccatacgagccatatgaggaaccggttcccgatcctccgcacgagcgccgggatgtggaaccatacgaggatgatgagccccgcgtagccgggccgccgtactgcgagcgccctgccccatatgaagacgatccgtatgaggaacgagaccaccgcgagccggaaccgtatgaggaaccataatccgactttccatacgaggaaccgccgaatgacatcgatccgaaatcgtcatcatcgtcccagccgccgaactcgtcgtcgtcatcctgccagctggcacgcatgcgttcgacgccggcttcgcgtcttttccaatcaatcagttcgtctggaatctcatcgaggaactgactgggcatcatgtcgctggcttgcccccattgcgcgcgtacggccgcgcgtgtcacatacaggcgtcgcttcgcgcgagtgatgcccacgtaggcgagacggcgctcctctgccagttcgctggtgtcttccatggcacgctggtgtgggaatgtgccttgctccatgccggtcaggaacacatacgggtattccagaccctttgcggtatgcagggtcatcatcgtcaccttgccggaatcttcgttctcccctggcaattggtcggaatcggccaccaacgcggtggtttccaaaaatcccgccaatgtggcgtctggcgtgttctgctcgaattccgccgccactgattgcagctgggaaagattatcgacgcgggaagcgtcctgcggatcctcggagcgctgcagctcttccaaaatcccactcttggcaagcacttcggcaaccacttcggatggcttcgtgtcatggtccttcgcaaaagccgcaagctcatgcatcatgtctcggaacgcactcaacggtttcgtcgtgcgtgtggacatgccttcgatctgttccatatgttcgatcgcttcgaaaaaagtggtgccatgggcatcagcatacgaggcaacgagtccttccgcgcgaacgcccagtccgcgcttcggcacattgaggatacgtcgaacgttcacattgtccgcaggattcacgatggcctgcaaatacgcgagcgcatccttgatttccctgcgttcgtagaatttggtgccgccgacgagctgatacggcaggttggcattgatcatggcctcttcgagcgagcgtgattgcgcgttggctcgatacatgatggcgatgtcgcgatacgccacgccttcctcgttgtggattcgtgcgatttcgttggcgatccatccggcttcctgttgcgcgttgtcggccgcgtatccgacgattttgtcgccttcgccaagtgccgtccacagttttttcggcttacgattttcatttcttgcgatcaccgcattggctgcgtcgagaatggtctgcgtcgaacgataattctgttcgagcatgatggttttcgcgttagggaaatcctgctcgaaatcctgaatattacgaatatccgcgcctcggaacgcataaatcgactggtcggaatcgcccaccaccgtaatccaagacggtccgacacggcctgcccctcgcatatgtggatcgggctgttctcccgaatcaatgccggaaagctcacgtacgagcacatattgcgcatggttggtgtcctgatactcgtccacgaaaatataacggaacttatgccggtaatattcgctcacctgtgggcaacgctggaacaattcgacggtgcgcatgatcagatcgtcaaaatccacggcattcgccatggccagacggtactggtactccgcatacatcacggcgaccagctcgtcgacgtcgccggccgaaacctgatatccgcgctggccgggcttgtagtcgcagttcacgcttttcagctggtcctgccatgaaatcaacgaattcttgcaatccgagatcttgcccaatagcatgcgcggcgtataccgcttcgtatcgatgttcaaatcgccgctgatgagcttgaccaaacgttcgcaatcagccgtgtcataaatggaaaatcctgaggtaagaccgatttccttgccgtcacgtcggaggatgcgcacgcacgcggaatggaaggtggagatccacatgtgttcggcttcaggccctacgagggccgcaaggcgttcgcgcatttcggccgcggccttgttcgtaaaggtgatggcgagaatgctgctcgcccaaaaaccgtgtgccagcagccatgcgatgcgtctggtgagcacgcgggtcttaccggatccggcaccagctccgatgagcagggcttgtccgtagtacttcaccgcttccatttgctgcggattgaggtccttgatcagactttgcggatcgcacaggactggtcccatattctgctccaccggttcctctttccatgaagattcgaagtcgattactgcgaaattcatgtctatcacacatgcaggtcagcgcaacactcgcatggtcaattgacgcgcgtatgctgaacgtttatatgcggttcaccgtatgtcaacatcaacgccgccttatgcggccaacaatctaaggggattcatgaaggagctcgaagagcgcattcgcctgcagggtaccgtcaagccaggtaatgtgctgaaagtggatgctttcctcaaccaccagtgcgatgtcgaattgttcgaccacatgggtgccgcttgggcggaacattttgccggtaaaaccatcaacaagatcctgaccattgaagcttccggcattggtatcgcctgtgttgccgcgcgtcatttcggcaatgcgcctgtggtgttcgccaagaaggcgcagtccatcaatctcgatggcgaccagtacaccaccaccgtctactccttcaccaagcagaaggaattccccgtcatcgtgtccaagaggtatctcaacgagggcgaccatgtgctgttgcttgatgacttcctggccaacggcaaggctctgaagggcctgatcaatctgtgccatgatgccggagcgacggtcgagggcatcggcatcgcggtggagaagggtttccaaggcggcggcgatgagctgcgcgcagcgggatacgacgttgattccctggcaatcgtggagtcgatggatccggaaaccggtaccatcgaattccgctcctgatcgtcgcatctcacgggcgcgcatcagaaaccattacaacctgttactcatcgcagcatgaataagagaggattcattgtgagagaagagaagaagaaagacaacacgaacgagaagaagggcgtttcctttgaagcgcttagcagcttggacgcgcccgtttcgttctggaagggcatcccgttcggcctgcagcatgtcatggcgatgttcgtggccaatctggctccgattttcttggtggcttccgccgccaacatgagtgccgagcagtctgccacgattattcaggccggtctgctggtggcaggtctgggcacctgccttcagctgtatggcgtgtggctgatcggctcccgcctgccgatggtcactggcatttccttcacctatgtagctgctgccatgtcgatcgcccagaaccaaggctacggcgcggtcgccggcgcggttgtgcttggtggcctgttggaggttgtgcttggtttgaccgccaagtattggcgtcgcttcgtaccgccgatcgtatccgcgattgtggttacgtcgattggtttctcactgctttccgttggtgccaccagtttcggcggcggttccggcgctgaggatttcggaagctggcagaatctcacgctcggtctgatttcgctggtcgcctgcttggcgttccagctgctgatgaagggtactgccaagcagctttccgtgctgttcggcttggttgtcggctatgttgtcgcgattttcatgggcaaggtcgatttctctggtttcgcgaatctgcaggttgtgtccgtgccgcatttcatgccgttccagcttgaattcgatccgggcgcgatcatctccttcgccctgctgtatgtcgtgtcttccgttgaggtgctgggtgataccgctgcgctcaccaaggttggtctcgaccgtcagcctaccgataaggagactgcgggcgccattgcaggcgacggtctcatctcctccgtctccggcctgttcggctgcttgccgttgacgtcgttcgcacagaatatcggcttggtcgccatgaccaaggtcgtcaaccgtaaggtgattctttccggtggtctgattctggtgatagccagcttcgtgcctgccgtggcggaagtgttcaattccctgccgcaggccgtgcttggtggctgcaccatcatgatgttcggtaacatcatcctgtctggcttccagatgatttccgaggccggctatacgcagcgcaacatcaccattgcggcgttgagtctcaccatcggtatcggtttcacgcaggtcggcgacattttcgtcaacttcccgccgctgttccagtccatcttcgcatccaattgcatcgccgtggcgttcgttgtggccgtgctgttgaatgctctgctgccgagtgaagagcattttctgtcggctccgcagcatcaggaagactgagtccgttcagatcctaaaaggttatgaggaatccccctgctcaaacgagtcagggggattcctcatattcatcgcaaaactgctttgccgcgattcgcaagaaggatgtttcagtgcccttgcttgatccagttcgcaatcgcatccttgacagcctgggcgtacagcgtattggacatgccagggtgaataccatctccggcaagctcatcaggatgcgccgaaatcgtagcgtcccagtcaacgagaacaacgttgtcggaatgggcggccgcgaagttgctcaacgcgtcgttcgttccggggacccaagacacgggggcatgcgcattaatcagcacaagcacatgatccggtccaatgtcgttcagtatgtcattgagttggccatcggtcaccgctgaattcgtagccaagccgaccagcacccattggcgcaatccttccggctggcttttggcttggtctataagtcccaatgccttggtcatcgaacgtgaggtttccgcatcaacagtgattccgggaaaaacggattgcaaacctttactggaggcaagcatcaccgagtcaccgaatgcgaccatctgctgcccgtcaggcatggtgtatgcgggtttcttgggcgctggcggatgcttcctatcgaagtcgaggtgcatgccctgctgctctttcagcattttcgcattctcttccaacgcgcgttccacactggtctgctttggtgcgttggctaccgcgtatccggacatcaagcatgtactcaataccacggcgatcgtaatccagcatctggttacatcccacattccgttttctggcagcgggcgaatcatggcgataaatccgccacgggcgacgggctgttctaccaacttccacgacatggcggtacaacatgcggtaagagcgagtgtgattagcagcatccatcccagatgccgagcaccccactgggggaacatcgccttggtgaacaaccataaaggccaatgccacaggtaaatgccgtatgaatatcggccggccacatcaaatggtttgaacaccagcagatcctgcatccaagatccgaaaggaatggaaccggcgaccagaaccactgaaagtagcgaagccgcgaaaatccctccatagaaggcagcaggaccctgctcaacgtgctgcatcatccataacagaatcagtaatgccacaaaagccgccgcagggccgatcttgctccagaccagacgagcgcgttccatgatcgccgtttcttccggacgaccgttgccacgccgtatgatcatcagcagccatgccagcatggcacctagccaaagtcccatggcatgtgtgtccgaaccgaaatacactctggttggatcggttcccgggtgatactgcaatcccatggaaagcgcactgcacacggcaagtccggcaagtaccgccaccggcacccaacgtaccagaatttttcgaagcaggtagatcagcaaaggagccaacagatagaactgcatcagcaccgacatgaaccacagatgacggaacatgtctggattcatctgcgagaaatagctggcgccactgccgatggcataccagttgtaacaacccagcatagccgtcactatctggttgttaatgtccaccaacatgtcttggttgatgaaccatgccaacgatacggtgacgggaatcatcagaatcagcgccgggtatattctgcgcagacgcttgaggtagtattccttgaaacctattcccttgccggaatcaatatgattcagcaacgacgagaaaatcagaaaacctgaaatggtgaagaatatgtcaacacctaggaatccgccccgcagagtgccctggtcgcagtgatacaacactatcgcgatcaaggcgatgcccttgaggccattcagaccgacaaaacgacgtcttaccacaacaatcaaccgcttctctcaacatgcgacgtatgcgcgttaggcacaacgtttcgtatcgtactaccagcccctcccccattatgcggaccatgaacagatatggaaagtcattgtctgggacgattggaaacgttcggtgaacgcaacctcggaagcggtggagacataacgattattcgaaaaaggaccgtacgttccattggcattggatttgatgccgatggaacgtatggtcctcttatacggtcccgtcaatcatttgactgcgggatctcctcgctcacttggagaagacgttgccgtaagtgtcttcgcctgcttctgcgattgccgcggacttgcgggcgattgccagctcctcgttggtcggaatgacgcagatggtgatcttggaatccggggtggagatgatgcgcggttccttggaacgggtggcgttcttctcttcgtccagcttgacgccgaacggggcgagcttgtcgcacaccatcttgcggaccacgtcatcgttctcgccgacgcctgcggtgaaggtgatcacgtctacgccgcccatctgagcggtgtagttgccgatgtagccgacgatgcggtgtacgtagacgtcgagagccagcttggcgtcctcgttgccttcggcgaccagacggtgaacctcacggaggtcgccgaagccggtcatgcccatcatgccggaacgcttgttgaacagagcgtcgagctcgtccacgttcatgtgggcgttgcggatcaggtggaagacgacggccggatcgatatcgccggtacggccacccatcatgaggccttcgagcggagtcaggcccatggaggtctcgaccggcttgccggaaacttcggcggaggcggaagcgccgttgccgatatgcagcacgatctgcttgaggccttcagccggcttaccgatgacgctcggcaccacggaggagatgaactcgtgggaggtgccgtgggcgccgtaacggcggatgtggtactggtcggcgatttccttgttcagcgcgtaggtgcttgcggccttcggcagctggaagaagaaggaggaatcgaacacgaagatctgcgggacgtccggcaggagcgcgcgcatgacttcagcacccttggcttccggaccgttgtgcagcggcgcgagcacggcgaggtccttgacctggttgatggtcttgtcggtgaccagagccgggttcgggaagatggaaccaccctgcaccacgcggtgaccaacagccacgatgccggcctcgtccagcttcggaccgaactcgttgaagaagccgagcacgcgcttcagaccctgctcgtggtcgtggatcggctcttccagctcatgcttctcgccgttgaactcgtgcttgtagtggccgtcaaccggctcgccgatcttctcgaccaggccggaagcaataccttcaccggtttcaagatcaaccagctgatacttgatagagctggaaccggaattgatgacaaggacggttttcgccattgtgggcatcctccatgtgttaatcgatgtgccgcttgcgcgactttccaaactttagattactctttgcttgctacaaaatagcgttttactgggcttcgatggcggtcagggcaaccgtgttgatgatgtcctgcacggttgcgcctcggctcaggtcgttgaccggtcggttcagtccctgcagcaccggaccgacggccactgcgccggaggaacgctggacggccttgtacccgatgttgcccgcgcacagatccgggaacacgaacacattgacatggcccgccacatcgttgcccttggccttggtggctgcaacggtcggcgaccaagccgcgtcgaactggatggaaccgacgaccgcgaggtccggagccttctccttcacgagtgcggttgcttcctccacgaggtcgacgtccggtcccttgccggatcccagcgtggagtacgacagcatgccgaccttcggatcgaggccgaacgcctttgccgtttcggcggactggatggcgatttccgcaagctgctcagcggacgggttcaggttgatggcgcaatcggagaacactgcgacatggtccttgaagcacatgagaaacgcaccggacacgagggaggatcccggcttggtcttaatgacctgcagggccgggcgtacggtgttggccgtggagttgatggatccggaaaccagaccgtcagccttgccgagcaccacaagcatggtaccgaagtagctgtcgtcggcgagctgcttgcgagcctgttcctcggtcatgcccttcttggcgcgcagctcacacagcttggcgaccatcggagcgagcacttcctcgtcgtccttggcctggaactgcgccttttcaaggaatttgagtccaagctcctcgccgcgggcgagaacgctttccctgtctccgacgatgatcagatcgacgatatcacgctcaagcagatagtcggccgctttgatgatgcggtcttcggttccttccggaagcacgatggttctcttgtccgccttggccttgcccagcagactgtactggaatgcgtatggcgtggtcggcgcctcgaatggagcctcaacagcggagataagctcttcggcgttgacattcgcctcgaatgcctccgtggctttggtcacggcgtcttcctcgtcaaaatcaacggcgggtaacgtccacaccggcacctcgtaagctgcgaactcctccttgagaggttccacctgttcgtctttgcatccggtgatgaacacgccggcgaccttgctgcctgcattctcgatgatggtcttcgacgcctcgacagtgcccaggacctgttccggagtgcggttgatggtgcatacggcaagaagcacgacagacttaagatcagcggctacgtcagcattgaacgcaaagatggacgggtcgttgatggcggatttgtccgttccgacaacaaccacggcttcgggctgggcggtttcgatggcttccgtgtaggcggccacgatatcggcccgggaaccttccttgtcggtgcgtgcacgcttcgggcaaacaccgacggattgttcacggctcagccccgagttgcttgcttcaagaagaacgtcagtgaaggtttccttgcggcaaaccgccggacggaacacggccgtcttcttggcagctgcgaatgccttggtgacgccaagggccacgacgttgcggccgtttgctgcttcagggctgataatggtgacgctggttagactcacgatgtctgctcctattcgttgtttttaaggtgtgtgactgcgctgtttcgcaccatgtgccattgtaatgcgtgaacggtaacagacacgcatctcatgaaacggtgttgcgaacagacggtgaagagtaaacagaaaaccccagaggacgaatcctctggggttttcttcaagcgatcagcctatagaggctagactcactcgttatcgccagcggttgcggcggtagcggagacagcaccctgcttggtggtgttgacgccggagtagacccaatcggtgtaatccgggtgatcgtagccgttgtcgactgcgaactggaaggcttcctgacggaaggcttcgagctcgttgatcttgtcggcgtacttgtcagcatcgatcatgcgcagagcttcggcaacgagctcgtagcggtcgatgttgttcacgcgaaccatgtcgtacggggtggtggtggagccctgctcctcgtagccgtggacgttgaagttgtcgtggttcgggcgatcgtagatcagaccacgcacgtcgcgagcgtaggagtggtaagcgaacaggaccggcttgtcttcggtgaacaggtcagcgaagtcagcgtcggagatagcctgatcgttctccttggtggactgcagcttgaccagatccacaacgttgacgaccttgaacttgatgccgagctcgttgagcttgtcggcagcagccatgatctcctgagccggaacgtcgccagcggaggcgagcacgatctgggcttcgtcgttggacttggcggtggaagcccactcccactcggcagcgcccttctcgagctcagcgcgagcttcgtccagggtcagccaggtagcggccggctgcttaccagcaatgatcgcgttgatcatgttggtggacttgtagcacttctcagccacagcgagcagcatgttggaatccaccgggaagtagatgccgatcacgtgatcgttgttgaagcacttgttcagcaggacggaggtgacacccggatcctggtgggagaagccgttgtgatcctgacgccacacgtgggaggagacgagcaggttcatggaggagatcggcttgcgccacgggatctcacggacggtagcctcgagccacttggcgtgctggttcagcatggagtcgatcacgtgcacgaaggactcgtaggagctccagatgccgtgacggccggtgagcaggtaggcctcgaggaagccttccatctggtgctcggagagctgctcagtgacctggccggtgacagccatgtgctcgtcaacctgggaggacaggtagccggcgtcccactgcttgttggtgacgtcgtaagcggcctgcagacggttggaagcggtctcgtccggtccgaagatgcggaaggagtccgggttgttcttgatgatgtcgcgagtgtagacgcccagacgacgggtggcttcgagctggccccagccgtggccgtactcggcgacttccttgacctcgtagtcttcgagggccggcaggttcagctcttcgcggatcacaccaccgttggcattcgggttggcaccgatgcgcagttcgccggtcggcatgaaggcggtgacttccggcttcacggcaccgttctcgtcgaacagttcttccggcttgtaggactcgagccagttcttgaggacttcgaagtgagcctcggtatcgcgggcggaagccagcgggacctggtgggaacgccaggagccttcggtcttcttgccgtcgatgaacttcgggcaggtccagcccttcggggtgcggaagatgatcatcgggtagaacggacgagtcatgtcgtcggtctgggctgcggccttgatgtcgcagatctcgtcgaagacggtctcgaacagctcggcgaaacgacggtggatcgacaggtgatcctcgttgtcgaagccagcgacgaactcgtacggctcatagcccatgccgtggaagaactcgtggagctcttcgtcggagatgcgggacaggatggtcgggttggcgatcttgtagccgttgaggtgcaggatcggcagcacgataccgtcggtgcgcgggttgacgagcttgttggactgccagccggtggccagcgggccggtctcagcttcgccgtcgccgacgatggccggaacgaacaggctcgggttgttcatcacagcaccgtaggcgtgagacagggcgtaacccagctcgccaccttcgtggatggagcccggagtctccggagcgtagtgggacgggatgccgcccgggtaggagaactggcggaagaacttctgcagaccagcttcgtccttggtgatcttcgggaaggtctcagtgtaggtgccgtccaggtaggactgagcggtaccagccgggccgccgtggcccgggcccatgatgatcacagtgttctgctggtgatcagcgatgagacggttgatgtggccgatgaggaagttcaggcccggggtggtgccccagtgaccgaccagacggtgcttgacgtcttcgcgggtgaaaggctccttcatcagcgggttgctacgcagatagatctggccgatggagaggtagttggctgcacgccagtacttatccacgccttcgatagcttcctcggaaaccggagcgttcagcttcttccaaggggtgccaataacaggactcgtcatgtgtactcctgtactcctgcactgtgttgtgcgattgtttattttcattcggtcctgaatctcgcaaaaccttgcggttccgcggaacgattcattcccaatcacttgagcatattacgagcgaggtgcgactttttgctgtttttttgcgactgtgtgcgcaagtgtgtcgtttctgttagaaaatgagaacttttatcgggagatttgtgaatacttcacatgctatcaaaaagattgataaacggctcaatatcaacgatattgagctaccttcgcacctttttcacgttcgttttgcaatacttgcatgcggcgtgttgaaccatgcgtagtaagcaattgtgaggtttgttcactttctgttcacagcgtttccaatgtctgctcgcgtcgccacaatagaacagttagtattgttgcttcttcatacctcatatcaaaagggagagtgttatggctgcaggtcctgtgctcgttgttgatttcggagcccagtacgcccagctgatcgcacgtcgcgtgcgtgaagccaatgtttattcggagcttgtgccgcattccatgccggtcgacgagatgctggccaaggatccgcaggccatcatcctttccggtggtccggcttcggtgttcgagccgggtgcgccgcgagtggacaagaaactgttcgaggccggcgttcccgtgctgggcatctgctacggcttccaggccatggcctatgccttgggcgcggatgtcgacaaggccgcccttggcgaatatggcaagaccgagaccttcatcgacaagtcggaaggtctgctcgacggctcccccgccgatcagaacacgtggatgagccatggcgtggccgtcaagaccgcgccggagggctttgaagtgctggcgcataccgagggtgcgcccgttgccgccatgcaggatgaatcccgcaagttgtacggcgtgcagtggcatcctgaagtcaagcacaccccgatgggccagcagcttatcgagaccttcctgcacaagtgcgcagggctcggcaacaactgggatgcctccagcatcatcgaggatcaggtcgcgaagatccgcgagaaggtcggcgacgcacaggtgatctgcggcctgtccggcggcgttgattccgcggtcgcggccgctctcgtgcacaaggccatcggcgaccagctcacctgcgtgttcgtggatcacggtctgctgcgcaagggcgaggccgagcaggtcaagcatgatttcgtcgaggcgaccggcatcaagctcatcgccgtggacgcctccgaagacttcctcaccgccctgaagggtgtgagcgagccggagaagaagcgtaagatcatcggcgaaaagttcattcgcacgttcgagaaggctcagcgccaggtcatcgaagaggcgggtgcttccggcaaggaagtcaagttcctcgttcagggcaccctctacccggatgttgtggaatccggcggtggcgacggcgcagccaacatcaagtcgcaccacaatgtgggtggcctgccggacgacatcaagttccagctcgtcgagccactgcgtaccttgttcaaggatgaggttcgtgccatcggtaccgagcttggattgccggacgaaatcgtctggcgtcagccgttccctggcccgggcctcggcatccgcatcatcggcgagatcaccaaggagcgtctggatctgcttcgcgaggccgacgccatcgctcgcgaggagctttccaaggctggtcttgaccgcgatatctggcagtgcccggtcgtgctccttgccgatgtgcattccgtgggcgtgcaaggcgacgagcgtacctacggttcgccgatcgtgcttcgtccggtttcctccgaagacgccatgaccgccgattggtcccgtattccgtacgatgtgcttgccacgatttcgacgcgtatcaccaatgaatgccgtcagatcaaccgtgtggtgctcgactgcacctccaagccgccggcaaccatcgagtgggagtagttccccttggtttagatgtgccgaaaaacccagtatttatgcgggtttcgggacttggtacttttcgggcaaccgattttgcaacagatgaaatagtcccccttggcttgcaactaaacctaaaaatcgcataatttttaaggcttttgccctgttttgggcagaagcctttttgcatatttgataaaattttctctttaatatatcatcaaatcagataaaacagcgaggtggatagtatgaaaacagaaaaaataccatatatatttaagtacaaaagaaagaaacgaaattgttgctttccttataaatctaaaaaaacaaattgattgaacaaggcagataccccgacgccgtcgatgatgttctctgcaaagtgctttctaccaagaaaagaaagctcaaaatcaaataatcttgccacgacataagaccgcctacacgatgtaagcggtcttatgttttagttcgataaactggaatttctatttgtgttgccatgtcattacataatcttt

SEQ ID NO: 841 - DNA, 103314 bp, Unknown
  gut microbiota DNA sequence
gaatctcaaatccttctctcttataaaaagatattgcccgtgcgttcttttggtatacgttcaaatgcaacttattccttttatcctttgcataattcagcagaattttacctataccctgcgattgcatttcaccagaaacaaaaatgccctcaacatattcatcatttaaccctataaaaccctgtatttctgtatcatactcatacacataaacctctgctagtaacagcgcttcttttactgatttgaaattgcttttccagtattcgacggggataaaattatgtgcctttatatttgtatccaaccatatatctgcaactttatttatatcatcccttttaaattctctaatcataacggtgactctccataaacttgaatttaaattataacggtctttgcaaatacaccatatctaccaactgtattccactctcatagattgggtggtcataattatctataaagaaatttgatatgatatgcgaacggacaaaaccacacttttcataaaatggtattgtcagtgggctatcgcctgttcccacttgcagaatggcatattgctctctgtaattattaacaataaactcaattaaggctcttgcataacctttcccttgatattctggaaccgtcgcaatgttcttgatttcaagtatgtcattttctttatcggttatgacacactcacacttgaccccattatcatcaagtacatacatcttgccgttatcaagataacggtcaaccatatcttcctgctcatctgctaataggagcaaatcaagatattgttttttattttctttaacttcaataattttcatcaatcgcacctacaaattctgatttatcaatctttaatatcacatattatacatcataagtatgaaaatttctacccgccatctgttgacctcaaatttaaaacaggcggctttttttattttcaaaaaagttgaaaaatttttgctcagagggggcgcaaaatgcctctcccagttcaaacaagtgagtgggagtgattccaagctgattcgttactgaacgcaaaatcgcaatcaatatgatgaagcccccgaaagtgcgaaacttccgggggcttcatcatgctttccgccttctaggctcgagccagataacacctctcaaggtgtcggacgcctcatcgctgcttacctctttacgtacggtgtcaggtttccattggttccgtgtttttcgtaggcattatgacgtttgcgagcgccactacctttgccatgttggggccggacaaggccaagccgtgtcaggaaagctaagaaccatcgtggcttgacatagcggcatccgcagaatgattacgatcctgtgcaaacgtagaatgtccttcctccgtttttgcggaggaaggacattttcataccgttttcaatattatttgcggattatcctggacaatcattgctaggccagcatgctggtccacatgtttgcgaaatcaggaagcgttttcgcagtggtggcgatgttcttgattagaatgccgttgattttaagccccagcatcgcagcgaacgtcgccatgcgatggtccgcataggtttccatttcagccggcctgagattcattgccggcaccggcgtgatctccagcccgtcgggaagctcacgggcatcacccccgactctggtgatctcgttgaccaatgcttccaaacggttcgtctcatggccacgcagatgaccgatgcccagcatgcgcgtaggagcatcggcgaagaccaggattgcggccaatgatggcgcgatctcacctgccgccgtcaggtcgaaatcacctaggccactgacacgaccgtcgccggtcacttcgcagtaccggacgccgtcaatcaccgggaagttgatttcggctcccatatgttccaaatatcccggaagcaggcctccgggttgcgtggtggattccggccaatgaggcacgcgcacggttcctccggcgatgagcgctgcgccaaggaacggggcggcattcgacaggtcaggctcgaccgtcacggtttcgggcaactgcacggctcccggctgcacggtccatacgcgggcgtgttcgtctgcgttggcacgcacgccggaaccttgcagatcggccacggtcatgcgaatatgaggcaaactcggcgtcttctcccccgtgtgatgcagttccaaaccgcctggcactcgagagccgacgagcaatagtcccgaaatgaactgcgaggatcccgaagaatcaatgctgactacgctcggcttgacgcgctggctcaccgtttgaggtggagtgattgtaaatggcaggcgaccttcctcgccgtggtattcgatacatgcccccaactgttcaagaccgtccaacacgggcttcatcggacgtgcgtacgcctgctcgtcaccgtcgaaatccacaggaccgtccgcgaacatggcaagaccgggcacaaagcgcatcaccgttcccgcaagaccgcagaacaccttcgcaccaccgtggaaccggccgtcggacggcggcgccaccgtaaccgtggtgtcaacctgctcatcgatttcgcagcgcactcccaacgaacgcagcgcgtccatcatcagctcggtatcacgcgagcgcaacagaccgaccaatcgcacaggacgatgcccgagagccgcaagaatgagataacggttcgacagggatttgctgcccggcaccacaacggtggcgtcaagcgacttgctggcaaacggcgccggccaaagattctcttgagatgcgttcatagggcttatcgtatccaaaacccgaggaaaacaacgcttcaatctcgccatacagcacccgtatcttgctcgaactcgacaatcaaatgccatccataccatttccgtttgaaaacccaggcggacagaactatgcgaatatcacaaaatgccacgaggaattcccgcgatcgtcgtgtttgtaccggaaaccggggaaaggatttttcaaaccgtctgaaacacctttgtttccaacggttttggtcgggctgacaggatttgaacctgcgacattctgctcccaaagcagacgcgctaccaaactgcgctacagcccgttcacgttcacaccccgcgaatccgcctcacggaatcgcatcaagtgaacacgagtttctattatagcgtatggttggacaacgacaggcttacaatagcatttcggaagggagagtggcatgggacgtcaccagcaggccgaatcgtcaggcatcatctcctttgtgacatgcgccgttatcgcctggttcgtcatgaacgcatacatgcagttcgccccggccatctggcgtgtcacgcagcgtctgttcaccgtctgcgcgggaatcgtggcaggatgcggagtcgtttcattcagtttgggttacgcacgaaaatcacgttcgctgacactcaaacatggttgggctattccggtccgtcgtattttcgagatcctcgcgctttccatggtgtatgcttcgaccattttcgtcacatcgttcatgatgttgtccatcgtcaacaacatgatgggcatccgcacgctgaaaggctatctgccgatcctatgcgcggccatcgcaggcgttgtaggctatatcactttcgtgcaggcggaacttatgaatgccaaaacgatcgcttccctactgccgtttttcgtggtgtctggcgtgagtatcgcaggattgacgtccgacgatccgtactggtacaacaataatttctctcaattgggcgaccgtacgacgttcgccgcgcgtatgttcaattcgacgctgacgctcgcgggcatctgcattgtgatcatcagctatttcgccgtttccgagctcatcaccacgtatcgtctgcaattgcagtatctggattccaatgccatcaatgagacgccgaagcattttcgtacgaggattctgctgctgtcaatcatgttgacgttggccggcatcgctttcgtaggtatcggcatgttccgttacacgccgcatccgattttgcacaacgtgttcgcccgcggcctaccatgtttgatgagcgtgctgatgattgccctgccttggcttgccccgcaactctcaaaggtcgtatacgtggtttccgatcttgcgattgcgattggggcttatgccggattccaatggctgagcgggcataacacgctgacgaatgtggaggcgttggccggcatgatgttccttggctggttcatcattttctcgcgtcaaatcgccgccatcgaagcggatcgcgtgcagacgcagctgatactggcgcaatctgagagaccacgctccgtcgaggatcttgcggaagtcagcgaaactgttcccgacacagtttcgaggctcgccgcacaagtctgatgcaaggctgaccggcaaccgccggatttcaacatatacataccagtggggtggagccatcgcattggcgacgactccatcccactggattctgacggcataacgcgagtgcgccgtcagaagttgtagtgcttgttggacggcttcttgtcgctcatcaacagcaggaagcttcttgattgcgcagtaatcgcaaaaccggcctcataattgagttctggcccctttggattatgcgtgtcgacaattaagcgccatttcttgccatattgctcatcgggcagggtgaacatgatcggctcgtaatgcgcgttgaaaatcagaatgaaatcattgtcgaccatctgattgccgtaccagtcggtttccggaatatcggaaccgttcagatagatcatcacagtgaaggcgtgtgtgtttgaccagtcgtccatatccataatggagccggtatgatccatccattcgacctgcggaatcgcagtgctgtcgtctccctgctcgcgaccggagaagaagcggcggcgatgcagcacaggatgctcaagcctcaaatggatcagcttcgatacgaattcgagcaggtccttttgatcctcgtccagatcccagttcgtccaggagatcgcattgtcctggcagtaggcgttgttattgccctgctgggtgcgcgccacttcgtcgcctccgcagatcatcggaatgccttggctgagcagcagtgtggcgaacatgttgcgcatctgctgttgacgaagctcgttaacatccttgatggtcgtaggaccttcgacaccgcagttccaggaacggttgttgctttcgccgtcgcgattgccttcgccgttggcctcattatgcttctcgttgtagctcaccagatcgttcatggtgaagccgtcgtgcgcggtgatgaagttcacggatgcgaccggtcggcggccattgacctgatacaggtcggaactgcccatgaatcggctggcgaattccggcaacgtggacggctgcgagcgccagaagtcgcgcacgcaatcgcggtagcggccgttccattcggaccagctggacgggaagccgcccacctgatagccgccagagccgagatcccatggttccgcgatcagcttgacgcgggagatcaccggatcctgttcgacgatgtcgaagaaggccgacagtttgtcgacttcctggaactgacgggccaatgtggcggcaagatcgaatcggaatccgtcgacgtgcatttcggtgacccagtagcgcaggctgtcggtgatgagctgcagggcgtgcggcgagcgcatcagcagcgagttgccggtgcctgtggtgtcgaagtagtgtctgcggtcgttgtcgaccagacggtagtaggcgccgttgtcgatgcccttgaagctgagggttggtccacggttgttgccttcggcggtgtggttgtacaccacgtcgaggatgacttccatgccggcatgatggtatgccttgaccatggatttgaattcgttgacctgttcgccgcgttgtccggagctggaatacgcgttgtgcggggcgaagaagccgatggtgttgtatccccagtagttgctcaggcctttttcctgaaggaagctgtcgttgacgaactggtggatgggcatgagctcgatggccgtgacgcccagcttcttcaggtattcgattaccgaggggtacgccagacccgcataggttccgcgaatgtccggtggcacgtccatgttgaggttggtcatgccgcgtacgtgggcttcgtaaatcacggaatcgtgatatgagatgttcggatgctggtcgttgccccagtcgaaataggggttcaccacggccgctttcatggtgtgtggggccgagtcgagcgtgttcatgctggtaacgtcatcggggcttctgaaccagtacgagtagaggctctcatcgccgtcgatgttgccttcgatggctttcgcgtaggggtcaagcagcagtttgttcgggttgcagcgcaggccttgcgtcgggtcgtatggaccgtacacgcgatagccgtaacgttgccccggttggattccgggcagatagttgtgccagacgtacgagttctgctcggtcatttcgattcgagtttcgttgtcttcctcatcgaaaaggcaaagctcgactttttgtgccacttgggaaaagagggcaaaattcacgccggcgccgtcatagcttgcgccgagcggatacatcgatccgggtctgatttgcatgattcaagtatctcacgttttagcccccaaatcgtaatttcgtgttgttcggcgattatttttacgattcgaaagaacttttggctgtattttgccggtttctccgaatttgctcgtgaagaatggcgatcatggaattggaggccgtaatacgggtgccgcgcagccgctgccaggagacccacgccgattcgacgtgctcatcgccgtcgaagtgacgttcgacgggatgccatgcatgcaggtgaagcaccatgatgttggcgagctcgtcggtcatgccttcggacgagtaaaactgccccacatggtcgaattcgacaccgtcacgcccggcgggctccacaccggtttcctcacgaagttcgcgcagcgcggcctcttcaacgtcctctcccccgtcgatgagtccggccggcagaccgtaggcgaaggcgtcgcaaccgatacgatattcacgttcgatcaggtaccggtcgttcgcgcaatcatgcaccagcatgaccacgcaaggcgcgtggcgcatcacctgacggcgaatcaccgtttgccctccgtcacgcatcggcaatgcgatccacatgtcgtcgacgccgaaaatagcgccttggtacacgtgcttgctgtcaagcaccgttaccgtgccggacatgtccactccgtcactggactcgtccagcaatgcatcaacttgggtttcgtctgccgcttcgttattcatgacgtgtcatcgttcctgtccgcttgaggggatcaccatgttccatggatcggtgttcatggaaatccaacgcacggcaggaatgtcgccggtcgcttccgcaaccgcataaggaacgtctttcatcgcatactggaaccacatggattcgatggcgctatgcggagtgttgatgaacgcaggacgcacatgctcatcgccatgtcccagagcgatgccggaagcgcgcatggaagcctcatagcgggcctgttcaatggcgtccgttacgggatgatgcctcagatcgctggttacatacacgtcgactccggtcgcacgcacctcatcgaacagcgaatcaccggatcccggcaataccgccaccgtattgacgggagcgtccagatcaccgcaaacctgcacgccaagctcggtgtacggcagcgcgccagctactcgactggcgaaatcacgcaacgccacaggttcggcaagccgcccgacacgtcccaggccgaccggatgctcgacgttcggatcgtcgatgggcaccagcggacgctgatccaccaaaccgaacatgtcagccgcagccatgccgacaccacgatatgctgcatcggcattcgtatgccccacccacagcgcgcatccggcacgattgagcttgcgcacgatctcaccgcggaaacccaatcccgacaccgcatgaacggaacggaagaacaacggatggtggcaaaccagcaaatcaacgcccccggcaatcgcctgatcaaccaccgccatagaggggtcagccgcaaaagcgatatcgcgcacaggctgacgcaagtcacccacgataagaccaggctcatcccactgttccgcatagcgaagcggatacaacgtttctaacacatcaacgacctggcttaacgcagccatcgcaacctcctcatcatccgcgacttcatatacgtgacatcatcgcacggcaaccgacatgtcccaaacaggcggcatcagtgcgcggcaagctgccaatccgaaccaatacccgtggaaacatccaacggaaccgccatatcgaccgcatgctccatggcatccttcaccaacgcagtgacacgctccgcctcgcccgacgcaacctccaccacaagttcatcatgaatttgcaaaataatccgactggcaagaccagcctcatgcaacgcatcatcagcacgaatcatagcgatcttcataatatccgcggcggaaccctgaataggcgcattcagcgcagcacgctccgcagcgtcacgtaccgcacgattcggcgacttcaagcccgggaaatacctacgacgaccataaatcgtctccgtatatcccttttcacgggccgtggaaaccaacgactccaaatactcatggaccttgccgaacgtcgcaaaatactgctgcttcaatgactcggcctcacccggcttaatgccaagctgctgcgaaagcccatacgtgctcaacccatacgccaagccatagctcatcgccttaacatgactgcgctgatcagacgtaatctcatccacaggaacgccatacaccaagctcgccacatacttatgaaaatccctaccggaacggaacgcctcaatcaacgcctcatcaccggaaagatcggccataatacgcaactcaacctgagaataatccgaactcaacaacgactcaaaaccctcaccgggcacaaaagccgaacgaatctcacgaccagcaggatcacgattcggaatgttctgcaaattcggatcgaccgagcttaatcgaccggtcgcagccacagtctgctcaaacgtcgtatggatgcgtccgtcagacccgttggtcgcatcgatcaacgtctgcacaatctgcttgagcttgttcttctcgcgatgcagcaacaatgcatcaaggaactggcatgcgctgtcattatcatacgaacgatcgcgcaacgcctgcaaagccgccgcattcgtggtatacgaaccggttttggtcttcttcgtaggcttcaagcccatatcctcaaacaggattttctgcaactgtttgggactttgcagattcacacgctcgcccgcatactgccatgccgtttcctgcgcatgattcgcatcggaggcaagctgctcacgcatgttcatcagcctgttcatgtcgacttgcgcaccggcatgttccatgccatacagcacacgggatactggaatctccacagattcaagcaatgagaactgctcacgctgatccaatgaatccgccagtttacgcgccagcaaaccaacaatcgcagtatgacgcggaagctggttgtcgttccgctgcgcactatcgtccggctcgtcgaaatcaagcgtgccttgcgtcgcaccctcggactgttcctcgatatgcaggtcaaggaaatgcgccgccgcccgttccagcgtgtcggcatggaaatcgggatggaccagatacccggcaagcttggtgtcgaacagcggcttcggcaacgccacaccgacgctttccagcaggtgggactgttccttatacccatgcaccaccatggattggtggtgttcgtcaagtaccgtttgcagctgggacgccatgtcacggtcaacacgattggtacgaatcgctttatcatgtgcagcgatcatcagcgacgcataggccgcgttccccggcttgctttcgccttccacctgcaacacccacgaatgcgccacggactgcgcacactgcttcgtatgatcaatggcgaagccggagggagtcgtcttcggcgcgatttcacgttcgtcatgcagatgcccgttcggcatcggcagattgtctcgtacccatgcttccaatgcttccggcgagtcaaccgtttcatactgaggtatttcgagcttgccggactcgtcttgctgcacgggatcgttggtgggcttccccgcattgaatgttctcagcacacggtttttggtgcgtatgccgaattcaagtctggtgaacagttggttgagctggttggcgtccacctgaccgaaagtcaaatcctcgatggacacgccaaggtcaaggtcacgcaccaaggcattcacggaacgattcagtttgacctgatcgatattggcccgcaacgcctcgccttttttgccgccgatttcgtcggcatgctcgataatctggtcaagtccgccatacaggttgatccatttggccgcgaatccatcgcccacgccgggaacgccggggatgttgtcggcggtttcgccacgaagcgcggcaagatccggatattgctccggcgtgacgtggtatttctccaccaccgcgtcgggagtcatatgcttcaaatctttgaaatgatgccccggatacaacacggtgatgttgtcgttgatgagctggaacgcgtcacgatcgccggatagcaccagcgtgcgatagcctgctttgtctcccatgcttgccaacgtgccgatcacatcatcgccctcgtatccaggtttttcgatgaatgtgacgccaagggccgtcagcatccgttgaatcaacggcagctgggtcaatagatcttccggagccgcatctcgcgtgcctttgtactgcggcagcatcgtattgcggaaggtaccgcctttgacatcgaaagcgacggcaagatgatccggatgttccgcgtcgatcacctgcgaaagcatggtggcgaagccccatacggcgttggtcgcctgacctgcggatgtactgaaattctctacgggcaaggcaaaaaaagcgcggaacgccaaggaatggccgtcaacgaccaatagcgtcccgcgcgtagtgccttccacagttgctgtgttagcgctcatcctctgcttccgacttctgatcaccgtacttggcgatgatggccatagccagacgcttcttcgggatgcgctggtccatggaggtcttctgaatccaacggaacgcgccctgctcggagaagtcagccttatccatcagcaggcccttggcacgatcgacaagcttacgttcctcgagggtttcctcagccttcttcagctgctcttccgccttcttcagctgctcttcggtttcgtgcagcctggattcgctgcgctccacattgtcgagcagatcgttgatttcggcgaaacggcccatggccacttccagagccggaagcagcttggattcctcatacggcttggtgacgtatgccatggcacctgcacccgtggccttcttgaccagatcggactgggagaatgccgtaagcataacgaccggagcgatattctcatcacagatgatgcccgccgcttcgatgccatccatacgaggcatcttgacgtccatgcacaccacgcttggacggaacttgcgggtcaattcgactgcttcctcaccgttagcggcttcgcccacaacctcgtagccactatcttccagcatggcaaccaaatccatacggttcacggattcgtcttcggccacgacgacggtacgcttgcgaggtttgtcatcttcctcgatggactgctcaggcgctgcggcagcctgaagttcatcgtcggtgagcacttcgtccggttccgtggtcttttctgcagacatgtcggtctctttccactgtcacacccaaagccggtctcacaaaccccaacctggtcctggactgattcgatgccgttacttgcaatcgttcggattctggaaatcttcagcttttcacagccttgattcaccctccatcacgcaagttggaacgaaccggctatcttccttgtactttcatggatgatactagcagaagcctacaagcgcgtgttgccgcaatcctctttttccttcacgtgcaaagccgaaaaatcctagaaattccgcaatcctgcaaagtccttctttccacaatcccgcttcaacgttgtcttgtttatactggtcgtatgagtagcactttcactatcagagatattgtcaacgaagacgcaacggcatcagtcagcgattacggtgcgcatgtgctttcctgggcacctgccggcgaacaggctgtggtttggcggccaaaggcgattcatcttaaggaaggaactgccatccgcggcggtgttccgattattttcccttggttcaattccggtttcgaaggcgggcatgtggcttcgaagaagcccaagcatggttttgcccgcaatagcttctggcattatgacaaggaaggttcttccgatgccttgttgcgctatacattggattccagcgagatcaacgcagatatactttcccagtttgtttctggaccgaatcctcaatttcatgccgtttacaccattgaagtcggctgtgagttgacgatgtcgcttaccgtatataacgatggagacgagccattgtcttacgaagaggcactgcatacgtatctgcaggttggcaacgccgaacagtcgcaggtgtgcgggctggagggcaccgattatctcgataccgtattggacggcgatccccgttgcagccaaggtgatgaacctgtgaccttccaaggcatggttgaccgcatctactattcggctcacacgcttgagctgcgcgatcctgtgctgaaacgcaccgtcgttgtttccaagcagggtgcggcgcagaccgtggtgtggaatccgggagaacaagccggaaacgccatcggcgatttggatgagggcgaatggcgcggcttcgtctgcgtggaagcggtcaacaatcgcgattgcgcggtcgtcgtgcctccacacgattcgcatacgctgcagcagatcttggctgtaaaacactgagcgaccagcggtttcagtcgtttagactgtcgccgaagaccttttcgacgtattcggagagcttgccgttcttggcgagttcggccgagttggccttgacgaaatgcgtcttgcagccgttgccgacctcatcgtcgcatccgaggatgtagtgggtcgcgatctggtagatgatctcggtgggcgcgatgccgtacacttggtgttcgaggatgtgatcgaggcgttctcggtcgtccggatacgcatcgcgcatgccttcgttgcggtagagccgtttgataatctcagtgatgtacaggccggacttcatgtacaggtctgcgaacgtgtgggtcggatcgtcgaagcagactgggttctcctgttcgagcatgtccaccatctgcacgaccacgcgacgcggggtgaagatctggttggtcttctgcggcggcacgtagtcgaagatgtcctcccgtaggttctcgtcgaagtagttggcgagtctgtgccgcaattggatgcactccttcacggagtcgtcgaacacgaccgggtcgaacaggtgtccgtcgaattgctcggtcccaccggtttcctcgtccacatagtcgccgccgtcacgcaggaacctgaactggtccgtcgtgatgctagtcacttcctggaacacgttttccggaatgatccggtcgcaattctccagtttggtgttctcgtcgccgtaggccatgaggaacgatggaatcgtacgggagaagccacgcaggtggtcgcggatgatgccctcgatgggctgcttctcctttttcccttttggcggtttcgacctcacgcacgatggtctcgccggccgatttaatgagcgtttcgctggattctttaagaacggcaccacaccgaaacacgttctggaacgatgccgcacctggattggcgatctggcgacctattacaagaagctagatagcaaattagacgacccgaagatagacgaggttttcaggctgctttcccaatcaggagacatcatcctcaaaaacagactgtaccgctgtgccggcacgaacacgcaccagacggaactgggccggaccgtcgtcacaggactgttcgacccgaccatcgcgcacaatgctccgacaaccatttctggtttagccgtccaatccgggaccgccggaaagaccgcagcctggtggaacgaatccgattacaagatcatcgacgcgaatcacgcgctcatcacgccaaaccagctgaagaaattcagccagcaacatgccttcatactgcacaattaagttcaaaagccatctcacaaattcagttggcaccgtaaaaaacgctataacagctgcggcataatgacacaaaagattggacgaaagcgaggatcgaaattcgcctgacaccgcaatgtcgaatgtattttcaatgctttcacaccgtctctgccatacttgacagtacggaacgcttaagcaacgaagctggatccaacgacggatacagttccgcgaacggtctgaggaaaggatggatagttccatgaacgatagatttccgggcatcgactggtattgtgatcgctacaatgcacagctgaacagctagtcgggttttgatgaccatcactacgtatggaaatgcactgaatgcggccataagaacagtatctcttcagattccatctgtgactctgaagaagacttccgcagctacaacaactgaaaggaatatgaaatgagacacgttttcaaagccacaaaaatcggctgggacgaagagcaagagggagtctggttcgactctgacttctactccaaggaagaggcagaagccgagttcaaaccatatcagggaaccacacaacgcggctacccatatactggttacgaatacgatggagagcaatatcacgatgtgacttatatgggagaattcgacgatgacgatcttccacaaaacgacacggaagctcgtcagaagcgaaagaggtagcttcacccccactgtcgcagtatcagcatgccagatagtttccaaagtttgtcagcgcactatgaggagtttttgtggccggaaaacaattgactgagcaagaggtgctggagattctggatatccccgatttccgacatatgtcaaaagacaaagtgatgaaattcgcgtcggaattgccaaacatggatccgcaagtcgcaaaaactgcattgttgcaattccctgaattcgccgccaccacaagagatgttatgtcttgcttccaagaaaccatgctggaagtgctgaaagaggatcagggtaatgttaaatcatttaatgaatcctgcgacgtaattcttgcactgctggcaagcctcgctgaacagagcgacatatcattcgaacagaaagaaaaaatcatcgataagatgatagcgatagttcaactcaaaggaaacaaagacaccgaaacaaaaaagttcaaatataaacttttagccttactgacgggactcctctcagtactcgcacttgcactgctagcctcgcttggaggtaaggcagaactccacgagggcagcgaagacgaggacgaagaaaattaaaccatttgattcaatcggtttagaatagaccattcagaactagataccaaacggatggtgaggtgcggaggtaaactttcttccccgcctcaccatccggtatttatcttcgcaaatatcttcgctgactgaaatcaaatttgaccgtgttgtccggatttagaatcaggcttgcggagaactttttaccggcttgtgaggtggaaccgttgacgtggatctggtacttttcgagcagagttcgcaccatcggatcggtgaggtttttgctgcagatggtttggtagagtttccagccgcagccgctgactgtctgccatgtgccgtcggattgtttttctcgtttgttggtcgagcattgccagaatttgccttttcggatgaccggttggccgcattttggccatagtccatatgattctgtctccggattctgttgtcgtggccgaatggcgtccccgttcagtctgacgatctcccccacttgcctgggaatccctgcaacttctttcctgaacaggttcatgacttctaacgtagaccgttcgccacgttcgacctgcgatagtttttgttccatccttgccgtgtactccacgttcctgagctccggggatacaaccgtaatcaggttccgtcccgtcaagatggaacgcaactgtttgcccttgagtttcacgtattcggactggataagtttctcaattacttcggcacgggtggcaggcgtgccgataccgcctgaatgcgattcgtcgtcgtccaacgcttccttaagatccttgtcgtcaacgaaacgcgaggcatgttccatcgctgcgagcagtgtcgcttcggtgaatggtttcggcggtttcgtctcgcctttcctcatagtcgccgtcccctccggagacaaaaccacatcacgccccggttcgagattcgaaggaatgacgttacactattcgttgtttttaaactgcgccactctcttgcttttccggtttccattcactcgcttacattcatacgccacgaggaagatgccggaatcatcaagccatgacagcaccgtcaaccgtgaaaatatcctattcaaaaaatctaaaacaccacgtttagtccctgtaacccgtatcgcctggtggatggaaggcactgagccaccacgtaacggcgcatgcgccagatgggttttcaaagagaaagccgcggctggaaatttccaaccacggctgttcatcaatccggtgcccccggtgggactcgaacccacactgtacagattttgaggctgtctcctctaccaattgggatacaggggccttcgcacaacttgactatattaacacagaaaaatgattttgcaaagtccttgagcagtcggcgtttcgcgccatactcgacaccttgatcgcaacctgtcgcagtctgcaaatcggcaacatatcaacatcatccaaaaacaacgggagggcttccatccaaacggacggacgccctcctattcgctaatcagtcagccactgaccgaaacgcatctcagtcgcaagcaccgacggtgtggacgtagatggaatcggtgcgacccggctggtgctcgccctgggcggaactcagcacaacgatcttgtcgccatcggtgaccttgccggcatccttcaggatcttatcggtgaagatcatcaggtccttgcgggacttgtcgtggtaatcctcatcgagcaggaaggactcggtaccccaagacagagccagccagtgataggtgtgctcgttgttggtgatgccgtagatcggggtggccgggcgttcgcgggacacgcgatgcacggtggaaccggtctgggtgtaggcaacgatggccttggcgttcagcttgtcagccagatccacagctgcggaagacacagcgccggtggaagacatatccaggttcttcagctccgggatacggtcgaaaccgtgctcggtggcgaaggaggagatacggctcatggtgctcacggtgactgccgggtacttgccgacggcggtctcgttggaggtcatagtggcgtcggcgccgtcaaggatggcgttggcgcagtcagatgcctctgcacgggtcgggaccggggagttgaccatggagccgagcacttcggtagccacgatgaccggcttggcgtactggcgagcgagctcgatgcagcgcttggtagccagcggcacctcttcgagcgggcactcaacggccatgtcgccacgagcaaccatgataccgtcgaaggccttgacgatctcttcaaggttctcaagagcctgcggcttctcgatctttgcgacgaccgggatgcgacggccttcctcgtccatgatctcgtgggcgcggtcgatgtcggtggcgaaacgcacgaaggacatggcgatgatgtcggcgccggtgcggatagcccaacgcagatcggcttcatccttctcggtcagagccggcagggacaccgcaacgcccggcaggttgatgcccttgtggctggaaaccggcccggcaacgacgaccttggtgtacacgttgttgccttcgaccttggtgacctcaagacgaaccttgccgtcatcgatgagaatcggatcgccagcatggcaatcgcccggcaggcccttgaacgtggtggaagtgatatgctcgtcgccctcgatgtcgtcggtggtgatgacgaactcctggccttcggtcagctggaccttgtcttcaccgtcggcgttcttcttgaaccaaccgcaacggatcttcggaccctgcagatcaaccagggctgcgacgttgcggccggtggccttggcagcggcgcggaggttgttgtagaccttgaggtggtcttccggagtgccgtgggagcggttcagacgagcgacgtccatacctgcttcgacaaggctggtgatgccttccagggactcggtagctggaccgatggtatctacgatcttggctttacgcatgaatgcctgcctattcttgttgatattgattttggatctgacgaccctgtttccaaccgaccagtctactagaaaaaagcgctcacttctaccctgaaacgaggcgtgttgtgagcgctcacatttttttgataaaaagaaaccgcatgtttccatgcggtttctcaaatcgtcacttttcctttgcttcgatggcacgcatcttcagtacgctggccaatgcggcaccaccaatcgccacaacgatcaccgccaaagacagccatgtaggcacttcaggcacccaagcgatcggttgaccgccgttgatgcacggcaacgaattgccgtgcaatgcctccataatgagcttgactccaatgaagcccagcaccacggaaagtccaagaggcagatacaccagcttgtcgagcagctcgccaagcaggaagtacagctgctgcaagccgagcaatgcgaacacattggacgtgaacacaatgaacggatccttcgtcaaaccgaaaatcgcaggaatggagtcaaaggcaaacatcacatcggtggtgccgatggtcagaaagacgatcagcatcggagtccaatacttggcaccgtttttgacggtacgcaacttttctccgtcatactcatcggtgatcttgatcaccttgcgcaatgcacgaatcaagccattctcatgatattcctcatcttcgtctcccccagtgaccaacttgatggcggtgacgataagaaatgcgccgaacaggaagaacacccaggtgaagcgggagataatggccgcgccgatgaggatgaacacgccgcgcaacaccaatgcgatcgtgatgccgatggacagcacgaatttctgcagctgttttggcaccgcaaaattcgacataatgatgacgaagacgaatagattgtcaatactcagcgaatattccgtaagccagcccgaataaaattcgatggccggcttcaatcccgcgaagaaccacataagtccgccgaagatcaacgccatgactacaaagaacgcgatatgctgcacgcattccttggtggagggcacatggggcttacgtccgatgataaacaagtcaaccacgaagaagacggcaagcaccgcgaacgtggcgatttcaaaaacaagtggtgtttcagccataatccactatggtacggatgccgtatgaccggtcgagaactatttgctcgcctccgtcatctgccgaagttcctttttcaggtcacggatctcgtcacgcaaacgagccgcaagctcgaattgcagttgttcggcggcggcatgcatctgctcggacagttgtcgaatgagatcagctagatcctgcgcgggcaatccggccttgagaatctcctcatgccgtctgtcagattcctccttgctggtagcaggcacgccaagatgcgagttgccggctttgccttcattacggtagccggtaccgagcaacgtctgcgtatcgacatcttccttggcgagcatgtcgttgacgtcgctgattttcttgattaacggcttcggatcgatgccatgctctttgttatatgcgatttggatgtcgcggcgacgattggtttcatcaatggctttatgcatggcatcggtaatgtcatcggcatacatgatgacggttccggacacatttctcgcggcacgaccaatcgtctggatgagggaacgataggaacgcaggaaaccttccttgtccgcgtcaaggatcgcaaccaacgatacttccggcaaatcaagaccctcacgcaataggttgatgccgacgatgacgtcgattttgccttcgcgcagttcgcgcagcaattcgacacgtcgcagggtgtccacatcggagtgcaggtattcgactttgatgccacgctccagaagataatccgtcagatcctcagccatcttcttagtgagcgtggtgacgagcgcacgctcgtttctattcacacggtccttgatctccgcaagcagatcatcgatctgcccgtcaaccgggcgcacatcgatttgcggatcgaccaatcctgtcggtcgaataatctgttcgaccacaccgtcactcaagccaagctcataatcgccaggagtggcggaaaggtagaccgtctggccgacgcgctcaaggaattccggccatttgagcggtcggttgtccatcgccgaaggcagacggaagccatgttcgaccaacgtgcgtttgcgactggcatcgccttcgtacatggcgccgatctgcggcacggtaacatgcgattcgtcaatgacgagtaggaaatcgtcagggaagaaatccaataacgtatgcggcggcgtgcccggctcacggccatcgaaatgtcttgagtagttttccactccggaacatacgccgacctgggaaagcatctccaaatcgtatgtggtacgcatggtaagacgttgcgcctcaagttccttgccttgtttgcgcaattcggcggtacgttgatcaagttcctgctgaatggtagacaacgctcgctccatacgttgcggccctgccacatagtgcgatgcggggaaaatatggacttgcgattgacgcccgatcacatctccggtaagtggatgcagggttgaaatacggtcgatttcatcaccgaagaattcaatacggatggccagttcctcatatacgggaatgatttcgacggtatcgccgcgcacacggaaagtacctctggtgaaggcgatatcgttgcgcttgtactgcatggcgacgaaagtacgcagcaagtcgtcacggtcgatctgctggccttcctcgagaaacagcatacgcccggcatattcttccggcgtaccaaggccgtaaatacaggaaaccgttgccacgaccacgcaatcacgacgcgtcagcaggttcgccgtggccgcatggcgaagccgttccacgtcgtcattgatgttggaatccttttcgatatacgtatctgtttgcggaatataggcttccggctggtagtagtcgtagtacgaaacgaaatagctcaccgcattgtctggcatgagttcacggaactcggcgcacagctgcgctgccaacgttttattcggttcgatgatcaacgtcgggcgttgcagacgttcaataagccatgccgtggtggcagttttgccagttccggtagcgcccatgagcaccacatcgttctcaccgttttcaatgcgttccgcaagctcttcaatcgctttaggctggtcgccgctcggcttatatggcgatttgaccacaaacggcttgttcgtgcgttcaatattgaatcccatacctacctcgcttccgtgcgccattgtttcattagcatatcaatatgctcgaacatttgttccaacgactgtgtggaatcgatgatctcatcggcaatggcaagacgctgttccacgctggattgatggttcacacgattccatgcctggctttcgctcatgcctcgcgttgacatcattctgctgaccctcacctgttcaggcgcttcaacagttacgatatggtcgaattcaaaaggaatgctgtcaattacttcggcgagtaacggtatgtcatgcaccactactgcttggcaatcaacttcaacagcctcatgttcgagttgcactgcaagttcataaatcagtggatgctcgattccgtccagcatcttgcgttttcgttccgcatcagcgccggaaaacacatgctctgccatccacgctcgattgagctcgcctcgatcggtcaaagcatcggagccgaaacattccactatacgctgaaggccgatgctgcctggttccaccacttgacgcgcaagcagatcataatcgacaagtactgcaccaagctcacgcagtcttgcggataccgtgcttttgccagccgctatgccgccggtcaatcctattcgaatcaccacaaccgccattgtaatgcgcttcgcatgcgcgcttgccatgcacatacgaaaagaccccgaacctgaatcaggaacggagtcttttctaaaatctagcctgagctggattggatcctagctcaggatacaatcacttgccgagcagctggtcgcgcagagcggcgagctggtcggagtcggcgagggtgccggcggaagtgttctcggaggagtagttggaagacacctcttcgaccttctcttccttcggagcctggccatcttcagcggcggaagcttcagcgttctcgagctccttggccacaaattccttatgctgctcccacagatcgtgagcggtggcgtactgggactcccactcctcacgctgcttctcgtaaccagcgatccactcgttggttgccgggtcgaagccttccggatacttgtagttgccctgctcgtcgtactctgccggcatgccgtacagagccggatcgaagtcctcggaagccggatcgacggagtcgttggcctgcttgagggacagggagatgcggcgacgatcgagatcaacgtcaatcaccttgacgaagacttcttcgcccggcttgacgacggtctccgggttctccacgtggcggttggccagctcggagatgtgcacgaggccttcgatgccgtcttcgacggagatgaagacaccgaactggacgatcttggtgaccttgcccttgacgatctggccaggaacgtgggtgcgagcgaagcgctgccacggatcttcctgggtagccttgagggacagggagatgcgctcacgatcgaggtcaacgtcgagcacctcgacggtaaccttgtcgccgaccttgacaacctcggacgggtggtcgatgtgcttccaagacagctcggaaacgtggatcaggccgtcaacgccgcccagatcaacgaatgcaccgaagttgacgatggaggacacgacgccttcgcgaatctggcccttcttgagctgggacaggaaggtttcgcgcacttcggactgggtctcttcgaggtactgacgacgggagagcaccacattgttgcggttcttgtcgagctcgaggatcttggccttgatggtctggccaatgtacggggacaggtcgcggacgcgacgcatttcgaccaaggatgccggcaggaagccgcgcagaccgatgtcgacgatgaggccacccttgacagcttcgatgacggtgccttcgacaacgccatcggcttccttgatcttctcgatgtctccccaagcgcgctcgtactgtgcacgcttcttggacagaatcagacggccttccttgtcttccttggtgacgacaagggcctcaatggtgtcgccgacctcgacgacttcgtccggatcaacgtccttcttgatggaaagctcacgggaggggatgacaccctcagtcttgtagccgatgtcgagcaggacctcgtcgtgatcgaccttgacgacggtaccttcgaccagatcaccatcatcgaagttcttgatggtggaatcgactgccttgatgaagtcctcttcggtgccgatgtcgttgatggcgaccttggcgacttcgttattgttctctgccattaatttggtttcttacaaatagtgggtggataaaatcggtcttcaattatgtgcgtgcgatataacacacgcaaggcgtaagtttacatgggaccatgcacaaaaaaggcgtgccgcaacccgcgacacgcccgaaattacttcatattttcacacacagagcgcaattacagctgacgctcggccatctcgaccacgttttccagcagcatggcgcgggtcatagggcctacaccgcctggattcggcgtgtatgccaaggccttctcataacaggctttatcgacatcgcccttcacgcgataacggccgacctcctcgtcgaacacgcgagaaacaccgacatcgaccaacaccgcgccttccttgatatcttccggcttgacgaaaccggcggagcccatggccgcaacgatgatatcggcctcacgcatatgcttgcgcacgtccttggtgccggtatggcacagcgtgaccgtggcattcaccgccttgcgagtcagcatgagaccaatagtgcggccgatggtgatgcctcggccgagcacgcagacctctttgccgtccaggtcaatgtcgtaggctttgagcagttcgatcacgcctcgcggagtgcatggcagcggagtagtgatctcgccgcgcgcatgcaacacgagttcgccaagattatatgggtgcataccatcggcgtctttcttggggtcgatcagatcgatgatggcgttctcgtcgatgcccttcggcaacggcaactgcacgatgtagccggtgcaggcaggatcggcgttaagctcctgtacgacttcggcgatttgttcgaatgttgcgtcggcaggcaactccttcttaatggagttcacaccgatttcagcgcaatcggcatgctttccggcaacatatttgacggatccggcatcggaaccaaccaggatagttccaagaccggggttaaccccctgctctttcagcgctgcgactcgctcggcgagattcgctttgatctgcgcggacaccatctttccatcgattttcaccgccatgccggccactccccttttcgttgtctcattgttgtattggcatttgcatgtatcgtaggctatcttggtttcagtcgtaagtcgcacacgtatttatgagatgaacacgattagggcggttcaggaagagggcaatcgacatgcgcttgcacaaacgttctttgttacgcgctttcgctgcgggaatcgcgctttgcgtggcgttcggcacggcagcatgttccggagggtcaacttcgcaggagaatgacgcctccgccgactccgaaaccccaaccgaacagatcactccaatcgaagtggtcgcctcggtcaatcaatggggttctctcgccgagcagatcggtggcgtccatgtgaaggtcacgtcggttctctcttcaaccgatgtcaatgcgcatgatttcgagccgaaaaccgacgatatcggcaaacttcagcaggcacaggtcgtagtgtccaatggtgccggctatgacacttgggccaccaagaacctcagtaagaccatggtttccgtttccgcagcacaaatggtgggcgccgtcgagggagacaatccgcatttatggttctccagtgacgcccgaaacgccatggccaaggaattggccgacacatatagccgcatcatgcccgcgcaaaagaaatatttcaacaacaaactcaccgcgtggaacaggcgggagaagaaaatagaaaaggacatgaaggcgttcagcgactcgcataagaacgtctcctacgccgccaccgaaccggtggcctactatctgctcagcgacatggggttcaccgacaacacgccggaggggtatctgcaatcgtccagcacgaattccgagccaacccccaccgatcttcaggaatttcaggaattgctggaaaagcataaagtcgaggtgctgatcaacgacacacaatccacaagcgacgccacgaacacgctgaccggcattgcttacaaatccgacgttcccgtgcttgatatcagcgaacagatgccctccgattacaccagcctgacatcgtggatccgcgctcttatcctgtcgttgaccgatatgttcgatgaacaatccgatgccgacgatcaggatgcaacaagttccgacagcacgtcggaaaacgcggattccttggaatcaaccgcagattcctcgacgcaagacaacgatcagacaacgaacggatcgaacgatgcgccgcaaccaaatccggtgaaatgattgttcggcaaaagcgattgccgaacaatcgatcggtaatcgcttttgccaagaccatcctgcgtccaactgaatgcgggatggtcttttttgtttgcctgacgttttgctttttacgcaaagcctctcgtctgatcgttacgacggtttcaacgacaatccttattgagaatgattgtcaacaccatttgcgagtatgtacgtgcattcaaatcaaggagaagccatgcacgacgagacacctgcctgcatcgaattcgacgacgcctgcgtcaaacgaggcggtcacgtcatctggcaacacggcacgttcagcattccgcaaggctcggtaaccgcaatcgtcggtaccaacggcgcgggcaaaaccaccatgatgaaggccgagctgggattgattccaaccgcgcacggcagcatcaaggtactcggacagcctgcaggctccgcaaaccggcgcatcggctacgtgccgcaaagctacgcatccgacatcgaatcgaacatcaccgcggaacagtcggtgcttctcggcttgacgggaactcgattcggcattcatcccgtcaccaaaacacttcgcgagaaagcccgcaaggccatggacttcgtcgagttgcaagacaaagcgaattatcgcctatccgaactttcgggcggactgcgccaaagggtcgccatcgcgcaggcgctcgtggatgacccgaaactgctgatgctggacgagcctctcgccaaccttgatctggcgagtcaacgcgccactgtgcacgtactcgccaaactcaaccgcgaactcggcatgaccatccaagtggtggcgcacgaccttaatatgcttctgcccatcctcactggagccgtctatctgcttgacggacatccacactatgcaggcatgaacgaggtgctggattcccatctactcacgcatttatatggcacgaccgtacaggtggtcaccactccgcaaggagatatgttcgtgacgccaagcgaggacgagtctgaaaacatgagcatcgatgcgcatgctccagaagaaatcgcgcaatttcaccatcacagccacaccacgcaggaggactgagcatggacggtaccgtattcgctttcgacccggattgggtttccacgctcaacgccccattcatgacgaacgcgtttctcgccggcctgtgcatcgcattggcagccggcgtgatgggttatttcaccatcgccagacattccacattcgcagcccacgccttggcacatatcggactgccaggtgccaccggagccgtattgctcggcctgcctgtttccgcaggtcttggcgtgttcgctctcggcggagcactggtgatcggcgcgcttggcaagaaggcttcacagcgtgagatcgccactggaaccgtactcgctttcgccaccggccttggtctctttttcgcacgcatgtcaagctcggcttcgcagcagatgcagtcgattctgttcggctcgattctgacgatcaccgacggtcagatcattggtttcgcgattttcgacgtgctgcttttggctgttctggcagtgatctaccgcccgctattgttcagttcgcttgacgagcaggtggcacaggcaaaaggcgtgcccgtcggtttcatgaacatttgctttatgacaattatggctggcgtcattaccattgccgttcccgcagtcggcacattgctgatcttcgcgttggtgatcacccccgccgccaccgccaacatcatcgcccgctcaccattcaaggcgatggtcgtcgccacggtgatctgcctgatttcgatttggggagggctcgtgatttccgccatgttccccgctcccccgagcttcatcatcgtgacaatttcgacgttgttttgggcggttgcgaaggctattgaatccttcaaaagaaagtagcagaaagaagtatcggaaagccgtcagcgggcgaaatcagactgcctgacgagtcgatggatcaacaggttccaccaaagcatcggcaatcgcggcgacgccttcgcccgaaccagtgaatcccatgccatccgttgtggtggcggtcatggacacctcacaacctatggcttcagacaacgctcgttcggcttcttccctgtgttttccgattttcggccgattggcgatcacgaccacgctggcactcactggcttcataccacgttcgttcagataatcgaccgtggtccgcaacatttcggcgccatgcttgcccgcgccatcggactgcgagccgacaccgaacaaggtgccgatatcaccaagaccggccgcggaaagcaatgcgtcaatcaacgcatgagcggcgacatcgccatccgaatcgccctcgatgccatcgccctcccaacgcaaacaggcaagccataacggcttgcctgcatcgtgagatgcgaatcgatgagcgtcaaaaccctgaccgatacgcatgaaacgccttacctcttcttggacttcttgctttcggcctcaactcgggccagcgtatccatggcagcctcctcgggagcctcggtatgatgctcctcatcgccgggctgggccggctcatacccaaggttcacgtccagcaaacgctgggcctcggcttcatcaaggtgttcggacagcgaaatctcggaagtcagaatgctacgggccttggtaagcatgcgcttctcaccagccgacagaccatgctcgtcaacatcacgctgcgcaaggtcacgcaccacttccgcaattttattgacatcgccggtggcgatcttctcgacattcagcttgtagcgacgagaccagttcatctccttctcaatgatcggagtgcgcagaatctcgaacaccttggccacttcgttggcgtcgacgatatctcgcacaccaacctttttggcattatcaacaggaacgttgatgaccagaccgtcagacgaaagcaccgacagctgcagatattcgcgggtgattcccttgactgtccgttcggtgatggcctccaccttcgcagcgccgtgacgtggatagacgaccatgtcgccgaccttgtaacccatgaatcctccgtgaaaagcttacacaaaacccgaattattgtgccatcaggggtggacttggacaaaaacacttgaaaaacggaaaaataggcgcgacacgggccacttttcttccgtttcatgcttacacttttgccatggctacagaatccaagatcaatgaagatgtcgttgctgttcctgttccccagggcacactggatgcagtaagcaacggtacgttctacaatcctcacgaggtgctcggcgggcacctcggttccggcaagcatgcggatgtcgtcacgatccgagtcttgcgtccgttggcaaaatccgtgacgattatcactgaacaaggtcaaacgctcgcaatccatgaatacaatggcgtcttcatggcactcgttcccgccgccgcagcagaagagggttacggcgtgccagactaccgtattcgcacggagtatgaagacggttccgttgtggtgtctgacgatccctatcgttatctgccgaccatcggcgagatggacatgtatctattcggcgaaggccgtcacgagcgcctgtgggaggcacttggcgcacatgtgctccgctatgacgatccgatgggttcttctgaaggcgtagatggcgagcaggtggttggcaccgcgttcaccgtatgggcgccaaacgcgcatgccgtgcgcgtggtcggcgatttcaatggctggaacggacgtacccacgccatgcgcgaacttggttcttccggcatttgggaactgttcatcccaggcattgaggccggcgaaatctacaagtatgaaatcctcaacgccaataacgaatggaccatgaaggccgatccgatggagcgctcccacgagattccgccgcgcaccggatccatcgtggtcgaatccacccatgaatgggatgatgccgattggatggccgaacgcgcggccagcgacccgcataacggaccggtcagcatctatgaggtgaacgcctccagctggcgcaaggacgtgaacgactaccgtgagcttgccgacaagctggttccctacgtgcagaaggaaggcttcacgcacgtggagttcatgccgttggcggaacatccgttcgcaggatcctggggttatcaggtgaccggctactacgcgatcgattcgcgtttgggcggccccgacgatttcaagtatcttgttgagaaattgcacgaggccggcatcggtgtgatcatggattgggttccggcccacttcccgaaggacgcgttcgcactgggccgcttcgacggcacgccgttgtatgaggatccggatccgactcgtggcgagcacccggattggggcacgtacgtgttcaatttcggacgtcgcgaggtccgtaacttcctggtggccaacgcctgcttctggctggatgagttccatatcgacgcgcttcgtgtggacgcggtctcctcgatgctgtacctggactacagccgtgaggccggccagtggcatccgaacatctacggcggccgcgagaatctcgaagccatcgacttcctcaaggaagccaacgccacggcatacaagaacaatccaggcatcatgatgatcgccgaggaatccacggcttacccaggcatcaccgcgccgaccgacgccggtggtttgggattcggcctcaagtggaacatgggttggatgcacgacaccctgcagtatctgcatgaggagccgattaaccgcaagtggcaccacaacgagatcacgttctccatggtgtacgcctattcggagcattatgtgctgccgatcagccacgatgaggttgtgtacggcaagggatccatgttcggcaagatgccgggcaacgattggcagaagtatgccggtgtccgcgcgctgttcgcctaccagtgggctcacccgggcaagaacctcaccttcatgggcaatgagatcgcccagtacggcgagtgggatcatgacggttccgtggattgggccgcgcttgaatggccggaccaccagggtgtgcaaaagcttgtcgcggatttgaacacgctgtacaaggcttcccctgcactttggagccaagacttcgacccggccggcttccagtggctcaccagcgatgacgccgatcacaacacgctcagcttcgtgcgtatcggcaaggacggagagcaaatggtggttgtggtgaacttctccggcgaggcatggaccgactatcaggtaccgctcaccaagggcggcaaatggaccgaagtgctgaccacggatgatgagatctacggcggttccggcattcacaatggcacggtcgaagcgatcgaaggcgaataccattcacgtgattggtccgcgaaaatcaccgttccggcactgggcgcagtattcttgaagccggaactctgagaaaggcggaaagctatgctcaactcatcagcacaacccacaacggctccacgcaccgttctggtggtcgaagacgagccgacactggccactgccatcgcgcagcgcatcacagcggaaggctggacggcgcgcgtggcatccgacggcgccagtgcggttcaggccgcgactacgttgcgtccggatctggtcatcatggacatcatgttgcccgtgatggatggtcttgaggccacgaaacgcatcgtggcggagcgccctgtgccagtgctgatcctgacggcacgagacgacgaggccgataaggtcatcggcctcggtgccggagccgatgactacatgaccaagccgttctccatgcgcgaactcatcgcccgttgcaaggcgttgctgcgccgtgtagatcgtgccaaggtcatcgccaaaaactccgaaaacgagaagcttctcgatttcggctccttggtcatcgatcccgcgcaacgtatcgtcaccgtcaatggcaagcaggtgcacctgacccctacggaattcgatttgctggccacgctggcccgcaagccgaagtccgtgctcactcgcgagaaactgctcgaggaagtgtgggattgggtggatgcttccggcactcgcaccgtcgattcgcacgtcaaggcattgcgccataagctcggttcgaagaccattcgtaccgtgcatggcgtcggttacgcgttcgaaccgccagaagtccaagactaatgcgctaaaattcggtggtatgcgtactaccgatacaaaaccagggcgttcggtgaatccattggaaaccgaacgtcctattggtttgttctcatcgctcaaaattgaattgagcgttctgatcaccatctccaccgccattgcgttcatcatggcgtggttcctgctcaaagtagggctcagcgtatggatcgccatgcccattaccctcgccgtggctttaggaatcacatatttcttctccagaggactcacctctcccctgcgccaaatgcgcgacgccgccgaagcgatggcagaaggcgattacaccgtgcgcgtccatgtcgactccaatagtcgcgatgaagtcggccagctcgccctcaccttcaacgaaatggcggaagagcttcagcatgccgaccagatgcgccgggacatggtagccaacgtaagccacgaattacgcacgcccgtatcagcgcttcaagccatggtcgaaaacatggcggatggcgtgatcgaccctacgccatcaaatctggaaagcatcctcaatcagacgcaccgcctgtccgatctgatcgcgttccttcttgatctttcccgcatggaagccggcgcggcaagcctgcaaatcgaaatgttcaatttcgccgattttcttgacgaaaccgtggaacctttggaaatcgccgatgccgggcatgcgcatgacatcgaaatgcatgtgcccgacgatatcgagatggcaggcgatcaggaccgcctgcgccaactgttcaccaatatcatcgcgaacgcgctcaagcattccgcggacaataccacggtgcttatcgaagcacacgaaaacaaggatttcggcaccatcgtcaccaatgtcgtcaatttcggatcgcagattccgcaagaggcgcgttccgacattttccgccgtttcgtcaaaggaaaaacaggtccgggcaccgaatcgggcggaaccggcttgggattgtccatcgcacgttgggccgcccagttgcacggtggttcggtgagggtcgtcgatgacccgcgtggagccgattttgaaatcattctgccgaaataccatgttacggatgacgaatagaggatttctcacgtcactgcacttgcgtgcgtgaccatgcttgcgttgggccaaccttctgcgttcccgccggagtgtgagccaaagcaagcacggtcacgaccgtagcaccctccttccgcatcgtttcgacgcaactgcgcatggtcgcaccggtcgtgacaatatcatccaccagaatcaccatcgtattgcgcaaggaaaccgaaggacgcaccgaaacatgccccttcaaacgttgcgaccgttgcgccgcaccgctggtctgcactgatttccctttgacccccctgttctccaacgcgtcacgcaccgtcacctcgcagcctgtttcctcccgtagaaaacctgccagatgtttggcgatcggcatcatatgtttacgtccgcgacgacgtattgaagcgggagacgaaggcgcgggaaccacaacaacatcatggcatgaaccatgcctatcacgaacgaagtcaataacgccagacgcttttgcaagggcgcatatcgcatcggcgaacgcacggtcacattcctcgtcgccgtgatccttccacgcgagaaccgcctttctgaccgtgccacggtaccatccgcatgcgaaccagcgttgcatcgccacaccgtcaaacgactgtgcggtcggctgggaaaacaatgccctgcaagcttcgcatagcacttcatccggtttgtcgcacccggcgcagccccggggaaacagcagattaaccaccatcgagcatgccctcgccattgagttcatgcgaaacctcccaacaggttctatcgcgatagactggcgatgattccaccgcacaatttcacggtatcgttcggacaggtaaccttcaccgccctggtgcctgcctttgccgcgggataatcgttaccatccggatccatacggtctcccacaaaaacaatctgcgccaccgtaatgccgagaatatcggccaattctcgaacagcgaacgacttgtcgacgtttttttcggagatatcgacgctgctggcgccgcccggccgtacctccaaatgcggtagatcggcggcaaccgctcgtgccagacgattcttcttctcgttggttggatcccacgcctccttggcttcgatgggcgcaagctgccctaatgcggagaatgtgatctggctgccacgatcctcgatacgttcaccccaaacgtgcgtgagccagataccctgttcgcgcgcattgcgttccaacgattcgtaagctttcgcacgatcatccgcgctgaggtcatgggcgaagaccggcgcccaatccgatccgccccaacggtagtatcgggtgccgctggtcggcataagatgcagatgcgaccgattggcttgacctgtcaaccgttccaccacctgacttttcagcaatgcatacttgccaccggtgatcaccgcgacatcaatcaacgatgtcaatgcggagaagcattcggccatgtcgtccttcattggctttttcgaccttgccaacgtgttgtcgagatcgaaggcgataaggcgtactccattgcacaattcctcgatatccacgtcgttccaacagggcacggaaatatccgtcatgatcgtttcctcctgtgtcgatgcaatgaacaatatgctatcgcatgattcgcgcaaggccctgatatggtagaagccatgtatcaattgccttgggaatcaacagtgtatagaaaccgtcatggtcgtgggacccgcactcccatgttcggtaccagacttccacgttatcgtacaagaagcggtatgttcgacgacatgctggtggctcagatccgtaggctcaacgatgcatggcccgaactggtggcaccggtacagtttgcggtcgaggatgttccgccatccgacccggcaccttgggaggccactgcgcacttgggctcgcagtctttccccgcggaacatggcattccgccgcgcgtcgtgctgtaccgtatgcctttgcaatcgcatgcgcgaagccgtatggacctgcaattcgccatccgcgacgaagtggtgttgcgcttggcggaactgtatggacgccgtcccgaagagatcgaccccgattggggtatgtgatcaacgcacgacggtcatgttctggttggccagcacctgctcgcgggcttccttcagatccgttgcgccgataatcgacactccggccagtttcgcatccgatacgtctttttggctgatacggatgttccacaccattgattggtccggatcggcaaagcttacggcggcaacgtctccatcgttgatatccgccagatcaaccgttgtcgaagcgccggattggagagcaatctcgcgctggtcaacagtatctccgacactgttataggacgtcaatgttgctgtgcgctcatcgcccgatatgttggtgatgcccacttgagccgtggcatggtcgggcacggccatggcggagacgctcatcggcactgaagcgttgaccaaggcgaaatcagcctggtcatcatcgccatcattggtgatcttcgcggcgacggataccggctcgctggcgctgatggtaagtccggtcgccgacttgggaaccgaacccaggtcgatgaccgaaacgcgattcgattcgagcgtctgctgattggttttcttcagaccttggtcatccgtccaagatacggtgacgtcggcctgccgaaacggatacacatacaggttgacggcatcgccttccgtgagtccgtcaatcgccaatgtttttgcggcaacagtattgggaaccgcataatccgatccttttgcaaccagaccatccatggctatggtgcgcaccacggccgcaacgggagtgtccacgctggacacggtaacgtacaaagcatcctgcccggaagctgctgcggcaaggttcagcacagattccttgcccgcgccaaccgtcaacgtcgaaccggtagacaatgccaaagcacccgacttgtcggatccccaaaccttgatgttcaccgacgtggccttagccgacggattggccacgaccagctgctgggtcatgcctgttttggtgcccgacaccatcagcgactgcttcaaagccggagcgacgcaggaagcagcggaaacgcctttcaaatctccctcagtagcccaagacatcaccgaagaggccgctcccgttccatcggaagccgacagcaatcgggtattctgcaattgggctccgtcatcgaccgtgccggacgccatgaaaatatcatcatccgatccggcatcatccttgttcaacaccaatgacgaagtggcttcatcagctccgagaagccctacggaagagcggaacaccgaaccgaaggacgcataacgcgccgacgacatgatattgccgttggacgcttgatattcgctgtctccatacgcatcagtatcagctatcgtcattcgtgctggacaatatgtttccagctgacgcggactgacggtacgggatacggatgaacgctgcgttaccggcgaatccgcatgaatccaagtcgggcggtagattacggccacggtcgccagtgcgacaatgaccaacaccgacactatggccagaattacacgccaaaccgttttggaacgggaatgtttgctcatgcttcctcctgaccgtgacgcctcatgcgcggaagcgcaaccaagcaatacgctgcgagaacaatacccatgcaccacagccatgcctgacgccacacactcgattcagcctgtcgatatcccttgcggtcgatatgctgcttggccgtatcttggatggtgagacgatagtatgttcccgcatcagtgcttacgacattctgcgtgccatcggaagcgctgatattggaactcaactgatcggttatctccttttgcgccttgtcttcgccggagcgcaccacatagatgcctccgaatcccaactcgctcaaatcggcgacggcgtcggaatcagcattcgacaacagctgcgcgcaatccttggcgatggccttgttcgcatcatcggaacgtccgaacgccacttcgacacgctgtgccggagagctgtcgatcaaatcacctcggcgggtgcgcatcacattgtagctgatggaaccggcactatccgcgcgtactgcgagcacacgcctcgcctcatcctgcgcaagatagtcggaagcaacaatcggcaaaccggaatcactggtcgaaaccgtgttatggtctctggcgacataatcaaaaccggcactcgccacaaccgacgccgcaatcagcatgaccagcacgattcgtgccgcacgcccggcaataatgccagtagaagcgccattcctctcaacttcgacatcgccggtgggcctctgccacagcatgacgaaacgttgcaccgcaccgcctgcgaccatgcacacgcaagacagcagtcccatcatcgtgaatgaaacgccgggaagcacggaaccggccacggcgccatccgcatcgaccgcaaccacaaccgcggcggaaagcagcgacgtggcaagacccgcgatcgccacgacccacatcatacgcgacacgcgaagcacgaatggcaggaacagcgataccgcggcaagaagcacaatcaatgccaacattgcagcagccacatactgccaaatctcgccggatacggcaacgccgaacgcacgggaaacaatatccgaaagatttgcgatcatcggatgcccatcatgcgcagacgacggcaatatcacactgccaaaaatctgacgccacgtacctgctcctgcgaaacgtaccgtgttgaccaatgtgggcgcgcatacggaagcggccggcagcggaatcagcagcagcgtcgttctatgggagcgtacaagcatcaggaacacaaggaacgacaacatcagcggcagcagcaattgcggttcggccgcgacgacgggaataaagcacaatgccgcaagcgccgcggcctgcacggaagcctgcggattgaccagatcttccgtacggtacatgcctacggctcggaaagaaaacgcgaaggccgcaggaagaaacaccatgaccgtcatcatcgtcacgtcggcatcgctgtacacgttcatcgacaatgcgatggcgaaccatgccaacgcgatcacgcaacgcaccgtgtcggaccgagtaaagattccagccaaagcccagaacgacagcaccatcaaaggagcggacaagaagaacaccacggcgactgcggtcgcaacatggccagccgtgaatacggaaaccaccatgagcaccagcagccaaggcgcgctcggggcgctgattcccgttcccgcggtatacgcccacgacgtggtggcggcatgcaccaactggctgaaactggcatcggtcggcagcaacgtttgagaatatatcgacgcgccggagaacacgctccgaagcacattccaatataggaagacgatccatgcgaaggcgatcaccgccgatgcgatggcaagcccccacctgcgcatgagccttttacgcagatgcgccttggcaagagggctgaggatcacagtgccacgctggtcaagaaacgcacgcttgcgatcgttccattggccgatctgctgacgagtcgtctgcaatgcggccaatgccttcaaggagaccctactctgctcacgcaatcgggcacgggccctccatgcgcccggcaagtggagcaacgaacgccaaggcagggccaattcgcaacaggcatggtatggctgtttgcgcgtcaggcacagcacggccagtcccaacgccttcagtatcgaccagatccacagcagcggccaccaagaacgatgcacgtccgtatacgcgtatttcgtattcgcctcgcgtaccgcaaggtacggatcgacgcggccttcctcatcttcaacaggttggccgtttttggaacgcacgccttcaaatcttgccctcctatgggcgattcgcgcctgcgggaccaccaccacacggccaccgcccaggcagatgcgcctgcacaggtccgtggattcggcgaacgtgccgaaccatggatcggcacccttccaagtacgcaaggtggccaatggaaccagcgcgccggaaagcgacacagccaacacatcctgccggccatcatactgttcctgatccggctcaccgtccaccaccagagacgtgacattgtggtgccccgcatacaaaccgacgttatgcaggctttccgcctgccaatccaactgtttcgcgccaagcaaagacgcagtcggcgtgtttttccaagcatcgagcaacacctcaaggcatgactcatcggccggcctggaatcgtcatgcaatgtccacagagcaccgacccggtcgtcaagatcgatctgttgcattgcacgagccacggcattcatgaatgaagaagcacccttcactcctacgagaatgacacgtatggtcttgctttcgggaacttccgtaagcacaccggcaggcgacgggataacgctaaacgtcatctgcataggctgctcaacctgattggtgcaatccgcaacgataatagtgcctggaagcacacgctgtgcgagcaccgcggcaaaagtggatgagaaaaaacgtagatcgctttgcgcggtaatcaccgcagccacggatgaatcggcatcctgccgatgggagtacggcctgctgttgagcagatcggtcacaattccctggatatcgctgctggcgttagaattcataatttcaagtgtacgcacagggtgtgccgtgcgttatgcccgttccttgtgttccttcttataccgacggcgctcacgttcgctcatgccaccccaaatgccgaaacgctcatcatgctcgatggcccatttcaggcattgctcacgaacctcgcactgggcgcacactcgcttggcatccctggttgatccgcccttttcaggaaagaacgcttccggatcagtctgagaacataaagccctatgctgccaggaaacatcatcatcgcttttgaacagaccccacagttccgcaagcggattatcggaggactcgtcgatcacgccccacatgcgtcctcccctgctatacgtatgcgcacttttagtcgtgttaaattacacacatgcaatttctttttgtcaagttttccgccgtgtcaatcactataattcgagaaaaatatggtacatggtacctccaagaacgacgggggcctgaagcagaatccgtgaaaatcggggaacatctctataatcccatgacagagtagtggtatgttctagaacgcgttgagatatggcgtgatcttttgtataaacaggaaggcgataccgtgaccacatcaccagccggcgataagcttcctaacgtcaatggactgcgagacgcaaagccgcgtcacagccttggctatcgagtgcagcatcgtgcgaggacgatagtcgcttcggtcatcgcggcgatgctggtgttctcgggaaccgcagcggccgcaacatggctggatgtgaatggcatcatcaaagaccattcggtcgaaatcatcggacaaggctcacttgacgccaacacctcgatcatcgatcccaactccggcaaacccatcgaattcgtactcatcgggcaggattcccgcgatggcgaagagaaccagtccgtcggaggcaacttcgacgacgtggtaggcaaccatcaggccgacaccacaatggtggcgcagatttccgcggaccgcaccaaaatcaatctcgtttccattccgcgcgactccctagtggacataccgcagtgcgaaacgaccaacggcacgattcccgcgcaatacaatgtgatgttcaactcgattttcgcgaacgcataccagaccggcggcgatctcgcttcagccgcaagctgcaccctgaatgcagtgaacagcctcaccggactgaacattcaaaacttcatcgtcgtggatttcgcaggactggtcaaaatgatcaatgccgtaggcggagtcgacctgtgcatcccacaggacgtcgacgacccctacaccagcctgcaactcaccaagggcctgcaccatctggacggacaccaggcaacgcagtacgcacgaacccgccatggtctgggagacggatccgacacatcacgaacaaccagacagcaatacctcatcaaacagttgatgaacgaagcgctcagcaagaacctctttactgacaccgcacagctctaccagctagcgaaatcagccttgcaatcactctatatctcgcaaggcatggccgataccgcagcgcttgcaggtcttgccatgagcctcaaggatttcaatctgtccaacctgtattcgcagaccgttccggtagtatccgcgccgtcggacccgaatcgttcggtctggaccgatgaggcggagacgctatgggagaagatgcgcgcggacaagccgatttatggttccgacgaatccgacgcgaacacggatgccaataccgcaggcaattccgacggttcttccgataattcgacggatggcgctgacaacacggataatacgggcgctgacaacacgggttcccaggaagccgcacagacgcctgatccggtcactggtctgatcacgcaagccgatggcacgcttatcgatccgaacaccggtggcaccgtcgatccggaagatggctccatccatgacgctcttaccgggcagtacatcggacttgccgatcgttacctcaacgcgacagtttgtgccgttcccgcaaagaactagaccgctttcaccgaatccgttcctacacggtgcaaatggtgtaggaacggatttctttttggaggatattgtatgagtgaagagaacggcggcaaggaccccatgcccgcaccaccgagcttcatcccgtccgcaggacggaagaagacggaatcacagcctcacaaatccacaattccttctcaatccggctctccgtcaattccgagtttttcgcctgccgcacagccagcgcgctcaagtgccccgcacgccagcaggcgtacagcgcaaccatcatccgtaactccatccggttccagcgctccacagagtttccgtcctgccgcaaactccaccagcagaccacgtaagtcggcatcatcgtctcctgcatcgtttgctcctgcttcagctccgaacaatcaccgtgcgtctcagcaggtacgaggatcctcctccatacccactggcatgccacgaacaacgcgacagaacacgcctagacaacctttgtccggcaatagcacaacaggattccaatccactgcgaaagccgtgctcccccacagaaagcgacatatggggcgggtcattctcgcgtttttccttgctgtgattctcgccttgggactgtcgatattctccgcatggaattgggtggatggacagctcaacaaacagtcttggttgacgaacaaagccgataccgctggcgaaagctggctgatcctcggttccgacgaacgcgaaggcaccgttggtgacgctggcgacgtgaccggtttcagaacagacaccattctggtactcaccaaaccgaaatccggaccttcctcactgatttccattccgcgtgattccttggtggaaatcgaccagagttacatgaaaatcaacgccgtcgcccaactgtacaacggcaaacaactggttaacgaagtcgaagacatcaccgggcaaaaaatcaaccacgtggcaatggtgcaattcgggggtctggtcaaagtggtcgacgctttaggaggcgtcgaattgtgctacgaccaggatgtaagcgatccgtactcccagttgaactggactgccggctgccataccgccgacggcaccaccgcgcttgcgttttctcgtatgcgttacgcggacgcgcaaggcgatttcggtcgtgcagcccgtcaacgtcaggtcatcaacgccatagtgaaaaagggcgcgtccaaggatacgctgctgaacttcggcaaggtcaaaaaagttgcggaggctgcgttgggctccgtaaccgtggatgaaaaggcttcgacctcatcgctgatgcgcatggctttggcgttcaaaagcgcttctggggatcaaggcatttcaggaagcgtttactggaccgatcccgactactacgttgatggtgtcggctcaagcgtgctcttggacgagggtaagaacctcgaactgttctccgaattggctaaggggacccatcgggctggcactgtaggcacgctcgccgaacagcaaagctgagggttgtggtcaggatgtggataaccatatcctccgaccacaaccctgattctcgcttgcgtccatccgccactgctgttcacaatgacggcatgaacagcaaaaccaaacgcaagcataccgatggattcaatgaggatcggctgatgctcatcagttggtccgcacctgtgctggcacagctcgtcatgcttgtcataatgatcgcgcaacggcaatggctatatgtggccatgcttgctcctggactcatcagcagcgcgttgtctctggcatccatggcgttgcgttccaatcagaagcagcagcatgacgaacctgtctccaccacctatgcaaaggtggtggagaccgcaaggcaaaacagccattcgccgttcgctgcaatgccccatatgtgtttcgagcggttctacgctctggacgaggacgcgctgccttggcgcaccatcacacgaacatggctttcctccacatcatcctgccctataggagtcacggagcatggcttgtttcgcacggatctgcaacgatcaggaccgcatgccatggtagcaggcaccacgggttcgggaaaatcggaattgctcatcagttggtgcttgtcgctcgccatgcaatacagccctgatgatctgcattttgtgtttttggatttcaaaggaggatcgacattcaacgctttggaacatcttccccacaccgttggcaatgtctgcgatcttgatttgttccacgcgattcgcgcgttgaatgccattgaacaggaattggtgcgtcgtgaggctctggtcagcgccgaacgtgtttccagattcgaccaattggtccggcctccggcacgactggttgtggtcatcgatgaattccatgcgcttcgagaccgtctgcccgactatatgcaacggctgaatcgtcttgcgtcacttggccgttcccttggcatgcatctgatcgtctgcacgcaatatcccatgggccaagtccatgccgacatgaaagccaatatctcgctgagcatatgcttacgggttacagaccaaatgcagtcgaacgaattgatcggcatacgtgacgcagcgctgattcctcccagcattcccggtgcagcctattgcaatgacggacaacacaccacacctttcctatgcagcgcggtccgcgatgtcaaccgacttgtccgcaatattggaacggccgcacgattccacgcctgcaaacgccccgatctcctgttttccgagcctctcacgcaacatgcaacgcaatccgatctttccatcccatcaaaccagtcatggcataacgttccctttgcgcttgccgacgatggcgtattggtgtataccgccattcttgacgtgagccaacagaatatcgccatcatcggtgcctacggcagcggcaaaaccaatctactgttgcattgcgcacgctggctatatgacacgggttgcgccaatattcgtttcacacgcaaaaccgaacatggcatggtgacggatgacggcaaacccttaccgtcgcataagcgaaccatctggattgtggatgatgcggacgaagcgcttaatcccttttcctctgcgcctgaagcgaacgaattgcgtgaggcgttggccaatcccaatatcacagtgattgccgcggtggaaaaacctatttccgcactgctggaccgatgtccgactcgtgtggcgttcccctgcggagaacgttccaacgatctgatgctcggcattcccggcgcaattctggacgggttcgcagccgacgactataccctcccaggtcgtggcgtgctcatgcaacaggccaaagcatgccctattcagtgcgtggaattccaaggtttttaacgattcgtgggattcttttcgcgaagactcttgaaaagtcgcgcgattcgtggttatctgagtaacggacttacatgccgtacatggcaagaggaaggcgattatatgagcagtgcttttgactggcgcgccaaggccgcatgccgcgacaaggatccggagctgtttttcccggtcggcaatacaggcgccgcctatcagcagatcgaagaggccaaggccgtctgccgcacctgcaaggtgattgacgcgtgcctgaagtgcgcgcttgacaccaatcaggattacggtgtttggggcggtttgagcgaagacgaacgtcgtgcgctcaagcgccgtgccatgcgtgcccgccgctcccaagccatgcagatgcagatctgaaattttcaaagatccatcattgcatacgctctgcgaatagcgacttacaacgaaaatgtccggttgacttcccctggtcaaccggacattttcgtatctttcctatcgttcctgcgccgcacgcagcttcatatcgagcactactcgggtgccaccgccacgacggggctcccaacggaccgtgcctccgaaatcgttgttgacgaacgtgctgatgatctgcgttcccaaaccggatccggaggaacgtgccataccatcatgctcctcattggccaagcccgtgccatcgtcttcgaccacaacattgaggttgttgccaccgcgtcccacggaaatcgtgatatgaccttctttgcgaccttcgaagccatgttccacggaattggtgatcagctcggtcagcaccaatgacaacggcgtggcatcctgcgccggcatcatgccgaatctgccgatgaagtcgatgtcgatatgctggtcacgcatggtggccaaatccaccgccatcttcaacaggctggaaatgaccttgtcgtaatcgacgatttcatcggcggtctggctcaagccttcatggaccatggcgatggtttgtacacgacgctgcgcctctttcagctctttcttgacctcttcggacttggtcttacgtgcctgcagtcgcagcaatgcggaaaccgcctgaaggttgttcttgacgcgatggtggatttcggaaatcgtcgcatccttggtctgcagttccttttcacgacggcgaagctcagtcacgtcgcgacatagcacaacagcgccaacgcggccattggcatccatcaacggcagcgaacgcatggacaccgcggacttgttggcatcgagttcggaatcgacggcggctttgccactgagcaccagaggcaaggtttccagcacgggatcgttctcgcgcagcaatttggtgccgatttcgctcagatactccccctgcatggtgctgaccgatcccaaacgtcggaagcagctgatggcattcggcgaagcatatcgcacgataccttcgacggtgagcacgatgaagccgtccgccacacgcgcattgtgacgctggttcataatcggattacgatatgggaactgaccgcgaggaatcatctcatacagctgcttacctgcgctgatgctttcggattcgtaacgtccgttcgactcccgggtggccatattcgtctcacgtaccaccaagcccagcgtcttgccattatgacgcaccggcgcatacacattgcacaccgtggactcgcccacagtgcggagcaccgtggaacggaacaccgattcggaagccatcgcggcatccaattcagcgctcatttcctcctcgacaacgtcgccgaccacatcgtcggccctcaggctcatcaccgtggatggacgacactgttcggcaataatgtatttgccctcgccattttgcagaatgagcagcagatcagcaaaactcaggtcggcgatcacctgccagtcggcgaccagatgatgcagccattcacgatcttcgtcatcgaaatcgggacgggtcgtcaagatatgtgagaaatcagccatgcgctccatcatacgcatcacaccagaggttttgcacgacacgacgcatattgcaggaaaagcaatattgacatatccatgagttacggtaacgtaggttacggttccgtaacttacagtggaggcacacagatggcgaaacccacagacgtagagatcgaggaaaaacgagcgatcatcgccgaggcacgcgaacaggcccttcaagccaaggccgatattattcgcgtgaaggcacgcaacaaggccgagaacatccgcaagaaggccgacggcaaggcgaaaatggctatagccaagggcgaagctcgtgccgcgaaaatagaaggcatcactccggcggagatcgaacgtaagattcgtcttgacgtgcatggtcgccccaagccggcgatgcgcggctggattcatgccgtggccactcctctggcattggcggccggcatcgtgctgatctgcctggcacacggtaccggtttgaagtgggcctgcgccgtgttcatgacgtgttcgctggtattgttcggcaattccgcctgctaccatttgggcgattggtcacctcgcgtcacggatgtgctacgacgcatcgaccatatgaatatcttcctgctgatcgcaggcacttatacgccggtctcctttgcactcgaaccgttctggcgcaattcaatcatcgcgggcatgtggatctgcactaccgtggcgctcatcattcacgtcatctggatcagcgccccacgctggctttacgtgattgtgtatattattttcggtgtttccggagtggcattcatgggattgttctggatttcgccatatgccggtccggcggttgtggtgctgttggccgcaggcggagcctgctatatcgccggagccatcgtatacgcgctacgtaagcccgatccatggccgaaggtgttcggcttccatgagattttccactgcggcaccgtcgccggttacgcatgccatatggtggcgatctacatggtgatcgtgcagctatggccgtaagttcagatcatatctgattgcagtttgacgaaatatacgaaaaggctggttcatccgttgtattcgatgaatcagccttgtatttatatcgctggaatatcagattcagcttatgacgaacatcactcaggcgagcggcttggcttccttgatggtcacggaaatctcacgtccgttcggagccgtatacgacaccgtgtctccctcgtgagcgccgttgatggctgcgccgatcggggattccgggctgatgatgctgtagtccgtggcgatggacaggtcacgcgtgccaagcacgtagaccatttcacgtccgttgacatccagcgtcaccaaagaaccgtcgccgacttcgccggccttgggcgcggtcagaatcttcgcgttgcgcagcttgacggtcagttcctcgatgcggccctgatttactcgctgagcctcacgagcggcctgatagccgccgttttcgctcaaatcgccctcggcgcgtgccgcggaaaccttggaaaggatttcgtcgcgatactcgccttcgcgccaagcgagctcttccttcatcttgtcataagcttcctgcgtcagcagaagcgttttttcttcggccatgttgcctccttgaccttggaaattactctatgccgcttagtttcagcgggtggagatgatgtcgatcacgaacaccagggtgtcttcgccgccgatgccggcctgcggaacgccacgggaaccatagccatactccggcggaatggataccaccaagcgggaaccgacgttgtgccccggaacggtctggtcccaacccttgatgacctggccgacaccgatgccgaagctggccggctggtgacggtcgaagctggaatcgaacggggtgtctttgccccagaccacaccgtgatagttaacggtgacggtgtcgccgcggcgaaccatcgggccattgccctcgagcagctccacaaccttcagacctgccggagcggtctcggacgggaattcgatggtcgggcgatcgccgaactcaacattgacaacgggcatttgagatgccatggtgaacctccttgaaaagcacaatgccacctagactagcaccaaccaccgctagcattcaacgacattgaccgccaaaccaccttttgaggtttctttatacttggacatcatgtcttcgcccgtgtctttcatggttttaatggcctgatcgagggtcacgatatgcgttccatctcccagcatggccatacgaaccgcgttgatggcagtgttcgcagccatggcgttgcgttcgatgcatggaatctgtactaaacctcccacgggatcacaggtcagtcccagattatgctcgatgccgatttccgcagcgttctccacttgctgtggagtaccgcccatcaccgcgcacaaaccggccgcagccatcgaacatgccgtaccgacttctccctggcatccgacttccgcaccggaaatggaggcattgcgtttaaacaggtaccctaccgcgcctgcagtgagcaggaaggtaataacaccctcttcgttcgcatggtcaacgaaatgccagtaatagtgaagcactgccggaatgattcctgcagcaccgttggtcggtgcggtgacgattcgcccaccgccggcgttttcctccgacaccgccaaagcgaacaaatccacccatgccgcatccgacgattcgagcaccgcatccgcgcgtttcttgtctcgcgcaagcacatcactgttcgaggcaagccttgcatacattttcggtgccctgcggggcgcattcaaaccgccgggcaacacggtctgcgacgtatggcatccgtgctgtacgcaacgacgcatcacccgccacacgttatccagttcgctgcgaacctgcaccgccgactgcatggccgtttcgttggcccacacaatgtcggcgatactcatatggtgcttctcgcataatgcaatgagatcgtcgcatgacgtgaatggatatggcacatccgagccgtcatcaagtgaggaatcactctgctgatcggcgaaagacgttccgatcggcggacgctcatgaatgccgatcatcagatcctcggcattgccttgccgtacgaagcctccaccgatggaataccagacctgttcatcaacaagattgttctgctggtcaaatgcctggaaacgcatgccattagggtgcgcggccaagcgatgccacacgtccatcaccacatcatgcgcatagtcgaaatcgatgcgatgcttaccggccagcagcagttccccactcgactcgcattcatgacgaatgatgttcacatggtccgtatcgacggtttgcggcatgttaccttccagacctgccacagtcgcgcgatcggtaccgtgccccaaacccgtcaacgcaagagatccatacagtaccgtacgcacacggctcacacggccaagcgttcccgtatgttcaagcgattcgacaaatttgcatgccgccaccatcggaccaacagtatgtgaggaactcggtccaacgcctatcttgaacatctcgagaatactgaacataccaatcgtcgccttgcttctcaggtgccttgctcaggctgcatacaatgcacggaacatgagaatcataatgatcaaaccaatgatggcggccgtaacttccaccaccagcatgataatggccgtggttttacgattgccgagtttaacgtcaagtaacttggcgaacaggaaggcgacgaaaccaagcgctgcgccattcaacgcaatcgcaccaatctggccattggtgagcacactctcccccaccatggcaagcacggaattgatggtggcggagaacaccagcagactccacacgccgtaaccgataagtccaacaatcgcatatgcgaacggtcgaaaccgttcacgcattttgatcgtaaacgattcggcgcaccacagcaacgcaaagcccacaacgaacgtgaacgccactgccatgaacaccgcttccatagcccatggaatcaatgccaacgacgccttcaacaacgagaaatacagcggagaacaagccagttcgcccacagccaaaactcctgcgacgataatcgcttgggagagcatcagcggaatttccgtatcgggctgttcgattactggcttgatatctttcgacgtcatactttttccgttccagtcggctacttggggttatcaatgccgccagtgtaataacggattgtttcgtacgtgctatccagcaatatttcacaacgtcattcggtgccgccagcgggaatcgaacccgcaatccgaagagaccgattttaagtcggttgcgtataccagtttcgccatggcggcaaggcatcgaacaagccgacgcccaagtcattatgccacgttaacgttcggcaagcaatcgcgtgccgtaatccaacacaatgccatcaagcaaaccgtgttcgctggccatgaaggagtcgatatgctgaccatggtcggcataggccgcttcgctgactttggcgagcacacgattccacaccagtgcaccgccaccgaccacgtcaacacgacccgggtgaatggttttgtaggtcaggcgctcttcgcgcggcatcgtaaggaacttgttatcgaccgcataagcgtcttccagcgagcagctggcaccatccaccgcggaatggtcgtattcggtcaatcccatggccagagcggtcatggtagtcactgtgccagacacgccgatgatagtgcgggttttgcctgcaggaaccgttttgaacgcttcatcgatatgctcgtcgatgtcggcaatggcctcttgaatctgcgcttcggtaggcggatcgttcttcaagtggcgttcggtcatacgcaccgagccaatgttcatggagaacgcggcctgcacctgcgtgttcggatggcttacgccatcgccgccaagcaccaattccgtagagccgccacccaaatcaaccaccaaatacggagcttcgacgtcgcgacgaaccacgctcgtggcaccaaggaagcttagatcagcctcttccgtaccgggaatgacttccggacgcacgccgaggatctgctcgatagtgtcttcgaattcctcacggttctcagcatcacgagtggccgaagtggcaacgaaacgaatgccatccaccggatgctttttcagcacctcggcgaattcgcgggcagcggcgtaggcacgttccaatgcctcatcggcgaaacgatgcgtcttatcaacatcctgaccgaggcgaatcacacgaagaatacgcggaacaatatcttcaacgccgtcttcgctgactcgggagaccttcagacgaatcgagttcgtaccgcaatcaatgccggcaacagtaacggatttcattgcttcttctttctgtctgaatatggttcagtcttcgttttccaccgtgcaacggcatacattggggtcgaattcatgacgaatcgcctccaatgccatgtctccgatcggattggcgccctcgcccatcaccagcgtttgcgccagcaaggcgtgcagacacttgatgcgaacaggcatgccgccggcactggtgccttcgatatgctcttcgctgtcttccatagcaacggcgatttcatgccggaacgccaaatacagttcgtgcgcacgctcgtaggcggctttcagatcgtcatcttcagccaaaagatcgttgtactccttcatcttgccttcggcttcgatgtgggagatggctttcaccgcttccgggccagtcaaatagcaagtggtagggaaaggcacacctcccggcagcagcggacgcgtgaccacagccaaaggcctgccgcacacgcaacgtgctccgacagccaccatgccacgcgggtaacgacccagctgacgctcgaccacagcaatatcatgctcggtggcaggctggtcgagaaccttcttcgccaaggttttggcctgttcgctgattgtcataccctgtgtcactcctgctgatctcctgattgctgttggttgttgtcttgtgaagtctgctgctggccaccggattcctggcttgttccattcgcatccgattcaccggttgacgtactttcggacgtttccctcgatttcgatttcacttcgtccgattggtcggcttgtttgaacgaatacgccatttccttataccaaggcagtacggttttctgcgattcatccgtcttttttgcatcttctgtggtttcgccggtcaccgcttcgggatgttccacacgaatcgcctgttctcctggaaatacgaatcccagacgatcccttgcctgcgctgtaacgtaagctttgtcatcccaacgcgcaatgtcgttttccagttcctgcttttgcgctatcagcgcagcttcctgcttcttcaagccattcaattcagccatattcagcgcataggtatggaacgtcgacgccagctggatggatcccaaagccacgataaataccgccacaaagaacgcgatggggccagcgctgccccttctggatgctttcttgcgtgactttgaactcatagcaatgaaaatacccgccgcgttcgacgaggaacacgacgggcactctacatcagcgcatattcgatgcgcttacgctcacttggcgatgtacttcttgcaggccttgaaagcgctgtagccagcatactgagcggtggagccgagctcctcctcgatctcgagcaggcggttgtacttggcaatacgctcgccacgagccggagcaccggtcttgatctggccggtgttctttgccacagccaagtcggagatggtggtgtccggagtctcgccggaacggtgggaaaccatggaggtgaagccgttcttggtggccagctcgatggcgtcgagggtctcggtgacggtaccgatctggttcagcttgaccagcagggagttggcggcgccgagctcgatgcccttagccagacgtgccgggttggtgaccagcaggtcgtcgccgacgaactgcagacgatcgccgagcttggcggtgatggcagcccagtcttcccagccttcttcctggaacggatcctcaatggagacgatcggatactcgttgatgaggttctcgtagaagtcgagcatgtagccggcttcacgatcgtcgccttcgaagtggtacttgccggtctccttgttgtagaactcggaggaagccacgtcgagggagatgccgatctgcttgcccggctcgtagccggcggcggagatggcgtccatgatgtagttcagggagtccttgttggacttcatcttcggagcgaagccaccctcgtcgccgaggccagtggccaggccttccttcttcaggacgttcttcagggtgtggtagacctcaacgcctgcacgcagagcctcgctgtaggtgtcgaagccgtacggggagatcatgtactcctgaatgtcggtggcgaagtcagcgtgagcgccaccgttcatgatgttcatgttcggaaccggcaggatgtggccgttggtgccgccgatgtagcggtacagcggctggcccgcggactcagcggaggcgtacagagcagccagggacacgccgaggatggcgttggcgcccagacgacccttgttcggggtgccgtcgagctcgatcatgacctcatcgagagcgcgctggtcggaagcatccatgccgatgaccttcggagcgatctcttcgttcacggccttgacggcattgagaacacccttgccctgatacacggacttgtcgccatcgcgacgctcccaagcctcagcttcaccggtggaagcaccggacggaacgaggcccaggccctgagcaccgtcttcggtgtcgagaacgacctcaacggtcgggttgccgcgggaatcgagaatctgacgcgcgtaaacgctttcaattactgccacaactactccttataaacgttaggttgtgatgacattgcctagaatagtgcgttttgtggacgtatggcaaacttatccgacacgatttgtgtgaacgctcacacaaatcgtgtcggatgcgtctggaacttcacctgctatttccttggcgttggcttccagtcaaggtcatccagcaattggttcgtccaaccaacgatttcatcagagctcattggaccagatcccagcgaacctgcgaacggcgcgggaatcaggtacgttttagtcatcggacggtattgaatgcccttgtagattcgggccatgcgcatttgcacggattctcgcggctcgaatttggcgacacgaacgttacggccttgcccgatgatttcggtaatgcccaacttccttgccttgaaccgaagtctcgccacatcgaacagtgcctcgaaatcgaccggaggcttgccgtaacgatccgtaagctcatcacgcaactcgtcaagatcggcttccgtacgagcacccgccaacttgcggtaggcttccaatcgcaatttgtcggaatcgatgtagctgacgggaatggacgcttcgatcggcagatcgatggtgacagcaaccgattccgtacgttccggttccttgtactgctcgacggcctcggacaccatgcgcacatacagatcgaaaccaacaccctcgatatgcccgctctgctcgtcgcccagcagattgccggtgccacgcagctcaagatccttcatcgccacgtcaaaacctgaaccgagcgcagtgttctgcgcgatggtggccagtcggtcatgcgactgctgggtcatcggcttggtcggatcatataggaagtacgcgtaggcacgctcacggcctcgcccgacacgaccacgcaactgatgaagctggcttaggccgaaacggtcggcatgatcgacgatcaacgtattcgcattggaaatatcaagaccggtttcgatgatggtggtgcatacgagcacatcaatgtcgcgatgccagaagtctcggatcacaccgtcaagctgcttctcccccatcttgccatgggcgatgccgacatgcgattccggcaccagctcgtgaatcttcgcggcaaccgaagcgatgtcttgcactcggttgtgcacgtagaacacctggccaccgcgcaacagctcacgcctgaccgcagcagtgacctgagcatcctcatacgcgccaacgtaggtaagcaccggcaagcggtcttccggaggcgtggccaacgtggacatttcacgaatgcctgtaacggccatctccagcgttcgcggaatcggtgttgccgacagactcagcacatccacattggtacgcagcgccttcaacgtctctttgtgttcgacgccgaaacgctgctcctcatcgatgatgaccagtcccagatccttgaatttgaccttcggtccgagcagtttgtgcgtaccgatcaccacatcgacggaaccgtcttcaagtccctcgatggtgtcgttgatctccttggtggtttggaaacggctcatcgcccttacttccaccggaaaaccttcaaaacgttcggtgaacgtctcgaaatgctgttgcaccagcaatgtggtcggcaccagcacagccacctgtttggaatcctgcaccgccttgaatgcggcacgtacggcgatttcggttttgccgaatcccacgtcgccgcaaatcaggcgatccatcggcacgggcttttccatatcggatttgacttcgtcgatggtagtcagctgatcggcggtttcttggtacgggaaagcgtcttccagttctttctgccaaggggtgtctttgctgaaggcatacccctgcatacgttgacgtgccgaatacagtttgaccagatcttcggcgatttcgtgcacatgcttacgtgctttcgccttggtggcagcccagtcggatccgcccagtttgttgagttttggagcgtcggcaccgatgtatttgctgacttggtcaagctggtcggtggggatgaacagtttgtcggcaggtgcgccgcgcttgctggatgcgtattcgatgaccagatactcgcgtgtggtctggttggcgcccgctccgatggtacgctggcgcatttcgaggaacctgccgatgccatgctgctcatgcaccacgtaatcgccggctttgagctccataaggtcgatggccttacggcgacgtttcggtgtttttgcctgtcccgcggccgatgtacgtccggtcaggtcgcgttcggtaagcagtgcgactttcgcggcattatcgacgaatccgtcgatggcacgcgatctgatgcagtcgaagttggcgattcccgtttcgttgatggcacgtttgagtcgaacaagagtgccttgcgctcctgcagtgacggtaacggcatagccggcatcaagaagaccttcgataccggaagctgtcttggcctcatctccgcgatattcgccaggattggcagcgtcgagctgaacgcggccttccctactggagtccacaccgaaactcgtaagcttccatacgtcatgcctagagaacaccagtgaggaaatcgtttcctcaaaatcgtagaaattcgcctgatcgaatgtgattggagcaccggcaccatgaccggatgcagcaacatgccaactggctgcaaggaattcattagccgttttggcaagatcgtcggcagcgcgacgcaatttttccggatcggacagcatcaccaacgcacgcttgggaagcatgccctgcaccggttccatatcatcgaccaatgcgggaagcaacgattccatgccttcgacaggaatggcgttggcaatggattcaagcatgtcttcggcgtttggaatggagccgatcagggatttcgcacgcacgcgcaccttttcggtcagctgcagctcacggcatggcgtggcccagaccatcggaatgtcactgccatacgtacgctggtcggatgcatggaattccttgatggtatcgatttcgtcaccgaagaattcgatacgaaccggatgcggcaatgttggaggaaacacgtcgataatgccgcctcgcactgcgaattcaccacgatccatcaccaagtcgactcgagtatacgcattctccaccagtcgatgcgacgcctcatcgagcgccaactcctcaccttgggagaacaccagcggctccacatcccccaagcccgcaaccacaggctgaatcagggaacgcaccggcatgacgagaatcctgatggggccaaacagcttgcttccctcttgagggtgcatcagtctgcggaacaccgccatacggctcgccacggtatcggcgcgaggcgaaagacgttcgtgcggcaaggtttcccacgcttcaagctgtgccacatcgtttggatcgccggaataccacgaacgaatcgcctcaaccatttcctcggcctcgcgcccggaagccaccacaagcacaaccggtcgtgttcccgctgccccggcagcgagcgccggacgcaatccttcgggaacgccaacggtgatgctggggtctatgtcggattccggcacttcgatctcgtcggaaatcagcgcacgaaaatcctcatcggtttcgagtacgtcgagaatgccagccagcgaacctgacgtcggcagttgcaccggttcagcggccattgaactgctcctgagccttggcgaggccgttgaagatgatggtttccgccgcgtcggcaccgtcggcaaggaattccggaagctgcttgcgctgatccggaccgaatccgcccagcacccaattcaccgtgttgtcgtgggcgtgggcgccgcgttgcgcatgaccgactcccatgcgcactcgggcatactttggcgttcccaaggcacgatcaattgatttgatgccgttatggccgcctgcggagccacctgccttgactttgatacgtccgaaatcaagatccatgtcgtcgtgaatcaccacaatatggtctggttcaatctgatagtaggcactgatggaagccaacgcattgcctgactcgttcatgtaggtgagcggctttgccaggaagaatttgacgttacggccagacaggttcatcacgcctttgccgagcatggcaagccctttatggtcggaaaagttgaccgaccaacgttcggccaacagatcggccgccataaatcccatattgtgacgggtgccttcgtatttggatcccggattgccaagtcctgcgatcaaccagaaatcagatgccattgaaatcgttccattcattcatacatacgtttgtgcgcgttcatattgcgtcacattgtctcgtcttgataaccgcaaagattgtacttacaggtcgagataccagtaactcatgtcacgcatggtgccggtggaatcggtggcggcagttggcatgaggccaaactgtgtaaaaccgaaccgtttcatcagtgcgatcgaaccggcattgtctgcgaaaataatgccgcatgccttacgcatattacgctttcgacattcttcaagcagtttggtgagtgtgtatgtaccgactcccctgccctgccattgcggatcgatataataggcgagatcggtgacgccgtcgtatcctgcgcgatcgtagaaaacggaaagcgcgctgaatccaatgatccgcctctctccgtcatcatctaccgtttccgtaacgaacaccgcatacggatcatgatgcgattcaacccatgctttgcgctgttcgtatgtgcgtggagttatatcggccgatgatccacctcgtatgactgcagcgttgtaaatgtcggtgattgcttgaatgtcgtcttgcgtcgcgatgcggtaggaatactcgatcatgtttttgagcataccgggcatatgcagaaggcggaagaccggttccccatatggaaccagtctcccgccttatgcaaacagcaatcgtacggaacttgtgcggaaactactgctcgagttcgagcgccttgttcaacgcttcctgaagtttcttctgcgcctcgccataagcggaccaatcgcccttcttcatagccgcgtcggaatccttcattgcctgggaagcgtcgttaagcgcgctcttcagaccgttgctcatcgtgccggagctactaccggtattgccggaactgctgtcattgcccgagtctgttccagatgacgaatccgtgccatcggttccggaagaaccatcggtggaggcatcgccgttggtatcggacgtatcagtcttgccactggtcgagccgtcgacgttttcagcatcgccagcggatgcaccggagttgccgccgaacacctgatcgagcgcttcgtccaacgtgttggcgaatccgacctggtcgccgaaggccaccaacaccttcttcaacagcgggaaactggtggaaccggaagacttgacgtacaccggctgcacgtacaccaatccgccgccgagcggcagtgtaagcagattgcctcgctgcacattggtggaaccggattcaagcaaattaagttccttcgacacgtcggccgacgcattgaagttgttctgtgcctgaccggggcctggcacattggaatccttcggcaactcctgcaatcgaagcgtgccatagttcgcgccgatcttgcctttttcgtggcccgcatcggaatcgacagacaggaatcccgtcaaaatctctcgagttgacgtgcctgcgggaatatacgacgacgtcaacgagaacaccggttcgttggatccaccggtctgcagcgtcaaatagtacggcggctgcagaatgtcgcgttcctgagcctgctgggattcggtcggatcgaccggagtctgccagaaatcctcaccggagaagaactggctggcgctcgacacatggtacttggtcaacagttctcgctgcaccttgaacaggctttccgggtaacgcaggtggctcatcagatcgccggaaatctccgacaactggtggtactggccggggaagatcttctgccatgccttgatcaccggatcggattcgtcccacacgtacaggtccacggaaccgtcatacgcatcgacggtggccttcacggagttgcgaatgtagttggcgttcttcgaagccagctcactcaccgtggccgaagattccgtagtggaatccttggaggcttcgcccagatcggtcatctgcgaatacgggtaggcgtcagacgtggtgtagccatcgacgatccacttgacacgaccatccacgaccgccgggtacacacggccgtcaagcgtcaggtatggcgcgaccttggccacacgctccttcggggaacgatcgtagaggatctgcgattcggagttcacacggttagagaacagaatctggtcggagccgaaacggatggcatacagcagtcgggagaagatattaccgatcttcgggccgccattgccaccgaacgtgttggtggcgccttcggaaccggtcgggtaatcgaactcccacgactgcgtaccttccggagcgcccacgatcgaatattcggaagcgttcggcgagaagtagatacgcggctcatactgttcggattcggtgagcttgccttgggttggaatacccgcctcaaagaacttcggctggccgtcggccgtcaccttgttgccgtaggcggccaccacaccatagccgtgcgtgtatacggtatggtcgttgacccagttacgattgtcaagaccggcaaggtcaagttctcgtgctgcgatcaccgtatcttggctcacaccgtcgacctcatacttgtcgacggcaagagtatcggcaaacgtgtaatactgcttggattgctgcagctgcttgaatgtcggggaaacgatctgcggatcgagcagtcggatctgcgcggtcgattccgcggaatcagccaacgcaccagcctcgccttccgtagtggcctgatactgttcggtcttcacattgttcagaccgtatgcttcacgggtggcgtcgatattacgctggatataggtagattccatttcctgcgcgttcggattcacacggaaacgctgcagcagcatcggccatgccacggtaagcaccaagctcaccacaatggcggatgcgatggccacggtcggcaccttccacgctttaagcgcttcggaagcacgcaccgcaatcggagcctggccttccaacgcatgcgacttcatgatccacacgccgagaatcacaccgagaatgacggtgatggcagccatgatgaaggtgacgggaatcgtggcgttgaccgtggtatacgtggcaccggtgatgcggctaccctcctgcgtgaggtgggagaacacgccaagcacctgattcgtcgcccatgcgaacatgttgagcatcagccagatgccgatctgtctacgcgcacgcttggtgatgtggaacagtccacgaccatgcactggcatggtgattcggatgccgcccatcatcacatgcgtgacgatggagaagatgatgccggcaagcagcagcaacgacactgccgacatgatcagcttcaagccaggcaatacgaacacatagaaaccattgtcgatgccgaattgcgggtcggtggtgccgaaactctgcgcgttgaacatcagcaggatttcagaccaattcgcattaaactgcgatccgaacatcaagccgacgatcaatgaaatcaccacagccacacgacgtgcactctttgagctcacgcccttgcccacttcgatggtgtcgccgttaatacgaatcgtggaaccatcggcagcatcggggcgagcccagatcgccagcgacgcggacaggaatccgaccgcggcgatcagcagcgcatacgccacccacaggcctaccctggtacccaactgcgtccaaatcacgctttgaaagccaagctgcgcataccacatgacgtcggtgatgaactgcgccaagccaaagaacaggccgatgatgatggcaagcgccagcaccacaccgattagaatcttgttgccgttcgacgatttgcgtggacggttcggctggcgtgtgatacgcggaccggacggacgtcttggaggcatgttcgccgaagaccgggcggtgttatcaccatcggtttcgacattgagaatgatgggatcatcgttgccggatttattggcacgctgcccttgggagcggttcggaccgctttccgggtcgaacatgggaccaaacatatcaaaaaaagacatactaatagcctatcgacaggcacggaacggctttatgccgctagcctaatgtttacgcaattcacgaacacgaatccacccgttcttttcttatgcgatcgtattcgccatcaccggcatgtgatagataatgacactatgaggagagttcacgttcatttcgctcgttgtgctgccgcactgtgcgccatcgcactgccgctatcgttcgctgggtgttcatccagcgcgagtttgaatgctggctccaaccaatccgagcaatccaattcgcagcagtccgatgcatcacatgatgcgcttgacaaatccaacgtgccaagcgtggtggacgactcgccgcatggcagagctgtggctgcagtcaatgccatgagtcttgcagagcgcgtcggtcagctcgtcatggcacccctgtatgcgggatccgatccttcctcgttacaggatctcattgtgaaccagcatgtcggttcggtgctgatcatcggcaactggaattcgggaacggccggtgtcgccgcagccacatccgcattgcaatcgtatgcgccggccaataatcagctgttgatgaccactgatcaggaaggtggtttggtgcagcatcttcaaggcgctggtttcgaccagatgccttccgccaccaatcagggttcaatgtcgaccaaccagctacggcaatcggctgccgtatggggttcccaactcaagtcggccggcatcaatgttgatttggcgccggtggtgggcacggtaacggtagatagggcttccaatggcccgatcggcgcactgtatcgtgattttggtcttgatgcggacggcaatgccgaccatgccaaggcgttcattcagggcatggcggattcgggtgtaggcagcgccatcaagcactatcctggtttgggttcggtgacgggcaacaccgatttcaccgccgacggcattcttgataccaccaccacgttggacggtgcggaaatcggcgcgttcaacagtacgttggaggcgaacccttccatggtgatgatgtcgcttgccacctatcaggctattgatccgaataatcccgccgtgttctccagcgctttggtaacggattatttgcgcaatacggtcggattccaaggtgtcatcacttcggattctttgtccgccactgcgttgggtggcattcagccgagtgatttgggtgtgcgattggttgaggccggcggtgatcttgcctgcattggcgctttcgattatgttcagcaggttttggatggtttgaatgcgaaggccgcggccgattccgcttttgcagacaaagtaacgcagtccgcgattcgtgtgatgacattgaaatacagcatgggactcgcttcttgattgcgaaatattgattgcggaacatgcaatcgaatatcttcggtataggaataatcgcaagcaagcaacataaatataagaacaacaatccccgtcttccgaaatgaaagacggggattgtttatgtatggccgttagtttcagcaacagcaactggtgttgggatgcttgcgatcgtattcctctcgcatgcgccagtattcgcgttcggtcagcggggtttcacagggatgttcgcttgcgaaatgctccagatagtggtcgtatttcgcttctccgctgaattcgcgcacataccagacgaatccggccttggctttcaataatgcggaccagattcgtctgaccatggtggtgaatccctgcatcaggctgcggcctgttccttctgcgccagctcatagctcttggccgcgtattcgcgctgcaccttcttttcgagcttggtggcgatcaggctggacggtgcgaaccattcggattccacgaacggctcctcagacgtggtttccacaccgaacttgcccttggcaagaatcttcacggtctggtagatgccgacgaccaggaagactcccatcatgaccatgaagaacacggagagcacgccgtcaaggtacgcattggagagtgcggccttggcgttgaccaacgcttcgccttccaaagtgccaccatcgatcagcgtctgatacttggaagcggtggcgaagtaactgatcggtccgacgatcttctggaagtcggcggtgaaggtcacggccacatcccaaacgagaggaacaacaggaatccacaggtacttcttatagccaagcttggccacgcaaacggtgaccaacatgaagcatgcggcggcaagcagctggttggaaataccgaaaataggcatcatggcgttgataccaccattcgtatcgcacacgccgacccacagcaggccaccccacagggcggttgcgatcagtgtggtgatgatgttgcccggtttccacgtcggatcagcgaacttcttcagcttgcgcacgttgcccagcaactcaccaatctgataacgggccacgcgggtgccgttgtcaacggtggtgaggatgaacaacgcttcgaacatgatggcgaagtggtaccagaaggccatggagtcatgaccgccgaggtaggacttgaggaagtcggccatacccatagcgaacgtggtggcgccgccggtgcgggaaacgatggtgttctcgccaatgtcggaagcggcctgcttcaaagcgtcggcaccttcataggtcttggcattgccgttctcgtcgacagaatcccaagtgaccttcatctggttgccttcaatgtcggaaaccttcatcgaatccacggccttgaccgcggcctcagcctgctcgtcaggagtggaagtggcggtcagggtcacgccggaagcggtggagatctgcgaggcggacatgttcgtggaaaagtagacgccctgggaaatggtgatggccgcaatcagtgcgatcacggcggtgaaggattcaaccagcatggagccgtagccgatcatgcggatctggttttccttctccacagccttcggggtcaggccggagctcactgcgccgtggaagccggaaagagcgccgcacgcgatggtgatgaacaggaacgggaacaggtcgcctgcgaaggtcggtcccgtggaggtggacgcgaattcagtcagagccggcatctgcacggacggattggcgatgagaatgccaagcacgagcagcacaagcgtgccgatcttcatcagcgtggacaggtagtcacgcggggtgacgagcagccagtgcggcaacgcggcggcggcgaaggagtagatcaccagtgcgataaccagttccttggcgttcaacgtgaacacgtcggcgattgccggaacgctggagatccaaccgccagcgatgatgtcgatcacgagcagcacgaaaccgagcaccgtggtttcgataacgctacgatgcaggaaacgctggaagcagcccatgatcaaggcgatcggaatggtcataccaatagagaacacggcccacggcgaggaagccatggccttgatggccacgagcgcaaggaatgccatggcgatggcggtcatcacgatcaggaagatcgacaggatagtgccgccgaacttgcccatttcgtcggttgccatctggccgaaggaacggccgcgacgcttggcggagatccacagcatgagcatatcctgcacggcgccggcgaaaatcacaccgagaatgatccacatcacggacggcagataacccatttgggcagccagaataggaccaacaagcgggcccgcaccggaaatgccggcgaaatgctggccgaacagcacgcgacggtcggcacgttcgaagttggcgccgtcatgcacgcgctcggccggcgtcgcgttcgcatcgtcggtacgcatgatcttgatctgaatatagtacgcgtagaaacggtaagcgatcgcgtaggagcacaatgccacaaccacgaaccagatggcgctgatctgctcgccacgggaaaccgccagaatagcccaaccaatagcgcacacaatggcgatgacggcccacagcagggccttcggccacgtccacaccatcttcggcttcacaccgacagggagccccttcgaattgcggatgacgcgttccgcttcctcaggcgtgtaatcatccttgaactccagtttgccgggcgctggaaccgcggcattggcagtgcttgctgcactagtcatattgttctctctcgttagatataactcttctatacagccagagccgctcaacacagctccttattggctaaagaaaaagagtaggcgcgtcaatcgcatcaacgcatttcttctcacgatatgggatatcagcaataacaactgtggaaaatccctataaaactcacttcagatttgggcaatcctacaaaacagacaatcatgcaaaaacaagctggagtaatgccatatacacgacggtgccgccggcgatcgagagcagcatgttgcgtttccatacgtgcagcacgacgatcgcggcgatggcgatcgcttcgggaatgccgtggcttccagcaaaaggattgacgtttttcagcgaatacaccaccagcagtccggtcatggcatacggaagcacgttgccaagatagtcgatgatgtgcggcggtttctttgactcgggaaagagcacgaacggcagaaaacgggtgatgatggtgccaagcaccgccatcagtacagtgacgacgccctgccatgtggtcatgatcatgaccgcgcctcccctacttcgttacgatccgcagcggattcgaccgcaccatcagcatcatcacgtttcccaacatcatcaggtttcaaatcatccaaatacggacgcaacataatgaacatcaccagcatggcaatcaacgacgggatcatgaaattgtcagcaccgaacagcgccatgcaaatcaccggcaccacaatgcccgtcaacgccgccatatggcttttgcgtttcgttgtcaaccattgatccacgaaaataaccacaaacaatgcggtcatcacgaaatccaaaccggtggtgtcgaacgtcaatcgcccgccgacaatgcctccgagcgtcgctccagccacccaggaaacctgattcagcagcgacacgaagaaatagaaccagccgcggtcaacatccgccggtatttgcgcgctgttgttgaccgcgaacgtctcatcacacatggcgtaaatcaaatacggttttttcgcccccatgttcttgaaacgccccagcatggacagtccgtaaaacaggtgccttgttcccatcatcagcgccaacataagcgtggcgaacggattgaatgcggaaaccagcagattcaccgtaacgaattccatggaaccggtgtagatgaatgcgctcatgcacaacggccacaggaacgaaaacccgcgggttcccataagcactccgtacgacatggccagaaagaagaagctgatgcaaatcggcagcactttggggaacacggctttgaacgcacgcgttttcactcccccattccgctggctcatccgcattcctccctgccatacgtggcaagcccgttcgtgaccacaatgccttgtaaccacccaattgtctaatcgttcaattcatggtaccgacagtcatgtttcgcaaacacccgcacgcatatcgacattgcttataacgcgttcaatcgctcatccgcttcgcccgccagcgaaacatgggcatgcgtttgacttcaagtacttgaactttctatcttggcaacagaacgttttcaaggagagttatcagtgagtgacatgcacgaggttcgtcaggcgttactgaccggcgaacgcgccgaattccaagcatcaggcaagcgatatatcgacacgattttcgatgatggcgaatcaccgttgaagcatgcgcatgatattgagcttaagtcgagttcgttcaaatggaagtatccgctgtggtattgctcggatattttggcaaaggattgcacatggttcgagatggcacgcgcgggcgtgtggtatacgaataccattcgtgttgaggattgcacgtttgaagcgccgaagaatttccgccggtgccatgatgttgcgttgaggaatgttgatttcgtcaatgctgaggaaacattatgggcttgttcgaacgtttcactggaaaatgtgagcgctcgtggcgattatctggcgatgaattgttccgatattaaagcctataatctgcgtttggttggcaattatccatttgatggcgcacgtaatattgaaatcacaaattctcgattgatttccaaggattgcttctggaattgcgagaatgtaacagtacgtgattcattcatttccggcgagtatttggcttggaattcccgtaatgtcacgtttgagaactgtacgatcgaaagtctgcagggtttgtgctatgtggataatctcgtattgcgtaattgccgtctaatcaatacgacgcttgctttcgaatattcgaatgtggatgccgatattcacagcactatcgatagtgtattcaatccttcgtccggcacgattcgtgcggatgtcatcaaggaattgactcttgacccaacgaagattgatccgaacaaggtgacgataattaccgaaaacaagtaaacgtcaccgtcgatcaaaaagtatttataatagttgagggtctgcaatttaacttgcagaccctcaattgttttatatcacccaacaatcggtgttgtaatcaaatactgatcacagattgtcggtgtcgatggtgatggtgaccggaccatcgttgatcaggccgacgcgcatgtgcgttccaaagcggccttcgcgtactggcacgccgccagaacgcaacgcctcgttgaatttgatccacgtgatgttggcatgttccggtttacctgctttgacgaagctggggcgattgcctttcctcacgtcggcaaacagcgtaaactgcgaaatggagaggatttcgccgccgatgtctttgatggaacggttcattttgccctgttcgtcttcaaaaacgcgcaggttgaggattttgtgggccagccaagaaagctgttcctcgccatcctcatcactcacgccgaccagcagcatgaagcccggtccgatctgctgcggttcgaaggtggggtcgatagtgcccagttcgttgacaacgtcaacgctggcttggctcactcgttgcactactactttcataaccccaccttaccgcgcgaatagcgcgattctttgcgttgtcagtatccgcaccattccaatccacataaattagaccaccaacatccatccatggcgaatcaaaagccttaaaataggtgtttttcatgaacctatagctataatctgcgttattccaagtccacgtaggcttaccaaacattaaattaggagtccaacactaatgccaaggttttgagtaccagcaatgtgctgcacacggcgccataatcgacttgctcgaccatgcatgaaccatcatggtcctgccaattctggcgtgctcatgcagcctgcggatatgagccgttatgatcatttgcactaccgtgttgcgacctcatgagattgctgatgcgtgcagacgatgcgttggatgaacgtaagacgattcatgcagagggtttgcagggactgccaatgatcatatgcctcgaggcgcgctgcaatgcctactccctattttcatattttggaggcggcaccctcgtcgataagccagagcagttcctcaccatcggcgtaggagcttggcgcatgcggattgttgcgttgcgcgaatgctgcagcaaccgcgtccgccttgcgtgcttcggatgtgaacacccacgtgtgcttcgatcgtgcgatcatcggcacggtcagcgtcaggcgcagtggcggcggcttcggtgaatcgcgcacaccggcaacaagcacatgcggatcgtcgatctccgactcgccatggtcggggaacagggatgcgaaatgcgcgtccggtcccataccgaacatggcgatgtccaaagctggattctcacccaactgttcaatgagttcacgctggtattgcgcggcggcttcagccagcacagcatcagtctgttcgggtgaggctgccgcgacgctttccaagttacgctcatcggacggcatcgcatgaatgttgcctgccgacatacggccgtcggcaaccagtttgccataccatgcctcacgcgcctgcttggcgttgcggtcgtcgctgtcggctgccacgaatcgttcgtcgccccaccatacgtgcacgcggctccagtccacggcatcgttcaatgggctcgcgttcatggcgtcgaacactcgattgccgtcggttccaccggtcacggcgatgtcaacgcgagtgcgattcggttccgacagaagatcggtgatggtcaacagcgtacgtgcggccacggcttcagccagaatctgaggattgggatatacaacggtggtgcgttctgccatatgcttttcctgcattgttcctttattgtttcggagaatcgattcagtgcttcgaattgataagatcccagccttgagtcacgacttccgcatagatctcgtccggatagagtcgacccaattcctcactcaaacattcctcgatggttcgtgcgggaacgctcatggtttgcggggactgccctggaacgttcaatacggcgatgccatcgtcggtggatgggcgttccaaactcagcacgccatcggaacgggtcagatacacgccggtcacggcggttgcattcggatcgtcttccaccacaacaggcacgttcagacgaagacgaagccatgcggccagcagattcaacggcaggaagttctttggtccggtcacacgcacgccgcttactggaagatgcggcggctggtcaagcatcgaagcgagcattgcgcgccaaacagtcaagcgagtccacgacatgtccacattcttcgaagaccagttgcggcgcagatcatccatggtccgcatcggattcgaggaatgcatcgcatcggtgatacggctgcgcgccatggaacccagcaaatcgttcgataggttcgcgggggcttcgttcggccaccaagccaccaccggagcgtccggcaccaatagcggaatcaccaatgtatcagggtggtgaaccagcccaccaatcggacgcaacacgatgatttcgcccgcgccggcgtcggaaccgaatcgcacttccgcgtcgagaaaggtgtgcggcttgccatcatcggcagcggcatccaccctacgtgaattcggcgcgattgcgatcacacggcagggatgctcacggctggcgttgttcgccacggcgagatcatgctccagcgacgtctcattcgtggagatcagcagtgtgagcacgcgacccagagccgcttcgccacgctcctcgtgcaattcatcgattttcgccgaaatctcacgggtttcggtgttcttcatggtaatgatcacggcatcctccaacggtgtccatcgcgggccagcatttcaacggcttcctgagggccccacgttccggaacgatacggctgcggctggccaagcgtggaccagaactcttcgatcggatcgaggatctgccagctcaattccacttcgcgtgtggttgggaacagtggcggatcgcccagcaatacgtcaagaatcagacgttcataggcttccggagacgattcggtgaacgaacggccgtaaccgaagtccatcgacacgtcacggacctccatcgacgtgccacccggcaccttcgcgccgaaccgcatggtcacaccctcatcgggctgcacgcggaccacgatcgcattcttgccgagctccttcgttgcggtcgactcgaacggcagatgcggggcacgcttgaacaccacggcaatctccgtgacacgcttgcccaaacgtttgcccgtacgcaggtagaacggcacgccggcccaacggcgcgtatcgacatccagtcggatcgctgcgtaagtctctgtggttgaagccggattaatgcccttctcatccaaatagccgacaacctcatgagaaccctgccatccggcggcatactgtccgcgggccgtatgcgccgccagatccttcggcaagcgcactgcggacagcaccttcgtcttttcagccgtcagatcagcggcggagaaggagaccggctcctccatggccgtcaatgccatgagctgcagcaggtggttctggatgatgtcgcgtgcggcaccgatgccgtcatagtatccggcacgaccggccacgccgatatcctcggcgtgggtaatctgcacatggtcgacgtaattattgttccagatcggctcatacatggcgttcgcgaaacgaagcgccagaatattctgcaccgtctccttaccgagataatgatcgatacggaacacactcgatgggtcgaacacctcggaaaccacacgatccagctccttagcgctggccagatcatgcccgaacggtttctcgatgatcacacgacgccaagcgcccttgtcggacttcgccagaccgcaatccgccaactgtcgggaaacctgcgggaacgcgcgcggcggcaccgacatgtagaacgcatggttacctcgcgtgccacgatcacggtcaagctcggcaacagtgttcgacaatcgttcgaacgccttcggatcatcgaacgtgccctgcacaaaacgaataccgtcggcgagctgcttccaggtcgcctccttaaatggcgtgcggcagtgcgcctgcacgttctccttcacgaaatccttgaaatgatcctcggtccaatcacgacgtgcaaaacccgtcaaaccgaagcttggcggcaataggccacgattagccagatcataaatggcgggaagcagcttcttgcgtgacagatcgccggtcacgccgaaaatcacaatactgcacgggcctgcaatacgtggaagtcgaagatcgcgcggatcgcgcagcggattcgtccactcttcaggcgtgccaagtacggatgaaacagtttcagtcatgtgcctcatagtatcgccaacacgtcacggacggcagtgaccatccgaaaacgtcctttccatattttgtgaaaacccacaaaaccagccgttttttagcggctgtgagcaatatcacaatcgatgatcaatgtattactctgccgaaaaatcatgcaacccggcgaacagacgattgaatccttcttgcatggtgcttcgcgggcaggccacgttgatgcgaatgaaatcatgcccgttgccgccatactcggcaccttcggagaacatcacctgatgattgcgcttgagatgttcgcacaacagagcggtatcgtgcgtcagtttcgaacaatcgacccacaacaagtaggtggcatggctttcaatcagggcgatgcgtcgttccggtgccgcggcagcattgtattcgttgatcatggctcgtgcttcggctttgttgcctgccaagtatgcgcgcaattcctcaagccaaggctcgctctcgttgaaggcagcgagcgtggccgtcatggcgaaggcgttcggttcggccacttcgtccgtgttgagcgcacgccataccttatgcctcagcacgggatttggaatcattacggcagccgtgttaagaccggcgatattgaacgttttggtcggtgccatgcaggtcacggagttcattgcgcactgctcattcaccgaggcaaagggcacgtaatcatatcccggatcggtaagatcacaatgaatttcgtcgctgattacggtcacatgatggttccagcaaagctcacctatgcgtgcgagggtgtcgcgatcccagattcggcctacgggattgtgtggattgcacaggatcatcagcgtggtttgcggatcggccaacttggattccagatcggcccagttgatggagtaatgtccggaaccgtcgtattccaacggtgattcaagcacgcggcatccattattgataatcgaattgaagaaaatgttgtagaccggagtttggataagcacgttttcgtttgctgtggtgagttttcgtaccatgctggagattgccggcaccacgccggtgctgaatacgagcgattccgggtcgatatcaagattatgcctacggtgccaccagtcaacgtatgcctgattccattcaggagggacgatggaatatccgaaaataccgtggtcaagacgctgctgcagtgcggctcgaatctgtggagcggtttgaaattccatatccgccacccacatgggcaacgcatctcctgcctcttcccacttgagcgaatacgtgccggatcggtctacgggagtgtcgaaatcgtaagtcatgccatcaaacttaagaacttcaagtggacgaagtcaaatgcaagctgtgaatgatcccggtttcacgacatgcattgtaatgactttgtcggtcgggcagccctgttgtatgagttcaaaaacatggcctttcggacattccatactggttctttcacattcatgctgacgcacccattgtgaacgaaccaaaccaaaataactaatgtaaatgatgtattactttccatgcgagaagtgcatgaaaactgtcaatcagccagcccagtcgaaaagttccggaccattgcgttgcaaatggcgttattgcatgcgtattgactaccatgaacatcaatacttaagaaaggtggttttatggcatatgcgttgataacgggggcttcgagtggcattgggcgtgagatggcggcattgtttgcggccgacaggcatgatctcatcattacggcacgcagtcaaggcaaacttgatgacgtgaagcgcacgctggaacatcgctatggcgtgcatgtggagacggttgcgcttgatctaagcgagtctgacgcaccgcaacagttgcatgattacacagtttcgcaaggttttgaagtggatcatctcgtcaataacgccggttttgcggattggacgggttttctcgacgccgactggcatcgccagcatgagatgatgcagctcaacatggccgcgttggctgaacttacgtaccgttatggtcgtgatatgcgcgagcagggtcacggacgcatattgaacatctcttctgttgcttcaatgatggcaggcccatatatggcgatatatttcgcgtcgaaagcgttcgtacgatcgctttcggaagcggtgtcgtacgaattgcgagataccggtgtgagtgtgacctgcgtatgccccgggccgacatccacagggttcgccaaggccgcgaacatgcgtggcatgaatttcttcacgctgaccaaaccggccaccgcctaccagcttgccacctacgcgtatcggaagatgaagcaggggcgcacgcttgcctaccacggctacctcaccaaagccggagccgcagcggaacgactactcccccgcgctctgacgcgacgggtcgccgcaatcatgaatggcggcaacccacgcaaccagcatcgcgaataattcaggaggcaactcaacgagtttcccttgcggctgatcatatttgccgcaacacaaagagccgcacacttttcataaagcgtgaggctcttttcatctgttaatccgctagattcgttgcagaaatacgtctatcaggcttcgatttcctcgcggcccggctcggcccacagggtgtggaatgcgcccggctgatccacacgctggtaggtgtgagcgccgaaatagtcgcgctgaccctggatcagggcggcgggcaggcgcttggaacgcagtccgtcgaagtacgacagcgaggaagcgaacgccggagtaggcaaaccgttgacggcggcctgagccaccacgttacgccaagacttttcggcggtttcgatggcgttcttgaagtacggagcgaacagcagcgacacgttggcttcacctgattcgaacgcttcggaaatacggttgaggaacttcgcacggatgatgcagccgccacgccagatgcgtgccacggcagccagatcgatatcccagccatattcttcggcagcagtggtaatctcgttgaagccctgggcgtaggcgacgatcttggaagcgtagagtgcctgacgaatgtcttcgatgaaggccttcttctcatcgtcggtgaggttcaggttgccgtcagggccattgaagccctgcttggcggcttcctcacgcagatcagcttcggaggaaagaccacgggcgaacacggcttcggcgatgccggtgaccggtacggccagagacagtgcggtctgcacggtccacgtgccggtgcccttcatgccagcatggtcgacgatcacgtcaaccagcggctcaccggtcttcttgtcggcctgatgcagcacttcggcggtgatttcgatcagataggagtcgagttcggtcttgttccactcttcgaacacgtcaccgatctcagccggagtcatgccaaggccacgacgcatcagatcgtagctttcagcgatgagctgcatgtcggagtactcaataccgttgtgcaccatcttgacgaagtggccagcaccattgagaccgatatgggtgacgcacggttcgccttcggccttggccgcgatggattcaaaaatcggcttcagagtcttccaggattcttcggagccacccggcatcatggaaggtccaagcagagcgccttcctcaccgccggacacaccgcatccgacgaaatgcagtccgcgagcgctgatttccttctcgcggcgaatggtgtccgggaagtaggcgttgcctgcgtcgacgatgatatcgcccggctccatcaggtcggcgagcgcgttgatcatggcgtcggtcggctctcccgccttgaccatgatgatggcggtacgcggcttgacgaggctgtccacgaactcttcgagggtttttgccgggaagaattcgccttcgttgccgtgttcgttcatgagcttttcggtacggccgtaagagcggttgaacactgccaccttgttgccgtggtgtgcgaggttacgtgcgaggctaccgcccattgcggcaagaccgactacgccgacgtttgcttcagctgacatgctggccccttccatcaggaaaagtagtactttatgaaccgttctttagtgtagacccgagctaccccagaaccatggaccgtctcaagtctgacatcatgtcaatcacgcggcgcaatcgtacgtacgaatcgcatggcttcggcaggtgtgagcgacggcacgtaggcttgtgccacggcaagcgatatttgcggcagtttggctgcgtcgggatagcagatatacactttctcttcatcggggtggaatttcagtttgaaacggaatagtgagtggaatccgtatgctggttccatgatgtctgcgaccatttgcagtgcatgacgcaacacttcgctttcctcgtgttcgctttcgttggatcccataccggccagcggcgccgccgataagctcatgaattccacgttgccttcgtcgcgtagtcgttcagccatgcgtgcaatcaggaattccatgatgccgttgacgctgtcggtgcgatgcctcatgaagtcaagcgtccaaccgatgatcgtaccgtcacgataggtgggcagccagctggttacgccaaggactttgccattgccgtcaaccgcgtagagtaggcgcacccgggagtcgatcagttcgtcgacgcctcccaaggtgaatcccatttccggcagggcctttttgccggcccactgtgcggagatctcacgaatctgcgtttgtactgagaagggtgcctccttgaaagtggtgagcacgtcggtgatgccgtctcgtttggctttgttgatggcggtgcgcacgtcctgccatttcttgcctcgggtctgccattcgttgggattgacgaccatttccgtaccgacgtcaagcgaatcccatccggctttggtgagttcggctcgctgcgattcgtgcacactgtaaaacacgggcgtccaggaatgttgtgtgcagaatgttgcgaaatcagtaagatcttccgcatattcgctgggatctccgaatggtcctgtcaccgtcaatgcgatgccgtacgacactcgataggcgatcgcggaacgtccggttgcggaaaaccaatagtcattgcctttccaagttgccatgaatgacatggattcgccgccaagcggaataatcgcgtcaacacgatggtgcaaagcgtcattcaccatggaacgatcccgcaaacaatcccaaacacacagcagagcgataatccaaaacaccggaccgacgcactgatataccagcaaggagattcggccgacgggcacaaactcaggttcgataccactcagcagtccgatcggcaacaatcgctgcacataatcggcaagcaatgcgatcaattgcggactttcattgaaatcgtcgggagaggcaagcccatatccggcatacatcaatcccaacaacagaaaagccgacaatgcacctgccgcagcacgcaacataatctcacttctagtgcgaatcgtaaaacactgacggaacgcaatgacgataacgataaaaatcaacggcaatgccatagtggaaaacatcgcatgaaacgcaccatgacgagccaacgcaggcaacgcatcagcctgcgaatcgccaacatattgcagcggaagcaccacataaaacagcatcgcaagcaccaccgtgcacgcattgaacagcacgctcaacgctgcggcaatacggcgtccgcgatacagaccccatgcgatcaacagcagcatcagcgtcggcatcaacgacaccagccagtttccgggcatggtgaatcgcatcatacgatattgcgcgaaacagttggcatgcgaggaaccgttgaggcaatccaacacttgttccgtgtcgaattccgtggaacctgtcagcaagccgaacatggagagcaatccgaatgattgtcttgaggaaacggcaaccagcgaaccgaccgcctgtacgccggcagccataccaatcagcctgcgcatctcatacaaggcaccatgcctatacacatcaccttgactctcggaagccatcaaatagccaagcacatggccaagcaacgccgacgccagcaaacagtaatcgccggcttcaccacgatacaggaacaggatcagcaccacgctatagccgatcacacgaatacgccgacgccacagcatggcggtgaacgcgctggcacacatcagcgtgcccaccacaacaaccagcggccccaaaatcgcaccatcatgcgaaatcgcatgccattgcggacttttgcctgcgaacagcgagcataatcccataccgagcgctatgccgccaagcgtggtgatcagcgacacccatgccgtcttcgcctttccaatcaccgtttcgcataagccgaatgcgatgagtatcagtggaatgtcgatcagcagacgacccaactgaggcaccgacagcagtgaaatcggcgcggtataccagcgcccatgcgcgagcgcgtcaaaactcacgcgcgacaattgcggcggaaattgcgtatgtctaatgccgcatacgagctgcatgccgacattgaacagcgtgatgaacagcacaaaccccaaggtcatgcgatgctcacgaatccagtcggcaagatcggccataagcgcacgaaagccaaataatggtttcactgttgattcctgcgattgcgtcataatacagtacttccgttcgatgattcagattgaaatgcgtttgagattcggatagtcgaccaatttcggcttggcatcgctcagtcccgtgttgtagccgaatacggcaagtccgtaccgcaacgtgtcttgcacggcatgccagtcatgcgcattgtcaagcgattcgactgccgtaacatgcatgcccgcctgttgagcaaccggtgcgatgcgttcgacattgcgcacggactcgcgatcacgctcccccgcaccgataacaagcgtctggttcgaaggcgcatggttgcgaatggcgttgatggggatctgcttctcgtatgcggtgcgatcgccgtggaagaaccggctgatcatactgctttcactgccattggtcggtttgagctcgctgccggtgggaatgatggtaccgaacaaatccggatggttcgcaccgatctgcagcgaacatgtggccccctgtgaaaaacctgcgatcgcccagtcctgcgcttgctgtgccgccggaagattggctttcacccagtcgaccacgtctttcgtcaagtaggtcaacgcattgccgtacaccggcgaatccacgcatagggtgttatgcgaatcgtctcccaactggtcggccgcaataacaatgggtgcgagtccgccatgatgctgcgcataatcgtccatcatggtttgaatgccgcccgcggcaaacacgcgacccggagagcccggctggccgctcatcatcagtatgaccggcaacgccggcttgtgtttggctgtggcaagcgctgcaggcggcagatataccagcgcctttcgcgcttcgaaatgcgatgctgtggctggaatatttactttcctgacttcgccatgtgcgggaatattgctgacgctaccgtctgctttttcctgcttccattgcgtgacgctaatcaaatcgctgcgtttcgccattcccgtcaggtcggcttcacgataggtgtcttggccgaacagtgatccgatggtggcatattctccatacgcctgatcgatgccggtggcggcggaaagcaccgcgaataccgtcaatacaacggcgacggcacgcaacactcccctatgctgcaccgcatagcaaatcgcgaatccaatgatcgcgcaaccgcaaccggcccatgcgaccacatgcggccccagctcaacaccgaacaccacaaacacgtctgacagcaaccaggcaatcaccaatccggcaatgcctgcaataatcgcaatcactaccggacacacgactacggcaaacgtgcgtttgccaccgtcacgacttccggcaaccgtctcccatattgcagtacccagcagtatcgccgccagcactgcggttactgaaaacaacgttgccggaaaccagccatccaccaaacttatgttcatcaaccatgcacgcatgctcacttcttgctttcatattcttcatgtccaatgtgccagttgtagtccatgaaacgttggcacgacctcatccttgaggctgattttccttggaatatcgacgaaaaatactgtgagcaagctgaatggatgatgctcttaggcagcgtcttacctttgccgatcatcgatcatgccttgaacgcacgttccaatacccgccatacgcatggaacggaccccacgtcgggatcgccttcgaccaacagcgcattgggaatgcatcagtcgtgccggatcggtttgatactctgactgcggcacagtttcctccgatcgcgcttccttgcgcatgttccctgtacatgttccttgtacagcagacgcaatattcccatgcaatgtgattccagctaagaagacactacgaaacgcgtccaatgcatccgaccggcagccaagcggtatggtgttgcattatgcagtatgttttttcggcgtcgaatgtttcctgtgtcgtgccggtcgacggtgagcaacgcacgattttcagcggattatccgttgatgtgaagcatggtgagattgtggatttggtcggcccttccggatcgggcaagagtagtctgcttaccgcttttgcacgattgaatccgaatgcgaacggcaattttcagcttgaagggcgctctgccagcgaattcacaccgcagcagtggcgtagtcaggtggcgtatttgccgcagaagccggtattgatcggttcgagtgtggccgaggcgattcgtttaccgttcacattggctatccgtgcgggcgaagtcaagcaaggattcggcaggaaatggtcggccggtaagtctctcaaacccacagatctactgccggatgctcgcattcgagccacgcttgacgccattggctgcgcggatattgatttggggcgtgctccgcatgacttgtctggaggccaggccgcccgtgtgagtttggcgcgcaccttgcttacttcgccgaaagtgctgcttgccgatgaggttgatgccggtttggatgatgagaacgccgataaggtggcatccatcatggctcaggccgcagagcggggcatggcggtgattcgtattcgccatcgcccgccggatgggcgtgccacgcgcattctcacactggccaatggcgtattgcagagtgcgaatgctccgcacaccgcagcaaccaatgattccaatgatttcgcggcacagtccgattcggtgcaaggagtgcaggcatgagcggcaattattattccattgatatttggggtctgcttatcgcattggttatggtcgccgtggccgcaggcatttccgaagcgatgcgcatgggcattggcaagacactgctatggtcggcgtgccgtgcgttgctgcaattgtgcgccatgggtttcattatggagttcgtcatcaagtcgaacaatccatggctggtgctgttgctggtgatgttcatgctgatcgcggccgtgcaaatcaccctgtctcgtgccaaaggtgtgccgaaaggcttggccggtcccgtgtttttgagcttggtcatcaccatgctcattatgatttcgttggtcaccgaattgatcattcgcccgcaaccatggtatgcgccgcaattggtggtaccgttgaccggcatgctgctcggcaataccgtgtccgctttggcggttgggttgagccggttcttcgaaagcatgaaggaacgccgtgacgaagtggatacgctgctggcgttgggcgcgaccgcttgggaggccgcacgcccgtccatcgtctcgtcgattcgtttgggtttgctgccgactaccgcctcgctggcttccagcggcattgtgacggtgcctggcatgatggccggtcagatcatcgccggcggcaatcctatcgacgcggcgaaataccagttcctgattctcgccgccatcgccgcgttaacgcttctggccgacagtctcattatggtgatggcataccgtaagtgcttcactgcagacgatcaatacaatccgatcgcaggctgaacaacttttcatatagccaagcaattaatagacaatccgatctaacagaaaacggcgttcgccaagtgttcatataccatggcggacaccgttttctattgtttaccagctacgcgagctttgattttgcttttcagcgatcaacgcgtgcggaatggcgctttcctgatgttcgcatggcgatggcgtgactgccctgcatgcttgtcgtgacgttcgccacggccgccacgcttgacttccgtatgacggtcatagcgtttcgcatccgaggaacgttcgtcatgcttcttgcctttggaccgacgattatcgtcatactgacgttcggcacgggcttcagacttgcgctgcttcttgcttggcgcaccctgctttttcgcaagctgtccggacttcttctttcccagtttcctgcgattgtcggtattgccgtaatcgccgtcgttcctacgcttgttcgtcgtttcgcgctgctcgttgtcgctgcgctgctgctcatgcaggcgcgcatacttttcacgacgcttgctgttgcgcttttcctcgtgctgttcgcggcgttcctcttgaatttcaggatgttcccaacgatgttcacgcgcttcgaattcacgattgtcacgaccttcgaacttggcggcacggcgttccgcacggttcttcttcggctcgaacttcttcgcgctgtcgttacgctcctcacgctggtcgcgatcgcgacgatccttacgttcggacttaaacggcttaccgcccttgtctttgccgcgatccttgttacgcccgccggaacggttcgatctgccggaacgttcgccgtcggcactccccttgccgttcttcctacggcgcggatttcctgccggctgcgactgctcaagcgtccagccgaacaccggctcggccacttcgcctacgagttccaacacttccggcgaatcaggggtcacatcgatcggttcgaccgtcagtccggcctcacgcatcatgcgacgggtcctgcggcgctggttcggcagaatgatggtcaccacgtcaccggaatggccggctcgcgcggttcgtccggaacgatgcaggaaggatttcggatcttccggcggttcgacctgcaccacgagttccacaccggaaacgtcgatgcctcgcgcggccacatcggtggccaccataacgttcacatcgccggagttgaaggcggccagattgcggtcacgctggttctggctcagattgccgtgcaattcggccgcaggaatgccgttctgcgttaaatccttggcaagcttctgcgtctggaatttggtacgggtgaacagaatgcgacggcccttgccggaagcgagggtgcgcaccagctcgtgacggttgccctgcgtggttttgaacacatggtgggtcatctcgtcaacggtcgccgtcgcggaatcgacgctatgcaccttcggatcagacaggaaggtttccaccacttcgtccacgccatggtcgagcgtggcggagaacagcatgatctgcgcgtcgaacgaaatctggccgagcagtcgcttgactggcgggaggaagcccatatcggccatttcgtcggcctcatcaataaccgctacctcaaccttgtccaaggtgagcgcgccctgttcgatcaaatcctcaagacgacccgggcaggccaccacaatatcggcaccggcctgaaggtcacggatctggcgggcataacgcacaccgccgtacacggtggtggtgttgatgccgtagatctgggcgagcggcatgagcacatcgttgatctggttggcgagctcacgggtcggagcaagcaccagaccacgtggatgcggcacgaaatcgtcggcacgacgttcctcggcatgggcctgcttcacacgattgacctcgtggcggaactggctcatgttctcatactcgccggcatccacttcgcccaagcgagcgaccagcggaatcgaaaatgccagcgtcttgccggatccagtgcgaccacggccaagaatgtctcgcccagccaacgaatcgggaagcgtgtcggcctgaatcgggaaagcggttttcttgtcatcggccgcaagcacgcggaccagcggaccaggaacgccaagttcggcgaacgtcaacggacgttcctcttcctcgcccatcgcttcggaagcggctgcgagggtatcttcatcaaaaacggtatcgggcacaatggcctttcatgtcaaatattacgcacgttgcgcaaacctgataactgtagcctatgcccaatacttttgcttacgttccttcaatccttcatatccgttatattcacgccggattgcggttgatttcgatatcggtgacggtcagattcgctttgttgaccagattgaacagaatcacttcggccagttggtcggcacgcatgaaggtatgctgcttttcttctgaaacgtagtcatggctgtcacggtagaacggggtgtcgatgccacccggatagacacccacgattttcacactggtccccttgtatgcggcctgcaaactcttggtgtagcccttctcgccccacttggtggcgcagtacacggattcgttggggttgcctcgcgttgccgcagtagacatgacgttggcgattttgagattctgctcaccgtccgctttcagtgtttccacgctccacaacaccatgcctttcagacctttcagacacttgtccacatcggccgcttcgtatgcggtcgggactttgaacgaaggctgaccggcattgttgatcagcaaatcgatatgaccgattttcgagattgcggcaacagagttcttcacgaacgattcgtcggaaatatcgcccacaaaagctctgtattcgtcggcagcaaaagtcttcgacaactccgcctggcgtgcgccattgaaatcaataccagcaacgaaccatcctttggcgatcaactgtcgagccagctcgtatcccaatccaagcgcggaaccggtgacgatagcgattttctttccgtctgcggtactcatatgatgaactccttcattcaaaaatggacacaacccgttgtagatgactttgttttagcttgtcgctaaagcgaagtcatctgcatggcctcgttgccgagaccagctccaagactcacgcgactctcgccgccgcttggttcgcgcttcgccggatgccgcattgtcccgccttttgggtgggcctgtcttacgcttcctccacgcgcgtttaacgtctccggggcactcccgacgacttggatgttgatggccgcgttcaggtcgcggtccatgtcaagcccgcacttgccgcaatggtagacgcgctcggacaggggcagcttggctttcaccgttccgcagttcgagcaggtcttcgagcttggataccagcggtcgatgacgtgaagcctcgcgccggtgcgtgcggtcttgtaggtcagtaggcgtcggaactccgcgaatgcggcatcctgaatcgattgggcgagcctgtggtttcccaccatgcccgccacgttcaagtcctcgatgctgatgtccgcgtaggtatgggcgagcatggcggtggtcttgttgagcacgtccgaacgcaggttcgccacccgtgcgtatagtcgggcgacccgcgctcccgccttgcggcggcggttggagcctttccgtttgcggctcagattccgttgggctttcttcaaccgtctgaggttcgatttgagtgcgtgcgggttgtgtatcacggtgccgtccgacaatgtggcgagctccttcacacccaagtcgatgccgacgatcccgcctttcggcggcgatggaatcggcaggtcggcgcgttcgacggtcaggctggcctgccagcgtccaccacgcttggatacgctcatgcgcagcaccttcgcgccgttcactcgcttggacacgttctccatgcagtgcacgcggcctatcttcgggagccgcagcgcatgagggtcacagtcaatgagaccaaacgagcccgtcgtgtacgcgaatctgggaaccgccttgtccttggatttgaagcgtgggaagcccatcctgcgacctttccgctgccccttgcgggacttggagaagttcctcagcgcgtcggccaatgattcgaggccgctgttgtacgcctccttgctgttctcaggccaccatggttctcccgtggtctcgtccaccgccagaccgtttttggcttggttccaccacttacgcaaggcatagtacgaccattcgggggtatcgccgcgttcgagcacgtccttgacgtgcgccagcccattgttgtaggcgaatcgcgccgccccggcgtgcgattccaacaatcgttcctgccgtggagtcgggtcgagcgccaccttgaccgcctcaagcatcgcgcgccgccttcaacgccgcgtccgtcttgcgtttggccgcgcgacgcccgtacagccgggcgcagaacgaggtcagcacctcggtcatgtcgcgcaccaaatcgtcatccagctccatgtcatccaccacgattattcggcgtccctgcgccttcagcgcgctctccaccagccccgcgttcatgcgggcgagcctgtccctgtgctccacgatcagcgtgcccacggtcgggtcggacaatagccggttgagcttgcgccgcttgtcgttcatgccggaacccgtctccgtgaccacctcgggcttctcgacgcccatgctaagagcgaacgccttcaaccggtcggcttgacgttgcaggtcgttcttttggtcgccgctggatactcgcgcatagcagacggtgcggggttccatgcttttcgattgcggcatggtctcgtatttcgggtcgtggatgagccacatgccggtcggcgtctgttccacaggaacgggcatggtgccctgacggcaccatttccacacggtctgcggatgcaatccttccagtctggcccattcctttaccaacatgagatttattataacataggattacttaagaaaacaaaacagttcagtaacaggcaacaaccctcttgcaccatcataaccgtttaacatcacatgaagtcagacgattgacgttttcttctgtgttacattccgcaatctgatgacctcttcattacatctggtttcagcgccgttttcagcgagttcacatattccgtatcaccgtgcagttttgaatggacatcatgaaggttaataagcgatcgaaccatagaaaccctgcagagaagcggtattgcatgagaggcatgattattggatgtctaggactgatcagcattcctattctggaccatcgccgacctgaagtggacgtcatgctgattctgaactacattgccataattcgtcccacatttttcccagttccacaccaaaagccgctgccatagcttccactttcggtttaagcatctgtgcgagttcccacgcatccgagatggcagtgccgtacaaaacctcctcatcaatggcatcgtactcatgaataatggcgtttcgcatgccgcgcaattcacgccatggcaattgcggcgtgacatcacgaaactcattggacaaccgacgtgcgcactcctgtgcttgagtaagctccatagcaacagaattaaacgatctccgatcgcaagccaactcttccgcagcatcaaaacattgtacatcaccatacgcatggaccagatgctctaccatggcggtcaatgtcacaaagtcacgataccgccaatcctgatgtacaaccatgctcaggccaccttgattaaatcaggttttatccgttcatagaacagacgacctgcagcactacgttcggcacggcgctcgacggtgtcgagagccattaacgagacttcacgccccaggtaagacgataattcatctgtcaatgtctgagtttgcgtcagaccgagccgttcaccgggtttcaaacgatacaacagatcaacatcagaatccggtcttgcatcccctcgagccacggacccatacagccaaacttcggtaagaccgtattctcgcgcaattttgccaacaatgaaacggaccgtggtcaattccaaagggctatcgttcgaagcgacctgctgcaacgcagaacgatatctttccagaaaatcctgagtgggattcccgttgcgctcagcacgcgataacgccgattgtgtagtgcccatggcttcggcaattgcacgttgcgtcaaaccacgctggatacgctcatccttaagctcctcaataatcgacatgcctatatcatagcataaacgctatatatcgattcaagatccggccagaatatccgcctttcccccactcacacataaaaaggcccttccggaacagggaacgtttgggaagggccttcagagcgatgcaaacgattattgcatcacaggatgtcggggtcgttcttgtcgatcgtgccggtggccttgccgatggccttcagaccgtggtaggcgacgagaatcacgatggtgccgatggcgatgccgttgaaggaaatgccattgaaagcgaacgcgaactggccgatggcgatgatcatggtgattgcggcaaccatgatgttcagcggcttgtcgaagttgaccttgttctcaacccaaatacggataccgaccatgccgatcatgccgtacagcagggtggtcactccaccgagcacgccagccggaatcgtgttgatgatggcaccgaacttcgggcacaggctcaacagtagtgcgaagccagccgcgcaccagtaggctgcggtggaatacaccttggtggctgccatcacgccgatgttctcaccgtacgtggtggtgccggaaccgccgccgaaaccggcgatggtggtgccaagaccgtcggcgaacagggcggtgccgatctggtcatcgtagtcgcggccggtcatctgggaaacggacttgacgtggccgacgttttcggcgacgagcacgagcaccaccggaacgaacatcggcagaatcgtgaagtcaacctgcggcaggtggaaagtcggcagaccaacccaagcggcatcgccgatggcggagaagtcaacctgaccacgaatgcaagcgtatgcgtaaccgatgatcacaccgatgagaatgttgagtcggccaagcagacccttgaacagcactgcgaccagcagcacggcaactaaagtcacgatggcggtgtcgggagcgaccttgaagttgttccacacgctcggagccaagttgaaaccgatgatggccacaatggcaccgttgacaaccggcggcatgatgatgtcgatccacttggcacccgcgaagtgcacgagtacaccgatcagagccagcagcaaaccagtgacgagaatgccgaaggatgcgacggcgatgcccttgttcgccgtggtgacggcggtgatcggggcaatgaagccgaaggacgaacccaagtagctcggcagcacgttcttgttgatcagcaggaacagtgcggtcgacatggccgtaaagaacagggtggtggacgggtcgaaaccagtcagaatcggcaccaggaacgtggcaccaaacatggcgatgacgtgctgcgcaccgatttcggcggtgcgcggccaagtcaggcgctcgtcaggctcaacgacttcgcccggcttcagcgtcttgccgtcaccgtggacctgccacgtgaacagattggacatgcgattgtctccttaactctcttgcgcggcaagcaaaaacgcgccgcgtgtcatagccattgtagtggggcgtggacacgggcgcgtttcgtacgcaagatgggggcatcaatcgtcgatatcggccaatccgatcatgcagtcaacagaccgacacacatcacaggtgacggtcaaccgtatgaacaacgtccaccaaatcgccattcgacagcactggacgcttgaattcacgccaatcttcgaccttcaccacccaacgaccttccgcaccgtcgaacaccggacgggcggtctgttcccaacggaaccgcttatacgtacgcccggtggccggatcgcgacgcgaataatggaagcacgtacaattagtgatcttccattcgtcggacgccgcacggtgcatgaattcctcgtcggacaagtcctccaaagtgagcataagcgccagcatgaggtcgccgtgactgaccatcaccacggattccgcgtccgacttgcggttcagggacgtgagcagattatgcacacggttttcggccacatcggcgatcgattcgcccgccggcggacgccaatacagcggatcagtgttcttgaacatccagttgcgcgcgtaattggttttgaaatcatctttcgtgatggtattgatctcaccccaggagcgttcgcgcagcacgcgtgtctcctcccatttcgccttaggcagggccatcgtggcagccgtctcacgcgtgcgcacgtacggcgagacgaggtaacggtcgaacaacggctgctgtgagaccagccagcggccgatgcagtccgcctgcttgcggccggtggccgtaagcctccacgaacggtcgggcacggtgacgttatcctgcgtatacagcgagttgtcaccctgttcaccggcactgataatcacgtttgcttcggattcgccatgtcgaatcacatacaaatcaaggggcattcccatattcgcttattcctttgctttcatccacatcctgcgcgcgtttctcgttctgccgttcattcggccggcgcgcatcatcattgaatgcttccaccgtagtcgatttgaacgtatgccacacgcgaaaccacgtcgatttcacgattggcacacccgaatttcgcaatgccgtcacgtccggttcaccgcatcgcccgcgacacgccgaggcgctactactccggccagatgccgttctgtgagtacttggcacggtattcccccggtgtcatgccgctatgttttttgaagactttcgtgaaatggctttgcgaccggtatgcgaggatctgcgcgatctcattgaagctgtattccgagtatttcagcatgttttcggcggcttccatgcgtttgtcggtgatatattgcgatatcgctgtgcccgtctcccgtttgaacagttccgacagatacgtgggattcaaatgcacgcgttgtgccagaatcgcgacagtgattttctcatgcagatggtagtggatgtagtccatgcattcgttgacggctttggaatgcgtttccgtcttctgcatgtcggccatggcccaagtgaagaacgtcatcatgtcggtatgcagacggcgcacgtcgtcaggggttttgcagctttccagattctggatgtacaaatcggaggcgttgtaggcgtcttcctcgtccatgccaccttcaatggcgaaacgcgtggccaaggtaatggtggtgatgaaacggtatttcgcatttttcagagaatcgtccgacagatggccgtatagtccggaatcccacagtttcgcgctttccgaaatggcattgatgtcgccggagcgcatcatgtcatactgcttcatttcctcaacgtagcgatggtggcgtacccgatcctcacgcgaaagaaagtccagataccccagcttcgcctcatcgacaaccgccattgctcccctgccattttgtaactaccttctttcaaggatatctccattgctcacaaaactgatctgttttgcctagaagtaggtgctccagccgagtttgacggctaggatgatgccggtgagcacggcggcggcacgcatgatgttttcgggaatatgccgggttacgggaggtgcgatggcactgccgatgatacatccgatgcacattatgatggcgaacggccaatacacggatccacgaatgatgaacatgatcgcagcggaaatattcgcgccgaaaccgaccaccgttttcaacgcattaatctgatggaacggaccgatcttacccaagtcgagaatcgccaaggcaagcgtgcctgctgcggcaccgaaatatccggaataaatgccgacaaaacttacaccaagccacaaccaccatgggtcatgcagtttgccatcatcggttttattggcgatctgtgcagccctttcgccttgctgcgattgaggaagcgcttgcgcgacggcatctcgcgcagcagcttttttccgaggattgatagcgatgattaacgcactgaacaggatcagcggtggcaccgcgcattcgaacacttctgccggcagttccagcagcaacagcccgccgatgatgccaccgaccaatccgatgcaggcgtagacggccacgcgcacgccttggcctctaagctccctgcgggcggaaagcagtccgccgatgcccgtaccgcacacgcccaccgtgttcgtggtgttggacagcacaggcggaatgccgaacgccagcaacgccggataggatatcagcgaggatgcgccgaccgcgtatccaacgaatcccgccccgatgccggctgcgagcaccagcagcaatgtggtgatggacactcccgcgatcatgaccgtttcccccgatttcccgactgatatgacaacgggagccaagcgtaatggcttggctcccgaaaatatcggttttgttcagaacgtggctgactgccgcgtttgaactatcgttgttcagtgattgcgcttggcaatcagcgactcggtccagtaggcggcgagcgggatcagcgcccactgcaaggcgagtcccggcagaccggcggccaggtcgctcgtccatgttgcggcgaccgccttgcttgagccgaatgcgaacacagcgatcgcagtggccgcggtcagcaccacacggccggccagctgggcgatgaccaccttcgcaagactcggcagcttgacttcgcgcagcaaaccagccacaagaccatacgcgcacaattccaccatcatcagcggcaacatcgccagcatcggcatgccggacagcaggaagctggcgagcggcgcggcggctccggcgatggcgccgacggcaggaccggcaatcaggccgacaaagatgatcggcagatgcatcggcagaaatgctacgccaagcatggtgccctgcccggaaacggcaccgataacatggaacagctgcggcaatgcgaccgcggccacaatggccaacacggtggccgcggctttggtgctcaggctcagcttcggcaggtcggtacgatgcaaagcgcgcacggacatagttgcagaatcagacatattcattctccttttgttttcttctcttcaatggtcgtcatacgttatccggcaatgcagtgtcgacgatcatgtcggcagccgattcggttccggtctcttcgaaataacggttttccaacggaatccactcgtcgacgaaacgtcgcagcatgctcggattacgttgctcgagccgacgcagttgcccagcaggcgtaatcgcaagacagatcatgcaatcgtagtacccgcgcagatcgggatgcatgctgtagctgccttccacgatggtcaaccgagccggttcgacggtacgagagaccgcgaaatcgcccgaatgacaatcccatggacggtattgcacggtttttccggcgaaaagcggagccaatacttccgtttcgaaccgttcgcggtccacgttcccgccgggttgcgcgaatcgttccggcgtgcgctgctcgggacgtagaaaaaaatcgtccatatgcagcacgttgccgccgaaacgcttgttgacggttgcggcgagcatggttttgccggatgcgcatggcccgtctatcgcaacgagcacatggtcgcgttcggcaagcagcgcttcaatatgggcgattacgacaccgcctgttcccgccggtttcgtggtcattacggacactgtcagtcgagcacggtcagacggtacgagcgtgagccgatgccgagttcttcggcgtattcgagcgtgtgttcgccgtggcgggaagcgatgcgttcggtgacggaagctccgtcgggggcaacgtggataaggtccacgcatgcctgatcgagcgccaccgggtcaagcgatgacaacacgccgatatcgtgcatgtccggttcggatggggcggggaagcagtcgcagtccacggacaggcggttcatgacgttcagatacatcatgttgccatgcatgtggctgatcactgcttcgtcggcttcagccatcgattcgaggaagtcatcttggtcggcttccacccagtggtcggtggccacgcccgcggaatggatccagcgtttgccgttcgacgatgcgatgccgatggacacgtttttgagcgcgccaccgaagccgcccatcggatgccccttgaaatgcgagagcacgaaaatagaatcatagtcgtcgatatgcttgccgacgatgtcataggcgatatgacggtgcttggctaccggaatttcgatttcaccgcccatgtccatgatttggatcggtgcgatatccgcgtatccacgttccttgaacacggcaaggcttttctcaggcgtttcgcgattgccatcgtatgcggtcgcacattcgacgagcgtgccgccgatctcctgcacgagatccttgacgagcgccggattgaggttattggatttctccgattcgccggaatggattttaatggccacgttgccttgaggcttgcgtccgagcgcatgataggctccgatcaggctttccggcgtgatcacagatgtgaagaacacttcgggcgcggaggcatcatcagtgcgatgatccaattcgtccagcttccttgcttcgaaatcagccatgaattctccttattctgttcgattttgcttccagagccagattaccaacttcaagtcgacttgaagcaaaccgacgcagcgcaacggccacatgccacaccgatagtcatatatcgaaacagtccacgcatcaaccatgccaatcgggttcactggtgcagtgtttcgcatggcatctatgaggaaggacgtgtatccatggccgagctcatcacaatggcgttgttctgtggtgcgttgatcgtctgcattatcgccggcatttccattattccggcgttgttggccggcgtggtgatcttcctagctcatgggcgtcttaccgggcatacgttcaccgccatgatttccaaaggtttcgcgaccatgcgtgccgccagcatcgtggtagtaacgttcgttctgatcggcctgctgaccaccctgtggcgcgccgcaggcactgtgtcgttcattgtgacgaatacggcaggtctggtgcatcctcatgtggtggtcctactcacgttcctgctcaactgtctgatgtcgctgctgaccggatcatcgttcgcttcggctgcgacgatgggtgtgatcacgatgacgttgggcgcttccatgcaggttccaccggtgttcctcggtggagcgatactgtccggcatctatttcggcgaccgctgctcccccgtatccaccagcgcccaattggtcaaaacgctgacgcgcacgaacattttcgacaatatccgactgatgttgaaaaccgccgcggtaccgttcgtgctgacgtgcgcagtgtatgcggcattggcgctgtgcacgcatccttccaacggctccattgacattgccggactgttttccaacgcgttcgatcttgattgggtcaccgtcctgcccgcagtggtgttggtcgcgctggcgatcgccagggttgacgtgcgcatcatcatgaccgccagcatactgactgcattgccgatttgcgttgcagtgcaacatatggattggaccgcgattggccacgcactggtattcggattccactgtgctgacgcgcgcgtcgcaccgctgatcgatggcggcggaatcgtttcaatggtcaaagtgatgctgatcgtatgcatttcatcgtcatattccggcattttccaagagacggaactgctggatggcgcgcatcggatggtcgcatcacttgcccggcatatcagcgtattcggcgccacgctggtaacgtctctcgtggcgagtgccgtcgcctgcaatcaaacgttgtcgatcatgctgacaaatcagctatgcgaccatctggagtccgacgagcatcgcaaggccatcaatctggaggacaccgccgtggtggtggctccgctgattccatggtccatcgccggagcggtgccgctcgcttcagtgggagcgcccacgtccagtctgacattggcagtgttcctgtacctgctgccgatcgcgcattggatttcagtatcgttggcacggcgctgaagtcatcgctttccgcaccataccgatgtccgaaccggccggaacacttgagacacgtgattgatttttgcaaaacatggtgggctcgcatagccaccaaggaaatggttttcgtcggcatcgtcactttggccgcctcactagtggcttcgtggcttaaacagtttccgggattcagtctgttcggcgcgctgatcatcgcattgctcatcggcatggcggcccagtttccgattcgcaaatggtattccagccgttccatggaacacaggtccggcgtgaaggacgcagcaggacttatttccaataaactgttgcgtctgggaatcattctgctcggattcaagctcaatctgaccgtattgttcacccaaggcatcaagtgtctgcccatcgcggccgtggtcgtgacactcaccatcgtggtgtgctacgccatcgcccgcaaatttggcgtcgacccgcaactcgccattctggtggcgggcggcaccggcatttgcggtgcggccgccgtcatgggattgtctggctccatcaaagtaccgccggaaaaagaggatgaaaaagccaacaacgaagtgatggccgtggccatcatcgccatcatgggcaccatcttcgcgttactggaaatcacacttggaccattgaccggtttgagcaaaacacagctgggcattaccgccggagcttccttgcacgaaatcgcccatgccgtggcggccggcgacgcgttcggcgcggtggacatcgcaaccatcatgaaactgtcgcgagtgctgatgctggtgttcgcagccatcgtcatcgccgtttggtgggataaaaaccattccgaaatgccggcggacggtaaacgcaaagtgtcgttcccatggttcatgctcggtttcatcggcgcttccatcatcggcacgttcgtgccgtttatcggtgccatcgcaccgaatctggtcgatttcgcgtacatcgtgctcggcatggccatggccgcgcttggcatcaacgtgaatttcagcgccatcgccaagaaaggacagaaggcgttcctcgccagtttcatcacgtctgtgctgcttatgtgctttgcggccggagtctcagcgctgttcttctaatcggtcttgcgaacccgatcgcctaggatatggacgggcgaccgggttcgcaaacgcgatgtttcccgacggcccacaccccgattccgccattcgtatcccctcttacgcttccatccgtcatggcgtcatattctctgatgtcataatcgtcgacgtttttccgggaaactttagacgcgcgtatggaagcaacacgagggagaatcgtcattgcgctttggacgcctgtctgtccacccaattctcggccacatcgatggcctcatcgagcgtgactttggctgccttgtagtacttggaatccttgatattgctgttttcaatgagtttttgaccggaatccacagctttggacaatgcggacagcagtttacggccagtcaacgtcagtgtttcgtccttgccaagcttgttgaccaatttgtccgccttgtcgagcgactgctgcagttccttcttcgattcatccaacgattccgtggcggaagaaccgttcgaaggaacgtcgagcaattgccccgatgacgtattggactgagtattggaggatggtccgttcgttgtcgtgccgtccgaatcgttccgcgaatcctgcagcgcattcgtgccgttcttctcctggatgtccttcaggctgttattcagggagtccgtggcgctgtctagtgttttggcgatgagattgagctgcgtgatggtggcgtccgccttacagccttccgtatcgaccgtgttctctgcgctggtggccgcgtccgcgaacgcgtcgatgatgtcgttcacgccgagcgcaccacggatcaatttctgcagttcgctaccgttttcggatgtgtcgagcacggccttacgggccgagctgaattccgcaagcgattgccggcatgtgtccaacgcctcctgccgtttgttgtggtagacgtacactcctgcgccgcatgccacagtgagcgccacgaccacggaaaggacaatcggccaggttttgcggggattggaaggctgttcaacggcctgatactgataatccatatgcgtcctccccttgcgaatcgacggatgtcatcgttcttcgtcttgttaacctcgcctattttacgagtccgaagatgggaaaaacctgaatggacatcccacgcacaccaacgaagcggggtcgggtcggcataccatacgcggaatcatgcacatcgtcgacgtgcgtgaatccgcccatgccggcgaccacgggaatgccttgcaacagccacagcgccgtgatcgtcgaaatgatgatcacgctggctccacggatgaagccccacagccgcatcaaggtcaccatccgcatgacctatggcttccaccacgtcagcagcctcatcgcgctcatcatgctccgctgcggcggactcgacatacacctaccacaaccaagaacctaacccacgaaaacagcagaagcccctcaattcttcaattccactacaaaggtcacatcacggcatacgcacgccgacgcgcgtatgcgtgcacgactccagcaacgagccgtacccgccgttagatggcaggcttcagtatcgtgacgccatgcgttagcgtcaccatgcaacgagaggaacacactattcaatagtatatcatgaagacgtgacgttgcccttgcgcaggtgccgtaagactccgcggacaaagcaatgaggcttcccccgcgagaagggaagcctcatattccattcattctattcagcgatgatggcgcctaatcaccgatcatcctttgggaacagcgcatcgaaggcatgttccatcacggacttacggcggatcacaccgacgagtctgccatcaccatccaccaccggcagtttcttgaactgcttcttggcgaggattcgggccacctctccaacatgctggtcgggcgtggcggcaacgaccttacgcgtggcgatgtccatcacctttttgccggagagcgcctgcaccttggaggccacggtttcgtcgtcgaacaccaccatcgtcgaaccggtgccggtgggaaccgtacgggattcataggtggcaatcgatttcaggacatcgccgtcgctgacgaagccgacgagcctgccatcgccgttcaccacgggaaggctggagacgttgaggcggatgaactcgcgcaccacatgcgtgatgtcatcgctgtccaggcagctgtagggctgatcgtccatgatcccgcagatggactgttcccgggcctgcttgaacagggaggcggcgggggccacgtatgcgccggcgtagtgatgctcggcgggctgtccttcagtggtttcgaccgcgacttcggcggaagcttgcgcctcgtaggccttggcgttacgtgcggccttctccttggcacggctggcgacggtgaagatgcagatgatcagggcgaccagcgagatggcggcgcacagcaggtaggagaacgcgatgccgctggccgtggcggacttcacaccctgggacatgtgcgaggcggtcacggatgtttctgcggtgaccagaagcgaggtcgcaatggctgccgcgatct

SEQ ID NO: 842 - DNA, 362623 bp, Unknown
  gut microbiota DNA sequence
aaacagctcgagaagctaggcttctgatctgcttaggatccgcttcgcaacgattgcgtggaaaataataaatgaggtctgattcccgtaggagtcagacctcattctgctgtttcgaagactacttcttcttggtgtacatctgcgtattcagcaaagtggcataacgcttgatgaccttcggacgaatcaccttcatggaagcggtcatcaaaccattctcctgagtgaattcctccggcagaatgatgaacttacgtacggactccgcacgggaaacaccttcgttggcctgatcgacccacttctgcacttccgcacggacggcggcattgttggcggcctcctccatgggtatgtcgcgattcagccccttgctttccaaccacggacgcaaggattcctcgtcaagcgtaacaagtgcggaaatgaatggacgcttgtcgccaagcaccaaggcctgggaaacgaattcgcaacgcttgataacctcttcgatcggaccaggcgagacattcttgccgcctgcggtgatgatgagatccttcttacgtccgatgatatacagaaagccgtcatcgtcgatacgtcccaaatcgccggtacgataccagccgtcttcagtgaatgaatcctcggaggcttcctcgttcttgtggtacttcgggaacacggcggtacccttgacctgaatctcctcatcttcggcgatacgcaactcgaagccagggaaagccacgccgacggaaccctgatgatagggcacaccaagcggattgaacgcgcaaggagccgtggtctcggtcaagccataaccttcatacacgggcactccggcgccacggaagaacgccataagttccgggtcaagaggggcgccgcccgccacaatccactgggcacgtccgccgagtacctcacgcagcgaagcgtagaccatcggatcgaacgccatacggcgagccttggccagagcgctggccttgcccttcgtgctgacttccttcatataattctgagctgccacaaccgccgcagcgaacgccacgcccttggcgccatgtccggccttctgcgaggccgcgttatacaccttctcaagaacacgcggaacaacgatcatgacggacggcttggcgacctgaagatcggcgatcagcgtcttgatgccctgcgcgatgtaaatatgcagttcgctggccacgcagatgtagttgatggcgcgtgcgaaggagtgcgcctgaggaaggaacaacagcacgttgttcttcttctcgtgcagcagctgcggtatgtatgccggaagattcaacgcggtggtgcagtaatgctcatgagtcatctccacgcccttcggcgcggcggtggaaccggaagtgtatacgatggagcataggtcggttttcttgatggaatcaatgcgcgcatcgagctcctcgtcgcttacgccggaaccataggccatgatttcgtcaagaccgccgttttcgaagcagatgatatgttccagcgtcgggcattccttgtcggcgtcgtcggccttggcacgcatatcggtggtttcgaccaccagcagacgggaatcggaattattgacgatattacggatctgctccgcggaatccgtgtcatagatcgtggcgagcacaccaccgcatgccatgacggccgcatcgaacacatcccactcgtatgaggtacggcacatgaacgccacgccgtcgcccttcttaagaccgtaatgcatcagacctttggcgatctggcgaatatcggcgagcacctcgttgccggttttggtcacccattcgccgttcgtcttataggtgtagagcggttcgtcacccatacgctcggctcgatcggcataaatatcgtagatggtggtgccctcgtccagcggcggctgaccctcggttttggtggtcagcaaacccgtttccgggtcaaggaacgtggtggatgggaatccttcgccccactcgacggtgtgcggaagatcgatatggccgtcgggggagatgatgttgttcggatcgttgtagtccggagtgttaccggaatcgtcgctgacggggtgaacgaagtcaccgcccaaacgcagtgccttctgcgcaagatttgcagctcgcttgttcaaagaggtgatgacggacacgtgactctcctacacatttaaatccaatatctgtaggaatgatagacccatgaatgcgacacgtcaccttacggtagcgtagggaaagtgcgcatccagcggggcctgcgtaaaggaattgccatgcgatgccattcaataggtgaacttttcttcatacaaaggtgtgacccacgttacactggtgcgctgtatctgttcattttgatttctttaacgaggaagaaagggcacctatggctgaaacagctgaagccaccgtggtcttcggagttctcaatgagacctccgaacacgagtctcgtgttgctctgacaccggatatcgtaacgaggttgcgtaaatcgggtgttaactgcctgatcgaatccggtgcgggcgtcgcatcgcattatgttgatgaggattatagtaaggccggagcgcaggtcgtctccgccgatgaagtgattgcgcgtgccgacgtgcttggtttcgtcgatcgtccgagcagcgcgctgctcggacgcgttaagcagggtacctggattatcggtatgctcggttcgttcaccgacgccgattatgtcactgcgattgaaaaggccggtctggtcggtgttgccatggagaagctgccgcgtcagttgagctccgcgcagtctatggacgagatgacttctcagaattccgtaatgggttataaggcggccatcgtggcggccaacgcgtacggttcgttcctgccgatgatgaccaccgccgctggcacgatccgcccggccaaggtacttattcttggcgcaggcatcgcgggtctgcaggccatcggcaccgccaagcgtcttggcgcggttgtcaccgcgtacgatgtgcgtccggcttccaagggcgaagttgaatccttaggcgcgaagttcctggatctgggtcttgacttctccaagggtcagggcgagggcggctatgcccgtgcgctgagtgccgaagagcaggcccagcagcaggctgccgtcgatcagaaggctgccggcttcgatatcgtcatcaccaccgccaaggttcccggccgcaagcctccggttctgctgaccaaggctggcgtggccggactgcaccgtggcgctgtgatcgtcgactgcgcggcaagcgacctcggcggcaacgtcgaaggttccaccgtcggcacccaagtcactgaaaacggcgtgaccatcatcggcgctccgtacctgtcaagcggcgtttccactaccgcatccaacctgctgagccgcaatgtggccgatgtgcttgcgcatttcgtgcgtgacggcaagctggccatcgatctgaacgaagagcttgacaacgccatggtcgtggccggccgcggcgaggaagccaagaaggaaggggagtaagcaatggatatcgttgttgcgattactctgttcgtcctcgcgctgctgatcggcgttgaggttatcggcaaggtgccggccaccttgcatactccgttgatgtcgggcgcgaactcgatccacggcatcgtcatcgccggcgttgttatcgtcgccgcgcatgccaccagcccgctcgcctgggtgttcatcttcctagctgcagtgctgggcacgatgaacgtggtcggcggctatgtcgtcaccgaccgcatgctggagatgttcaagtccgacaagggcaagaagaaggaagaggaggccaagtaaatgggtaccatggctgaaatgctgagcacgccgctcggcgtcatcgaatggttcgtctatctgctggccgccgtgatgttcgttatcggcctgcacttgatgaactctccgaagaccgctcgcaagggcaatatggtctccgctgtcggcatgatccttgccgtggtcatggcgttcattgtgctgttcgcaggtgagatctccaacggattccagcatggcgttgccgttgtgctgctgatcgccggcatcatcatcggtgccgtcgccggtgtggtttccgccaagaaggtcaagatgaccgacatgccgcagctcgtttccgtattcaacaccgtgggtggcggcgccgccgcgcttgtggctttgaacgacattctgacctccgagggcacgccttccatcgtggtgttgatcaccgctggtttgggcatcatgatcggttccgtcacgttctccggctctctgatcgcagccggcaagctgcagggcatcaagtgggtgaagaagctgaacttgccgggcaggggcttctggaacattctgttcgccgtactgaccgtcgcatccttcgtcatgctgtgcgtgcagccgggccagcgtctgctgtggtccgtgctcaccaccgtgttcgcgctgtgctacggtctcgtgttcgtcatcccgatcggcggcgccgatatgccggtggtcatttccgtgctcaacgcctgcaccggtactgcagtggccatgtctggcttggctatcaataacatcgctctgatcgtggccggcgcactggttggtgccgccggtgtgaccctgtccatcgccatgtccaaggccatgaaccgtccgctgctgtccgtgctcgcaggcggtttcggtggtgccaatgccgccgctggcgctggtgagggtccggaaggcagcatgaaggaaacttccgcggacgatctggccgtacagctcgtatacgccgaaaaggtcatcttcgtgccgggcttcggtctggcccaggctcaggcccagcgcgagcttgccgatcttggtgtgctcctcaagaaccacggcgtcgaagtctcctacgccatccatccggtggcaggccgtatgcctggccacatgaacgtgctgctcgccgaagccaacgtgccgtacgaggagctcgtcgatctggatgacatcaatccgcagttcccgcaggccaacgtggctcttgtggtcggcgccaacgatgtgaccaacccggccgcacgcaagccgggcaccccggtctccggcatgccgatcctcgacgtcgacaaggcccagaacgtggtggtcatgaagcgcggtcgcggtaccggttatgccggtatccagaacgaactgtacttcgaagacaacacgcagatgcttttcggcgacgccaaggcaagcctgcaggccgttatcgcggcagtcaaggagctcatcaactaacagctgaaacgttgcgttgatgcttttcctgaaaggtctcttccggtgagggaagggacctttttgcatatggtgattttcgtaagatcaggtctgttgcatgcgaattgtgagttatccacagtcgttattcgcctgtggatatgggtggagttttccacatatccacagattttcaaggttcggtggcgcaagatgatttgaatatgagacagtaggtgcaccctacaacaaaggagttgcacatggcggaaataatcactggcccgttccatatggatgaacagggatttttggcaacgatcgaagaacttatcgagcggtttgatggatacagttctggcaaatatcttgcggaattgggaaaaatccacgatgaatacggtgagatcggatctctttcgctttttgacgaaaaagtctgtgaactggggaaggaattattctgcagcacatcatgggtggcgaatctggcgtgggccatgatttcgttcgattatgatctggttgagcatgatgcgaattttcttgatggatgccgtaacatcgtgcgtaagtacggtatgagcgtttggctctatgaaatgatcaatgacgcttcgatagcggtggctttgcaaaggcccagcagcagaatgccattccagattggattgacctacaccaaggatgtgtttcggagaagcaagaaaaagggtggaaaatacgctaccagcaaaaagaagagactggcctgcatggctgaatatttgcaggaagtatattggctggccgcgtacagtctgctacgttggggtgaggaagagccgcgtgcggccgatgttgcgttgatggtgcttggatatggcggtatcggcatgtgcatgctgagggacgatccgaaagtggtggattccggatgcgatgaagacttctcctatcgaaatctgtgcgaccatctgcgcgatcttagaattcaagccgatctggattatgcttgcaatgccgaccttgccgaatccatgttgcttgaatatcccgcgtgtatggatgcgcgatatctgtacgatgcggggaaaatcgtggaagcgtatcgtgctttgtggaacaagcagactgaatcagcttcgcaaatcatggaacgcgtttaccagaagggcgcgtatcaggtgacgaacatttgggaggatccgctgtacctgcatgatcttgccctgtcgctgttgggggcagttggctcgcggcctcttactgaagggttccggactcgcgatgacaagctgttccagcagggagtcgaaagtctgagacgaacgactgaatccgttaaagggatggggttggcgatgacattgggagggtgtatctgcttcccggaaccggaaagtagggatgatgcgcttttcgcaccgcgaaaggagaagaaacaattaatggacgcctgtaacgggcttagggatttgtcggcaatggttgcgctctaccgttttccaagggatatcgaatccctgcgtgccacgcgcgcgcttctcgctcatgacgcgaagggatatatcgatctgatgggtccatacatgggaagcgcggatgagacgggaggaaacgaggggaggccggtttcaatcggcgactgatcggcctctcagatcgcgaacgtcaaagcgtatgtatcatggttgtgccgagattgaatggcggaacgttcagatgaactttgtctcttcgatctcggtgcatgctatgccgtattgctccaacaattcgcgaaatgcttttacgtatctatctgtggcgaacttctgtgtgaatgacagacagaagttctcgtttacgtaattcacttccaccagcgtggacgtccaatccgcataggcgtaacaattttggacatgccgtgccaaagaaccccgatcgaacattcctgtataactgatgtcagccgttgaacgtcgcatgctgataacttgtctgcacatctgtttctggtcttccagattcggcaggctctcaagatagtgattcagccaagtggttcctgccagcttgggaatcagtgtttcaatatcgcactcgtctacctgttcatggggtattttcagcttggtccggcagatgcggcccttggcacaatctttgcacagaccatcagtgtgatcgtcgcgctggtggtgattcgttgcaagcagaaaggcgttcgtttaaggaaggctgatttcaagccgaatcgcaatatgttgggcggcattctcagcatacggacgttcgtatatcggcttcattaccctgccttacttggaaatcgtatcgtcaaggtgcgcaaacagtgggcgagccagccatgccaagggcagtgatgccagcgctgaaatcagcagaataagccaaaccgtgcaacgtgcgtgcagccatccgtaaagcatttgcccgagtggctgggcgcatatcgtcaatgatgaaataatggccatgaccttgcctgtaagcgcggttggtgtcctcatctgaatagatggtacgagaatgaggttcaagaaatcaacggcgattatgactaccgcagtgcagagcaccagcatgatgagcttggtttgcgttgaacatggaagcaggaaggcgatggccggcggaagcagcataagactttccatgaacaacaacgaaggggcgtttcgtgatttcaaacggttggcgaaacacccagcgatgaatgttcccgctatgccggcaatgccgataatgccatcgcatagaccatatatcgccgcatcgtaacctaacgtagttcgaataatgtaaggaaagcttactgaactgaatccagtcagtatcagattgatccatgtgcaaacaccggctaatcgtgctacggtcggctccttgcgaagcaggaaagcggtcgccgaatgcatatcgccaatgatgacgccgagcaggcagatgccggcatcatcttgattcgataggggcttcgcgagtctgatgaagcattcaaccatggctgccgacagaagacatgctgcggtgatgagcatcatcgatcgaatgccgaccagcccgtacatcatgccacctaggaaactcgggagtaattggctgagctgctgcacttggttgatgatggccgcgcctcggcgaaggtcagtggaggactctcttccgatgatttgtggcagtgcggattgcacgacgggagtttccatggcatcgagtactgccaacactacctgcatgatggcgatggcgagaatgttgaatccggatagtgcgaaaaacacagtcgcgagcagtgtgacgattcctgagatgatatcgagcgccaccatcatggcacgtttgcttactcggtcggccataacacctccgaatgggctaataagtatggtcgggatgacggatatggccagcacggtggcgaaggtcgtggatgatgcggtttcgtccagtacccacatggacatggcaaatcggagcatggtattgccgaacaaggaaatgccttgaccgagtacaagcaggatgaagtttgcggagcgcaagctggattggagtgtctttgctgacgagtttttcatgactattcctttcgataccgactgacggtatgtaaaaaaggtacaaataaagacagattgacattgccgagcttttattgcggattgctggcgagtaggaagaagccttccgcaagccgatcttccatatcgctgtcgtgatcgataagtggaactccgagcgagtccataatcaatccaagacagtggatgcgatgcttgaattcacttagggtagtgatggggtagaagtttggggctagccagtaattgaacagcagtgaaaaaagttccgcggcttcttgagggtattcggttgtgattgaaccgtcccttaacccctcctggatgaagtcgtacgcgattttggtgctgtcggttcgccagatgcgaagattttcggcgaggattttcgggtcgttcagcagtggaaacgcatcgcgcatgagggtcatatgttcggtgtcggtaatctgcatcatgagcgaattgcgtagtttctgcaatccgtttcgtgagccatcctcttgatttgcttggggaagaagtcgttcgttgtcggaatctatcagcgcatgcagcatcgcttctttgtttttgaaatgatggtagatagcgcctttgctgaggtcttcgagctcgtcaagaatatcttgaatcgtagtgcgctcataccccttttgcgcgaacagctttttcgcggcgtcaaggattcgctgtcgtgtcacctcagggtgcgcattgcgcgccatatgcctctccttcaatgatggagtcgaatacaccaacattatacataccgttggtcggtatggtatgtcggatatctcccagctcggtcgaagaggtaccgaaagaatctctgcagatttctgcgaagaaacctgaatctgcgttgccggggtgcgggatgtctgtcttttctgcggttggtgcatgattgggtgtccagggtcaacttgagtgagtgacggctgggttcccgaagggaataagaccctggttcctatatgcctttttatggcatggggctttcggtgaagaacgattgcatccgatgtgaaaaatcccacaaatccggcccacgtcctgctctagaacttcaaaactgttgccaatactggaaacacgccgtatatagtgtttgaaaatgtgacgagacactgtatgttgtggtcttgatttttattttcgttcggataatctgtgccacataccaacgacgtacggtcgtgaaaggacgtggaacatgaacattacgttatacaccaaagcaaactgcccgcaatgcacggcgacgaaacgccaattggacaaacgaggccttccctatacgactgtcgacattacggccaacgcacgtatttccgacagattgcggaacgaaggatggcggcagatgccagtcatcatcgcagacgacgaatcctggtccgggtatcgtcccgacaaaatccacgagctggaggctcgctgccggtgagcgcgttggtgtacttctcgtcggcatcgggcaatacgacacgcttcgtcgaaggatgccgattggatgaattcggcatccatacaatgcgcatcccgctgcggccggacgagccggagctgcatgtggatgagccctacgtcttgctgacacctacatacggcggaggaacaatcggcaaagcagtgcccgtgcaagtcaaacgattcctcaatgatgaacgcaaccgcagtggcatcatcggagtcatcgcatcgggtaacaccaacttcggcgaagcctacggcatcgcgggcgacatcatagcggctaaatgccgcgtgccgctactctaccggttcgaactgatgggcacttcagaagacaccgcgaccgtgcgcgaaggactgcgcagatttttcgacgaatacacacaacaggaacaacgataaccatgccagaagattcaacgacactacacgcagcaaccgacgtcatagcctcctacgatcgcgcccatgactggcactcgctcaacgcgatgctgaatctctacgacaagcaggggcgcatccaatttgataaagacatccaagccgtacgcgagtacgtcgaaaagcacgtgctgccgaacaccgtccgtttcaactccacgcaagacagactcagccggctcatcgcagacggctattacgacgaatccgtatttgcccaatatgatgccgaattccttgacaggttttaccgcaacgtggatgactgcggattcgaattcgatacattcctcggagctttcaagtttcaccgctcatacgcattgaaaacctttgacggcaaacagtacctggagaacttcccgcaacgcgcggccgccgttgcgctcgcgcttgccgccggcgaccatgcggccgccgaatcgtatttcgaagaacttatatcaggacgtttccaaccggcgacgcccactttcctcaacctcggcaaagcgcagcgcggagaggcggtcagctgttttctcgtacgtatcgaagacaacatggagtccatatcgcgtggcatcaacgccgcattgcagttgagcaaacgaggtggaggcgtcgcgctgttgcttagcaatctgcgcgaggccggcgcgcccatcaagcgcatcaaacaccagtccagcggcgttgtgcctgtgatgaaactgcttgaggactctttcagctacgccaaccagttgggcgctagacagggtgccggtgcggtgtacctcaacgctcatcatccggacatcatgcatttcctcgataccaaacgcgagaacgcggatgagaagatccgtatcaaatctttggctcttggagtagtgatacccgacatcacattcgagctggcgaagagacacgaacctatggccctgttcagcccatatgacgtcgaacgcgtcatgggtagacccttcgctgatgtttccatcagcgaaaactaccggaatatggtggacgatgaacgcatcgggaaaacctacatcgacgcacgagagttcttcatgactttggccgaattgcaattcgaatccggatacccgtacatggtgttcgaagatactgtgaaccgagccaacccgatcgacggacgaatcgccatgagcaacctgtgctcggagatcctccaagtgcaggagccaagcacctatcatgaggatctgtcctacaatcacgtgggacgtgacgtgtcctgcaatcttggatcgctcaacatcgccaaagcgatggacggtgatttgggacgaaccgtggaacgtgcgattcgcgcattgacctcggtgtcggaacatacggacatcgcgtgtgtgccatccatccgacgcgccaacgacgaaggtcatgccatcggcttgggacagatgaacctccatggattccttgccagagaatcgatcatgtacggttcgccggaagccctcgacttcaccgacatgtacttcatgaccgttgcgtaccatgcctaccgtgcctcgcatgagctcgcagtcgaacgcggaacacggtttgcaggcttcgaacggtccgcctatgcgaagcctgcaggcgcaggcaactatttcgacaaatatacgaacggcgagcgctcgctggcgccgaagaccgggaaaatcgcgtcgctgttcgcacggcggggcatccatatccccaacgagcatgattggcgtcgtctgcgtgacgacatcatacgtgacggtatcttcaaccaatatctacaggccgtgccgcccaccgggtcaatttcgtacatcaatcattccacgagctccatccatcctatcgcctcgaagattgagattcgcaaggaaggcaagattggacggatctactatccagctccgtatatgaccaacgacaatctccagtatttcgcggatgcgtacgaaatcggatggaaggccattgttgatacgtatgccgaggcaacgcggcatgtcgatcaaggcctgtcgttgaccttgttcttccccgatacggcgactacccgagatttgaacaaggcgcagatttatgcatggcgcaaaggcatcaaaacgctgtattacatccgcattcgtcagcaggcgttgtctggcaccgaagtacaaggctgcgtcagttgcatgttgtgaaacctgtgacttgaaaggaaaagaaaagacatgtctcgtttggtttaccgcgcgatgcttcgtctgacggctccggacgaatacaggcggttatacggccgcgacgataagacgacgattagaaaggacgaccatcatggcgccgatatccgtacctcgacagaggattaagctcattgaccgtgtgagtgccatcaactggaacaaacttgaggatgacaaggaccttgaggtatgggacaggttgaccggcaatttttggctgccggagaaagtgcccgtctccaatgatttgcccgtttggcgcacaatgagcgaggccgagcatacgttgaccatgcgcgtgttcaccggtctcaccttgcttgacaccatccagggaaccgttggcgcggtcagcctcatacccgatgcgcttaccccgcatgaggaagccgtctatacgaacatcgcgttcatggagtcagtgcacgccaagagctattcctcgattttctccaccttgtgttccacccgacagatcgacgaggcgttctcttggagtgaggagaacgagtatctgcaaaggaaagcgcgcatcgtgctcgactattacgagggggatagtccactcaagcgcaaagtggcctccacgctgctggaatcgttcctgttctactcaggcttctatctaccgatgtatttctccgcgcatgccaaactcaccaacaccgccgacgtgatccgtcttattatccgcgacgaagccgtgcatggttattacatcggatacaaatatcaaaaagggcttgagcgggtcagcgaggacaaacgcggcgaactgcgcgactatacctacgacctgctcaacgagttgtatgacaacgaggtggagtacacgcgcagcctctacgagcctgtcggattgacgcaagatgtcgaaaagttcctgcgatacaacggcaacaaggcgttgatgaatctcggatatccagcgcttttcccacaagagatctgcgacgtgaacccgtcgatccttgccgcgttaagtccgaacgccgatgagaaccatgacttcttctccggttcgggaagctcgtacgtaatgggcaaatcagtcgagaccgacgacgatgactgggatttctgactgtatcccagacaaccccgaggaaagcagctatgggaaaccgtcacgggcgagttcgcgtcggatcatccacgcagatatctgcccgtgacgctgtcaggacaggcacggaccgtttccggtgttccctcgcatacgatgcgaccgccggccatgcctccgcccggacccatgtcgatgagataatccgcgttcgcgattacatcaagatcatgttcgattactacaactgtcgccccagaagccaccaacgagtcgaacacgcgtagtaataccagcacatccaacgggtgtagcccgatcgtcggctcgtcgaacacgaataccgaaccggactgtccgcgtcccatttcgctggccagcttcagccgttgcgcttcgccgcctgataacgcaggagtcggctcgccaagtgtcagataccccaggccaagctcatgcagtgtggccagtttcgatcgaacggggcgtaggaaatccaatagaggcatcatctcgtcgacgcttagcaacatcaattccggcagtgaacgggcgacgctgtccgcgcaaaccaatcgaatgtcatcggcggtctgtgcataccgtgtcccatggcaatcgggacacgtgacgtcaacatcgggcaggaactgcacgtccaacgaaatggtaccggttccatcgcaagtggagcagcgcaacttgcccgtgttgtatgagaatgcgccaggtttgagattcttcttatgggcatcggaagtcttcgcaaacgcacgacgcagatcatcgtgaacaccgcaatatgtcgccacggtcgaacggatgtttgctccaatgggcgtggcatcgatcagttccactttcgaaatgccatccgcgtcaatcagacgaatcgagctcggggaaacggtaccatcagcggccgagcgcaacgcagggaccagtgtctccaataccatcgtcgtcttaccggaacccgacacgccagacaccacagtgagacgtcctcgcggaatgtccaccaataacggatgcaccgtatgcacgatattcgtctccaaatgaatccgacccttggcgaacatcgcatctaagtcaatctgcggccgcgcccgctcatgtattttgccaccatcacgcagaaaaggcgctatctgagaaccaggtgccgtcataacatccgccaccgcaccctgagcgatcacatgaccgccttcggcaccggccgttggacccatctccaccaaatgatccatcgcggcaagcacacgggtatcatgatcgaccacaaccaccgaattgccgtcagccaccaaatcgcgcatcacgtccaacagtccatccacattcgccggatgcaatccgatagacggttcatccagcacatacagcacgcctgtagtgcggttacgcaccgaacgggccaactgcacacgttggcgctcgccggtggacagtgtcgcacctgcgcggtcaagcgacaaatagcataatccgagttccacgagccgctcggccgtatcctcgaacgattcgcagatggctgtggccatcgcacgcatctcctgcggtaatgacttgggtactgaacgcacccaacgtatcgtttcgtcaagtgtcatcgccgtggcttgtgccagattaataccgagaatctgcggttgacgagcctgctgtgaaagcctcgtaccggaacaatccggacatggttgctcgctgaggaatctcgacacgcgtttgatacccttctcatccttggctttggcgagcgcgttctccacggtatacacggcgttgaagtacgtgaagtcaagttcggcgaaatcattgcctttcttcggtttgtatagaatatgcttcttgacggccgggccgttgaacacgatgtcccgctcggcgtcggtcagctggttgaatggaatgttcgtgcgcactcccatcgcgccgcacacctgcttcatcagatcccacatcaacgatccccatggtaatactgcgccggcgtcgatgcttttggtctcgtctggtaccagggaagcacggtcgacggttcgcacgatgcctgttccggagcaggtcgggcatgcgccggcggaattgaacgacagctgttcggcggatggtgggtgcatgagttgattgcaggatgtgcatcgtataggcaactcggccgccacgttcattgtgggacggttgcgttcgccacaatgctcgcagacatgtgaggcgcaacgggagaacaacagacgcagactgttgagcagctccgtcatcgtgccgaacgtggatcgcacgccgggcactgaaggtctttgatggagggcgagagccgcgggcacatgacgtatgtcgactacctgcgctcgactcgcttgggtgagacgtcgcctggtatacgtcgacaaagcctccagataacgtcgggatccttcagcgtatagcacacctaaagcgagagagctctttccggacccggagataccggcgatgccgactaatttgttcaacggaatgtcgacgtcgacgttcttgagattatgtacgcaggcaccgcgcacttcgatgcgggacggcgggaaagctccagatgattgttccatacccactacagtacctgtgtggcggaaaacacgcgggcaggggaaccttgttcgtcatggtattgctgcaattgtggtatctgatccatatattcgaccgcaacggaggggatgccattgtttttcacggctaccgtcagcgtacgtgaatcggaaggcgatgcggtggaatacggggaaatggattgggaaaggaaggaatcatatacatcgtatatatcaatgggaagaagttcgccggggagcgggaccaaagtctgttccccggcgcagggcggctaacaagcgaatgcccagaacatccgcataaggcgttgatgggctcatccgccgtgtcagcgtgttgaacgatgtatcatgccgctcaacgtgatgataaggcgttggcgcccttgcctttcgtggcgagcgtcacggcgatgatggacgcgagagcgacggcgtacagtacggtgatgatcggaatcagcgcgctgtatcggtgggctgcatccgtcgcatgagagacgacgaaggatgccaactggttgccggacaatccggcgaacgcccacgcgctcaaagccagtccgtgcacggtggacactgacttcatgccaaagtgctgctcaatcagcaccggcagcgttgaacacggcatcgacggtcaggatgacgctgatgcttcccgcgatggccttggccagaccgaatcccgcgacggcgatgccggtggcgagacttttggcgaaccacagcattaggttcttcaccggcgtcagatagccgacgcccaatccaatgcccatgattacgccatagaagatgagcacgccgggggcatcctgccgcgatactggctccggtaccggcgaacctgcaggcgaagcagaccgttgagatcaaagccgatttcttgatgtccttttcgacgaagggtccaaggaaggcggccgacatgccaaggatgttgattggccatgtaatattcgttcctctctgttgtttgttcgccctgcgacgaacaaacaacaagataatggtgaagtattccgtggccttgagcgtgccgggaggcggcagaagtgggtaagccgttgatttcattggattttccaacaaatgaacattgtgtatgttcaccttggggataagcatgaggaaaaactcatgtgaaccttgacacagttttcatggctcacaattcgaatgcgcgtttgatgaaggcattgacggtgttccaatacagttcgggatccacgacggatgcttccatatggcgtgcgtcgggaaccatgagcttttctcgatcgatgctcgagcacgcttcgtaattgatcttgagaaaacgtgagctcacgatgtcgtcctgttcgccatgaatgaacagcatcggaatgacagtatgtctgagcgactgcagacaggtggcttccgaaaaatcgtaccctgcataatgtttgcagaacaatcccgcggcatccacacataccgcggcaagcggtttcggcagacgcgacgaatgccgaaggctgtcgatgaacaccatgcgcgcagacgtgtagccgctatcgacaatcgcggacaccacattgcgcggcagacgcgggtctcccgtcgtcatcatcaccgttgccgcgcccatcgaaccgccatacagcaggatacgggcgtcggcgtcactcgacgcgataaggtcgatccaattcagtagatcattgcgttcaagccagcccatgccgacgtaccgtccctcgctcaagtcttgggcacgctgtgacggaaccaatacggtgaagcccatgcgggcgtaacgatgtgcccatttcgcggtttcctccggtacaccggtataaccatgcatgcagattgcgtacaggtgtggttttggcgcagtgcaatccggatcgaacagccatccatgcagtcgaagtccatcatcgctggtaatcgtcacaggctgtttggcttgcgcgaaccattctcctgcttcctgtgcctcaccctgctgaagtttttcgatacgctccggcgcaatcagcgattgatggaaaacggaacgtttccattgcgtatcgatgcagaaatggaacaggtatttcgcagtcgtagccaacgatgcgatacaggcagccgtcacggctcccgtggcgatgcaaatgtcgcgaacgattgtgtcattgtcatgcttcattgctgtctcgtttccttgcgattgacggattgttcacaattactatcgattgtacgtgcgtacggcgttttcgtgggctttgacagattttttcatttttgatgtgagacgtttttcaataatgtccgccctcgccgtatactggttaactgttgtcttggcgagggaagcgtatggcttccgtaatcgactcggcgtgtgattgtaggctccttgtgggttgattcacggctcgttgatgcgccgaaacagaatgaacgaataaaacataaggagaaatagcccatggctaccaccattaccctcgaaggcgctgcccgtaccgagttcggcaagggcgctgcccgccgcatgcgcgtcgccaaccttattccggccaccgtgtacgcaggcggcgaagagccggtcttcgtgcagctgccgatgaaggaaaccaccctgtccctgcgtcacaccaacgctctgttcaccatcaagttcggtgacgagaccaagatggccgtcgtcaaggacgttcagcgcaacccggtgaagcgcatcgtcgagcacgttgacttctacgaggtcaaggccggcgagaagatcgacgtcgaggtgccggtgttcgtcgagggtaccccgaagggcgctgccgtcgcattcgtcgacattcaggagctcaaggttcgcgccgatgtcgccaacctgccggagaagatcgtggtcaacgttgacggcctgaccgacggttccaaggtcttcgccaaggacgtcgtgctgccggaaggcgttgtgctcgacgtcgaggatccggaagagtccgtcgtcaccgtcgaggtgccggaagacgctgccgatgaggctgctccggtcgaaaccgctccggctgaaaacgctgagtgagttcagatagcttaaggaagcaaacttccattctacggttttgaacaaccgtaagagatgatgaaaagcccatgtgctcagacgcgcatgggctttttcatacccggcaacacccgttctatgagctggaagacataagagactgacggcaaatcctgcattccttacgcaatattgatacaacgggtggatacggactatactcgcctatacgttcagtgaacccgtatggcactgtcgggtacgaagggagcgattgcgtactgccggagacggactgcgtgacgatccgttttcccggcagccatcctgatgccgcacattaatggactatatcgagaatcatcatttgacggtggtaggcttcccacgtgagatcacactgatcgacaatgatctgacgtaggattccagcaaatacgtggcatgcatcagcattccaatcgaataacgactagcatgactgacgatgcatggaaacaatgcacgagagacgaagtgagacggtgcggaagagagaaacatttgaataagcatattattcggcttgatgtggtgacggtggtattccttggcggatgcgtcggcacgggactgcggtatgcgagctcgtccattgcggacgtgggcggcttccatgtcggtacgttcgcggccaatatggtggcctgcttcgtatatgcggcgctttccgcatggctgggatcttccagcctgttgaaaggccgtgcaaaagaatacgtgaatcgtggattcggcatgggcatgtgcggaggcctttccaccatgtccacgctcgcattggaagaattcatgatgattgacgatcacgcgattcccggagtcctcacctattgctgcgtaacgttcattgtcggtttttcgctcgcctacgccggtgccttatgcggttcgtggttggcggaacgaaacaaagacgaacatgctgacaaggaggcgatccgatgagcgcaatgcttgcgatcggcgtatgcgcatgcggtggcgtcggcgcggccgcacgctatatctgcgattcgtatatcaaggcattgtggcgcaaaacgttcccgctttcgacgtttgccatcaatgttgtggccggtctgcttgccggcttggtggcgggattgttcgcggcgaacaccataagccccgactgccgcctactgctcgcaacaggatttctcggcggtttctcaacgttctcaaccatgatgaacgagacggttacgctcctgcgcaatgggaaaatcgcttgtttcatcggttatgctctggcttcgatcgtcgtgcccgtcatggccgttgcgtgcggttactggctggcctgagccaacgtaaacgtgattccaaaatcacgtccgaatgcagagactggcttcagtccgcgcgtagcatgcaaccacgctcggggctatgggaatcacgtataccgatgaaaagaagttcaccaaagaacagacgcagcaactgttccgatccgtaggatgggtgtcaggcaaatatccggaacgtctgtacaaggctctgatgggatcgtccaccgtgttcagcgcatgggacggtgaccgcttggtaggcttggtgcgcgtgctcgatgacactgagatggtggcttatatgcattacgtgctggtcgatccggaatatcagggtcatggcatcgcaggccacctggtgggcatggtcaaagagagatatcgcgactacctttatattgaagtcatgccggaagaaagcaagaacgccaccttctaccagaagcacggcttctcaatcatggaagacggcgcggccatgcagatctgcaatccgggagaacgccgctgaaacaagcatcgtgacgccaacaatcttattgcccccgtctaatgacgggggtattgctttttcgagtatccgccaatacatcggagggttggcttgcatgcttcacccgaaaggatcgcagcatgactggaagcgacgaacggaacacgcagaacgcgacgagcgttgggaaggctgcgtttccagcgccttccgccatgaagtctcctcaccccaataggcgacagcggcatgttgtactacgacgtcgaaactactcgccccatcattctcacccacatcccgctgtcagagacctgaacgtcataatggtgttttggggaatgaggcacagtcattttttgaacaattcagaatacgttccgagtctatagagcatcaatcaggcgtgagggcggcgactttttcgcaggatgtttcttcctatctcatatcgcgaacgcttgtaatcgaaagagattatgatgtgggaaagttactaaccagaaccggtgccacaagcactgggataccaacaaccgcgggccgctttcgggtggctgcaacaagaagaagtaaagaatgactgaacagaatcatcacgatccggcagagcttgacaagcttaccgagaagttcaccgtgctcccgaacgacaacccggcatccgacgccaaacgtgccgaactcatcgacaagccggcattcggtcaggtcttctccgacaacatggcccacatgacttggaccaagggcgaaggctggggagaccgccgcatcgagccgtatgcgccgctgaagatggatccgggcgcatccgttctgcactatgctcaggaatgcttcgaaggtctgaaggcctaccgtcatgccgatggctccacctggctgttccgtccggatgcgaacgccgagcgtttccagaactccgccaagcgtctgtacctgccggaactgccgatcgacgatttcatcggttccgtggccgccctcgtcaagcgtgacgtgaactgggttccgacccgccgcgagtacaccctgtacatgcgtccgttcatgttcgcttccgagccgttcctcggcgtgcgtgctccgcaggaagtggactactgcgtgatcgcatccccgtccggcccgtacttcccaggcggcgtgaagccggtcagcatctgggttgaagacaagtggttccgcaccggccctggcggcaccggcttcgccaagtgcggtggcaactacgccgcatccctgctgggcgaatacaccggcatcgaccacggctgcgagcaggtctgcttcgtcgacgccgctaccaagacctacctcgaggagcttggcggcatgaacatgatggtcgtgcacaaggacggccacgtagagaccccgtctctgaccggcaacattctgccgggcgtgacccgtcgctccctgattcagctcatccaggacaacggccacgacgtggtcgaaaccatgatcgctctggaccagttgctcgaagacatcaagtccggcgaagtcaccgaggtgttcgcttgcggtaccgcagccatcatcaccccgatcggtcgtttcaagtccgagaagttcgacgtgaccgttgccgacggcaactccggcgaattcaccgtgaacctgcgcaaccagctgctgggcatccagcttggcgagatcgaggatccgcacaactggatgtggaaggtctgctgatttttcgcgactgacttatagttcaaagtccgccgaggggcggggaacatggtattcgacatactcaaggccgttcggccaagcctacggtcgaacaccatgtttcccgcccctcggcttattgtgtacgatgggaagtcgcgaaatccgagagtgagggaagtgagggaagggaaaaggatgggaaagcatgtcggtggcgttggagagtaatgccttcttttgggggattgaatatttggcgacgttctgctgcggcatgtgcggcggacttgccgccgtgcgcaaaggctacgatatcttcgcgattctcgtcaccacatggctcaccgcattgggcggaggaatcatccgtgacgtgctgctgggcatcgcgccaccggtaggcgtgtcggataaaggactggtgatcgttgctctgctggcttcggtggccgtcgcggtgtgccatcccgaaatcaacaggctcaaatggtccatgctgtcgttggatgctctggcattgggattgtatgcggtcaacggtaccagtaaagccatgatgtaccacacgtcaggcatgaccgcggtttttctcggcatgttcaccgcgcttggaggtggcctgattcgagacatgctcatcaacgaagtgccgatggtgattcgtgacaaacattggtatgcggttccatctgccgtggggtgcgtactgacggtgcttgtctgcaaaggcgtggacgctggaatcgtcagttttccagccgaagtggtgcttgatctgctgatcgtcgcattgatggtcagcatgcgattggtatcggtgattttcgacattcagcttccgggagcgttggtgcgtcataatacatatctgccaagtgaagcgaaatatttgaaacgaccggtcattcattctgataaggattccgacaaacgcaagtgtgacaagcgtaggtagcgacagtgagatggtaattaaacggaagacatttgcgtaacaaaaaatcccgcaggaaaaacctgcgggattttcgttagctgtgagcttctaaaactcagagagcgttgatggccacggcaagaccggacttgcggttagcagcctggttcttgtgaatcacgccagcgccagcagccttgtcgagcttctgagctgcgaccttgtaggcggcttctgctgcggacttatcgccggcggcgatagcttcacgggtggcgcgaacggcagtcttcaggctggacttcacggccacgttgcgcttgtgggccttctcgttggtgagaacgcgcttcttctgcgacttaatgtttgccactatttctccaaacgacgttttctataaggacatacaaacgatgatgataacatggcgcgcggataaattgccaacgggcttaggagtgtcgcgactcaccatgccgatactagcagttagaatcgtttgcgtcgaatatttcaagaggaggatggcgtgggccagcagcataaccagcccggtttcaccgatcagtcgttgattcgcaatttctgcatcatcgcgcatatcgatcacggcaagtccacggtggcagaccgtattctgcagctcagcggcatcgtgcccgaacgtgagatgcgtgatcgtttcctggatcgtatggatattgagcaggagcgtggcatcaccatcaaatcgcaggctgtgcgcgtgccgtggacgttcgacggcactgaatataccctcggcatgatcgacactccaggccacgtcgatttcacttatgaggtttcccgcgctctcgccgcatgcgaaggcgcagtgctgcttgtcgacgcgacgcagggcatcgaagcgcagaccctgtcgaacctgtatatggccatcgaccatgatctggccattattcctgtactgaacaaaatcgatcttcccagcgcggaaccagacaagcatgccgaggaaatcgcaggcctgattggttgcgatccttccgaagtgctgcgcgtgtccggtaaaaccggtgaaggcgtgaccgaactgctcgaccgcattgttgccgacgttcctgcaccaaccggcgatccggaagctcccgcgcgtgcgctgatcttcgactccgtctacgactcctaccgcggcatcgtcacctacattcgtatggtcgatggcgagttgcgttcccgtgagaaactgcacatgatgggtatcggcatgacccatgatccgattgaaatcggcgtgatcagcccagacatgatgcctacgaaggcgcttggtgcgggtgaggtcggttatgttatcaccggcgcgaaagacgtcagccagtccaaggtgggcgacaccatcacttccgcgctcaagcctgcggccgatccgctcgaaggctatcgtgacccgcagcccatggtctacgctggcctgttcccaatcgacaacgcgcagtatccggaacttcgtgaggcgctcgacaagctcaagctcaacgacgcggctttgatctacgagccggaaacgtccgtggcgttgggtttcggtttccgctgcggcttccttggcctgctgcatatggaaatcgtgaccgaacgactgagccgcgaattcgatctcgacttgatctccaccgcaccgaacgtgccatacgaggtcaccgcggaagacaattccgtgcatcgtgtgaccaatccgagcgaattccccgacggcaagatcaagcagatcgtcgaaccggtggttgccgccgacatcatcactccgaaggaattcatcggcgcggttatggacttgtgccaggaccatcgtggacagatgggcactatggaatatatttccgccgaccgtgtggaaatgcattatcgcattccgttggccgaaatcgtgttcgacttcttcgaccagttgaagagccgcaccaagggctatgcgtcgctcgactaccatgaggacggcgaacagtccgccgatctggtgaaggtcgatattctcatccagggtgagaaggtcgatgcgttcagcgccatcgtgcataaggataaggcgtattcctacggcgtgatgatgacgaagaagttgcgtgagctcattcctcgccagcagttcgaaattccgattcaggccgccatcggctcccgcattatcgcacgtgagaacattcgcgcactgcgcaaggacgtgctcgccaagtgttatggcggcgatatttcccgtaagcgcaagctgctcgaaaagcagaaggccggcaagaagcgtatgaagatgctcggccatgtcgaggtgccgcaggaggcgttcatcgccgcattgtcgaccggagacgcaggcaacgaccgcgacaccaaagacaagattcgcgccgcccagaaaaccgaaggctgatgttcgaagcctacattcatgtgccgttctgcatacggcgctgtgggtactgtgatttcaacacgtataccgctgtcgacatgggagcgggcgcttcgcgtggcaattacgccaatatggtgattcgcgagatgtcaatcgtccatgattggcagatcgcgcatggcgttaacgaaccggaagcggccaccgtctttttcggcggtggcactcccacgattctgaaagcctcggatctggtcgccatgttgaatgccgtgcgtgacacatggggcattgccgacaatgcggaaatcaccaccgaagcgaatccggacacggtgaacgccgattacgtgaaggaactcgcggacggcggattcaaccgcatctctttcggcatgcagtcggctgtgccaagcgtgctgaaaacattggatcgtacgcataccccggccaatgtggcggcgggaatcgcagcggcaaatgctgccggcatacgttccagcgtggatttgatttacggtgcgccgggggagagtctcgacgattggcgtgtttccgtacgtacggcgatcgacttgggtgttgaccatatttcggcatatgcgttgaccgtcgcaccgaacacgaaaatgggacgtcagattgctgttggaaccttgcctacgcctgatgatgacgatgaggcgaccaagtatgagattgccgacgatctactgagcgcagccggtcttgaatggtatgagatcagcaattgggcacgtcctggttatgaatcgcaacataatcttggctattggcgcaatgttgattgggcggggctcggtcccggtgcacacagccattacggcaatgtgatggatgttgaacagtccacgtcggctgaaacatctgaaacggtcaaatcgtcgggcttgcgcagctgggatattgcgcatcctcgcatgtgggggcaggctatcaacgatgataatgtgccatggtcgggaagcgaacgaatctccaacgaggagaacctcgaagaaatcatcatgcttggtctgcgcatacgtgagggtctggatttgagttgccttggaaacatggttgatatggctcgcatccagcccatggaagacgaaggccttatcgttatccgtgacggacgtgtgattccaacccgaaccggacgcttgctcaacgacaccgtcatcgagcgtttcttcgacgcctgctcgttgtaatgccgataatcctctgacgaattggttttagatgatccatcttggtatgggtggatacagtgtgcagattgaaacgggcctcggatgcaggttgttgcattccaggcccgatggcatagagcctagaacgaggctgtcaccggatgttcgtaatcagcgcatcgtgagtccgccatcgacatgcaacgtctgaccggtgacgaaacgagcgtcctcgccaaccagcatcgccacaccgcccgcaatatcatcagccgtggcaagcctgcccaaaggcgtctgcgcgatgatgcgctcgcggacgtcttcggtggtggcgcggctcgaatccgtgcccacggtcaaaccggccgcgatggcgttcaccgtgacgccccacgctccggcctcctgcgccagcgagcgcgtgaatccgatgagtgctcctttggctgcgatgtagtcgtggtaggggacgatcgggctgtctacgaggttgctggagatgttgacgatgcgtccccatgattggcgtcgcatgtagggcagcgcggtcgtgcaggtgttgtaggtgcctttgagacatccttcgagttgggtcgcgtagtcgttccagctggtgttgctgaaggtgttgcggttgcgtgggtcgaacgagtagtggctgagcgcgttgttgatgaggatgtcgatgccgccgaaggtgttggctgtggtttgtgcgagttcgttgacttgggtttcgtcggtcacgtcggctttgcatgtgatgacgcgtccttgtgcgtccgcttcgttttcgatgtgttgcttggtgtgttgggcgcgttcgtcgttgcttaggtagtcgatggtcacgttggcgccgagttgtgcgagtctgagtgcgattgcggcgccgatgcctcggcttgcgccggtgatgatggcggttttgccggtgagtgtccggtgttcggattgctggttcacgtaaggtcctttgggattattcgtagtcgatgtcgaaggtgtcggcgtaacggtcggtgttgcgttcgatgtcgacggctctgacgaggtcgaggatgttgaatccgccgtcgtggtgccatccggatttcgcgcggttcatttctccgacggggcagatgcggtcgatgccgtattcgcccacttgttgcgcgagtgcgaacagtctggatgagcttgtggcgatcgcacaggtttgcagccactcgcggtagggtttcagtgtgggcagcgcgtgtttgagttggtccacggcgacgatgttaatggtgcggttgagcggtgtccccaacgaggggagactgctggtattggggtagtaaagcacggtccagtcggtgccttgcggcgattcgatgacgaacggtgcctgtgggtcggcctgtgcggcgctgtctggagtcatggacgtcatgaacagcgcttgcatctcggtttgagagcgtgccctgcggatggcgagggattccgtgtcggaaggggttgatcgtggatatttgcgttgttgcgagtcgagctcgctggcgagcagttccgccgtctgagcgggggagatggctccgccgcgttccacgaagatggtttgcggcgccaggcagctttgctggtcgtaggtggccacgtccacggccatacggtgcacggtttgcacgtgagtgtccgcgcgtagcgcttcacgtccgatgagtgagaagccgatgcgtgcgccatagctgaggaacggtttgcccgcgctcacgcgtggacggatcgcctcggtggtgtgcgacgaaccgtaggcgatcacggcgttcgcttcgccgatcgccacgtcttcaagctctaccgtgccgccgcgccacggcactatggccaatacgtcggcgagatccgggttgatctgtgtcagagaacgagcgaacagtacgggcatcagcggttcgtcgaacgatgatttgccgatgatcgcgcttttcgtcagcagactcatggtcatgctccatacgggaatgccgggaacattgctggaaaacacgtggaatgtcaagtccggcccgtacaggcgcgtgtatccgccggacttgttcggtcggtattcgtccagcatgcgcgggcttggcagttcgtcatcaagaaaacgcaatagttcgcgtctgcggaacatgcgcatgtaacgtttcagttcgatacgcgtcatcgtcgcgtcatagccggtgatggagggaatcagagactccgctatctggcgaccctcataatcgggattcgtccacaattccaccgcctcgccgatgatgtcgacgatgtattcgacggaatatgctgccaatgtctgcgatcgattgcaacgcgttgtctcgcacaaatcttggacagtctcaggcgtgagtaccggataacgcaacgtgacctcaccgcggtcggtgagaacgccgcgtgtttcgaaatcctcaaatacgaagccgcgcggcgcatggaaaatatcgatgacgctcatgcgtttgccgccatcacctcgtcgacggcgatggagcagccgcgtgcctccgcacccttcgcacgaccgttgagctcgtaaccggaatcggtgcgcacgccaagatcttcggtcagaatcgccagacaggaattccaattcgccaaatcgtaatgcgcgatcaccccctgctcgccatcggcgacaggcgtgagcgtcgccggatcgaggaacacggaacgaacccacgacggcgtcgccttcagataattcgacgaaccatccgtatagtacgacagcagattctgatcgtaaatctgcgaactcaactccgtcataccgtacatgttcacgcaatgcgtgcgtgcgacgccaaacacctcaaggaacttcgcatacaaatcatcgacggtcatatcggttttcgtgctcttgaaaccaccggtatcgaaaacacgcgaatccttcgccaacgcataggttttgccccgctcggcaagatagtcaagcagatacagatacgcggacgaagcgcccatcagcatcaccggctcgccgtccgccaccgactgatcaaggaacttttccacaccagcgaagtccaaaccatcctcatggaagaagaagccgctgccctcgctgccgcactgctccaccgcacgcgtcagataacgggccaacgaaccattatgattcatctcccaggcaggggagagcaccgcgatacgcatgcgctcacggtcaggcatgatgaaatgacggaacgggccgatcatcgacgcatcccacacctcaagatcaggatgatagttgcgtccacgctgacccggatgcgtagtgccgctggtcatgaacactgcctcgcaatcatcttcaggcaccgaagtgagcgtcagcatcttgaacccatccaccggcatcggcggaatatccatccaatccgacaacatctgcggagtcaccctacgagacatgcaatacgcgcgatactgcatgttatgggcaaactggaaagcgaaaatcttatgtgcgagcgcgtcgaacgcctcatccggagcgacctcgcaaccatacttttcgatgaactcaagcacgtttgccttgacttcctgcgcgtcggcacccaacgacattgatgtcatatgcggtattcctttctataaacgatactgatattcgaaagcaaatcagatctgcgacggaacttcagcttcgctgtttcctttacgacgattgatcagattcggcaggtcgatcagcagtgccttgagaatcaccacacagaacgccccgaccagaatcgaattggagaagaacacgtgagcgccgccctccaagccgctcaacgcgctcggcagcgcgatgcccaacagcagggacaatccaatgaccgcctgggaacggtcgtccgactccaccttgcgcagcgtattgaagcccgtgctgatcaggcttgccgcggccggcaggaaaatgccgccgatcacaggggaaggaatcaacgacaataccgctccggccttcggaatgaaaccaagaaccacaaacaccacgccggcgatgatcaccggcacacgggtacgggtcttgccctcatccgtgaccttaagcaacgcgacattctgcggatacgcggtagtggtgaaaccgccgatcagcgaagaaatcgcggaaccggcagcctcgccggccaaaccataacgaacctgacgatcctcaagcttgacgccctggatctcactggccgcctgatacacgccaagcgcctccataatcgcaaccatatacgcgatgaagaacggcacaaacaccgccgcatcaaagtcaaaaccgccatacggcataatctgaggaagaccaaaccaaggcttcgacgcgacaccggaaaaatcagccatgccaaataccatcgaaagcgcagtgccggcaaccagagcaatcagataggaaagcgccctgaccatacccttgccgaactgggaaagcaccaccaccagcacgcaagtcacgatagacacggccaacgtcttcggatcggcaaaaccatcatcgccgggagcgccaccaagaaactcgctcaacgtgaaactcgacagcgaaacgccaaccagaaaaataatcacgcccgacaccatcggcgcgaacagaaaacgcatcttctcaatcacacgggtcagacacagcaccaagaaaatcagcgaactgacaaaaatcgacgtaccagcggcagccaacgaaccagcagtgcccgcagcgatcatcaacgcatcgaacgcggcggacggaccctgcacaatcggcaaacgcaccaacctcgtggcctgaatcaatgtgaccaaaccagacacaatgaaaatggcattcaccatatttgacgacaacgccaacggcaagccaatggcaccagccacaaacaccggatcaagccacacattggacaccaacacatgctgcaaacccagcagcacattcttcggagtcaacttcttcgaacccgaaccaagctgctcaggcacctgcgacgcatcagacacgccaaatcccttctctttccacgaaacacacggccaaacaccagccgtcagcacagagaagacgcgcacgcgcaccgttcgtaacatccctacgcaggcactaccctgttcaggtcataagggtccgggcaaacgcccatctcagccacatcggctcccctgtactcttcggacaaccaccagcataacgacacgcatcgataccggcaaccaccacaacccaacacatatcctccacattttcccaagaaaaaacagtcttgacttttccgagtattcgttatatggacacgcgaaacgtatttgatacaggggcgcggtattctaaaccacgcattaaagaaccgcaagacttttcttgcccaaaaacattgaaggtggtttcggtgactttccacgccccgttagatctcacgatccatgattcccaaggtatgtacgatcccggcgccgagcacgacgcctgcggcgtgggtatggtcaccaccctcaacaagcgccccgaacgcaaaatcgtcgacgacgccatcgaagtgctcgtcaacctcaaccaccgcggagccgtaggcgccgaagaaaacaccggcgacggcgcaggcatcctcatgagcatgcccgacgaattcatgcgcgccaccgcaggcgtcgaactgcccgaagaaggccactacgccgccggcatcgcattcctcgaccgcgacatcgccacctccggacaacaagaacaagccatcgccaaaatcgtgcgcaaagaaggcctcgaagtactcgcatggcgcgtcgtacccaccaacccggacggactcggactgcaggcgctcgccagcatgcccgcgttcaagacgctggtcgtggccgaccccgaaggccagctcgcaggcatcgaactggaccgcaagaccttccgcatccgcaagcgcgtcgaacacgaggtgggcatctacttcgcgtccctgtccgcacgcaccatcacctacaagggcatgctcaccaccatgcagctcaagcccttcttcctggatctttccgacgagcgcatgaaggcgaagatcgccatcgtgcactcccgcttctccaccaacacgttcccgagctggccgctggcccagccgttccgccagctggcccataacggcgagatcaacaccatccagggcaaccgcaactggctgtccgcacgtgaaggccgcctaagctccgaactgctcggcgaattcaagccgctgctgccgatcgctaccccgggctactccgattccggcacgttcgacgaatgcctcgaactgctgcacctgtccggacgttccatgccacatgccatctccatgatgctgccgccggcatgggagaagaacgaccaacttgaccccgatgtcagggcgttctacgaatacaacaatacgctgatcgaaccgtgggacggtccggcgcacatcatcttcactgacggcacccaggtcggcgcgctgctcgaccgcaacggcttccgccccggccgctggcagcttaccgacgacggctacatcgtgctcgcatccgaaaccggcgtgctcccggagaacgccgaggaacacatcgtgtccaagggccgcctggaaccgggcaagatgttcctcgtcgataccaaggaaggccgcatcatcccggacgaggagatcaagaagtccctcgcgtcccagcatccgtaccgtcagtgggtcgaaggcaacaccgtcgagatgagccagctgcccaagcgcgagcacgtcaaccactccggccagtccgtgcaacgccgccagcgcgccttcggctacaccgaagaggatctgaagctgctgctcgccccgatggccaacaccggcaaggagccgctcggatccatgggcaatgacgcgcctatggccgcgctttcctcccgcagccgcatgctgttcgactacttcacccagaagttcgcgcaggtcaccaatccgccgctcgactgggagcgtgaaaagatcgtgacctgccttgaatccgccatcggtcccgagccgaacctgctggccgattccgaactgcatgccaagaagatcctcattccgttgccggtgctcaactccgacgagatggcgcagctcaagcgcctcgaccgcgccaagatcctcggcggctactataagccgttcgtcgtcaagggtctttatcaggtcgctggcggcggcaaggcgctgaaggaacgtctcgacgagatcttccaggaagtcgacgaagccatcgaaaacggatccaacttcctcgtgctctccgatcgcgactccaactacacgtggggaccgattccgtcgctgctgctcacctccgcggtgcagcaccatctgctgcgcagacacacgcgcacccagatctccatggtcgtcgaggccggcgatgtgcgtgaaatccaccatgtcgctctgctgatcgcctatggcgcggcggccgtcaacccgtatctggcgttcgaatccgtcgaagacctgtcccgcaagggctatctcaacgtcgatgccgaaaccgcggtgaagaacctgaccaacgcgttgtcgaccggcgtgctcaagatcatggcgaaaatgggcgtctccaccatcatgagctaccgtggcgcacagctgttcgaagccatcggcctgaacaaggacgtcatcgacgaatacttcaccggcaccacctcccgcgtcggaggcgtcggactcgacgaactggccgaagaggtcgccatccgccatcgcgtggcctacccgtcgcagtggaccgcccgcccgcaccgcaacctgcgcaccggcggcgaatacaagtggcgtcgtaccggcgaagaccacctcaacgaccctgaagccatcttcctgctgcagcagtccacccagcgcggtgactacgacatgttcaagaagtactcggcgcacatcaacgacacctccaaccgtttgatgacgctgcgcggcctgatgaagttcaagtccgatcgcaagccgatcgacatcagcgaggtcgaaccggccagcgagatcgtcaagcgtttctccaccggcgccatgagctatggctccatctcccaggaggcgcacgagaccctcgcgatcgccatgaacaccatcggcgcacgttccaactccggtgaaggcggcgaatccgaagaccgcatcaatgatccgctgcgctacagcaagatcaagcagatcgcatcggcacgtttcggcgtgaccagcgactacttggtgcacgccaccgacctgcagatcaagctcgcccaaggcgccaagcctggcgaaggcggacatcttcctggcgccaaggttccgccgtggatcgccaaggtgcgtcacgcgactccgggcgtcgagctcatctccccgccgccgcaccatgacatctactccatcgaggatctgaagcagctgatcaacgacgcgaagatggccaatccgaaggcccgcgtgcacgtcaagctcgtttccgagttcggtgtgggcaccatcgccgcaggcgttgccaagtgccatgccgacgtggtgctgatctccggctacgacggcggcactggcgcggctccgctcaacgccatcaagcacgccggcaccccgtgggagatcggcctgtccgaaacccagcagacgctcgtgctcaacggcctgcgttcccgcatcaccgtgcaatgtgacggcgagctcaagacgggccgcgacgtggtgatcgcagccctgctcggcgccgaggaattcggtttcgccaccgccgcgctgatcgtcgaaggctgcgtcatgatgcgcgcctgccagaagaacacctgcccgcagggcatcgcaacccaggatcccgaactgcgcgcacgcttcaagggcaagccggaacatgtcatcaacttcttcatgttcatcgccgaggaagtacgcgagctgctcgcccagctcggcttccgcaccttggaagaggccgtcggccatgtcgaatgcctcgaccagaacgaagcgatcaagcgttggaagtctgacggcatcgacctgagcaacgtgctcatgcagccgggaccggtgccgggaaccatcctgcaccagaccatcgagcagaaccacgagctcgacaaggcgctcgacaacaagctcatcgagctcgcgcagcccgcccttgagaagaaggagccggtgcgcatcgagatgccgatccgtaacgtgtaccgtacgctcggcaccatggtcggctacgagatcaccaagcgttacggcgaggaaggcctgcctgacgacaccatcgacatgacgttccatggtgcgggcggccagtccatcggcgcgttcattccgcgtggcgagaccatccgcgtgtacggcgaagtcaacgactacgcgggcaagggactttccggcggacgcatggtcgtgcgtccggaggcgggcatcaccttcgatccgcatgagaacgtgatcgcgggcaacgtcaccggcttcggtgccacttccggccagatgttcgtggcaggtcgtgcaggcgaacgcttcggcgtgcgcaacggcggcgccaccttcgtggtggagggcgtcggcgaccatggttgcgaatacatgaccggcggcaccgtcgtgatcctcggtcccacgggtcgcaacctcggcgcaggcttctccggtggccacgtgtacgtgctcgaccttgacatgaagcaggtcaacccggctgccgccgccaacggcgcgttgctgttcgaaccgctcgacagtgagtcgaacgaaatcgtgcacggtctggtcaagcagcatgccgaagaaacaggctccgcattcgcggccggactgctcgccgactgggagaacgcatccaagcgattcacacacatcgttccgaagcacttcctcgccatgcagaaggcgatgaagaacgccgaagagaacaacatcgatttcaatacgcccggcgtctgggaacaggtgtacgagcaggttatggaaggagcgcgctgacatgggagatccacgtggattcctgaaggtccgtacccgtcgcgaactggccgaacgccccgtcgaggagcgaatcaaggattggttcgacgtccacgccgaatccggcctgcagccttggaccaccgaacaggcggcccgatgcatggactgcggcacgccgttctgcatgagcggctgcccgctgggcaacatcatcccagaattcaacgatctggtgcgccaggagaagtgggaggacgcgtacaaccgcctgtccgaaacgaacaacttccccgaagtcacaggccgcatctgccccgcgttgtgcgaggcagcctgcgtgctcggcattcaccagccgccgaccatgatcaagaacgacgaatgcacgatcatcgatcaggcttgggaactcgactacgtcaagccattgcctccgcagcgcctgaccgaccagaccgtcgccgtggtcggctccggcccgtccggtctggcatgcgcccagcagcttacccgcgcaggccacaccgtggtcgtatacgagcgtgatgacgccatcggcggcctgatgcgctacggtatcccgaacttcaaactcgacaagcgactcatcgaccgccgcgtggaacagatggaagccgaaggcaccgtgttccgcaccggcgtggagatcggcaaagacatctcatgggacgatctgcgatcccgctacgatgccgtggtcgtcgccatcggctccaccgtgccgcgcgacatgaagattccgggccgtgaactcaagggcatccactttgccatggaattcctgcccgacgcgacccgccgcgtctacggcgtcaagccagtcaacgacatcaccgctgaaggcaagcacgtcgtgatcatcggtggcggcgacaccggatccgactgcctgggcacgtccatccgccaaggcgccaaggacgtcactgtgctgcagatcatgccgcaggaaccaggcgaacgcccggccaaccagccatggccgaccttcgcgcgcctgtaccagaagacctcctccatggaagaaggcttcgaaacccagcgcgccgagtacgtgtacagcacggattctgtgaacttcgtcggtaccgaagaggaacaggccaaggtgaaggtggagcactccaccgctactgaaggcttcgtggccgatgagaacggacatgtgaccggtctcaaggtagtgaacgttgcacccggcgaaaacggaccgttcacccgtcagcccggcaccgaacgcgtgattccggctgatttggtgctcatctccgtcggcttcctgcacccggacaccaccacgctcgtggaccagctgcccgtcgaccttgacggacgaggcaatgtggcgcgcaacgacaagttcgctaccagccaggacggcgtgttcgcctgtggtgacgccggacgcggtcagagcctcgtggtgtgggccatctccgaaggccgttcctgcgcggccgccgtggacgaatacctcaccggcgccaccgaactgccggcacccatcgtcgcatccaaaaggccgatgatgctgccgcgctgaacataagcagttaacgtaacagaaaaatcgtccgattctccgccaaaacggaatcggacgatttttcatatccccacttcccggaacctcgaacaatacagacgtggcataaacgtccgaatgacgtgccgttcggcgaaaaaccggcagtcatgcagtaaagtgaactgcagcacatcgcaacaaaggagtgacccaatgccaaatcgtgcagaacgtcgagcgcaggcaaagaacaaccgcaggggagtgccgcagcagtacgaccaaacccatggccgcgcacgttccggaatgctggacgaataccagctgcaggaaaagtcccgccgactgcaagacggtaccgatggaccttggaagccgaccggcggcaccatcgaagaaaccgaaagcctgctgaccaccagcccgaactacacgaacccgaagatgttcaaggcaccgcattccgcacgccaatggttccgcgtgatcagctggctgctcatcgcactgtccgcaatcgcattcctggtgatcatgtggctgccgtcacatcccatgtggttggtcgccacggtctccatcgtcttcgctgtcggtgtgcttagcctgttcttcacggcgggtaacccgaagcataatccgaacctcgatcagaatggtacggccgtctgatagcaaggcgatgaacgtaaagcggggctgcatccgatggaaggatgcagccccgctttcgcatgcgagtcacgaatgacggcactattcgttcctggtttattgacctccttgcctgcatttttaggaaagatgcaaaactttgtgacacgaatgaaacaatcaggcgtttcattgaaaaattgccttacagtagtgatggaacaactgcctgactcgaagaggagagcacagatatgaaggttgacatcctttcccgtgaatatccgcccaaggtgtatggcggcgcaggcgtgcacgcggaggagctttccaaagttctggcggaacgcgtggatgtgacggtccgtgcgtttgacggaccacgtgccgagaatgagattcccgaaatcccgggtgacaatccgaaaggttcgctcaaggtcgtcggatacgacgttcccaaggaactccaggaagcaaacggcgcgctgaagacgttcggcgtcgatctgcagatcgccgacgatgtggacgccgacatcatccacgcgcacacgtggtatgcatgcttggccggataccttgccaagatgctgcacggaacgccgctggtcatcaccgcgcattccctcgaaccgttccgcccatggaagcgtgaacagctgggtggcggctacgatttgagctcgtgggccgagcgtgacgcatacgagcatgccgaccgcgtgatcgccgtgtccgcaggaatgcgcgaagacatcctgagcgcctatccgaatcttgaccccgacaaggtggtcgtggtgcacaacggtatcaccatgagccagttcgaaaccccatccgacgacgatccgggctggaaggtgttcgaacgctacaatatcgaccgcaacaagcccacgctgctgttcgtcggacgtatcacccggcagaagggcctgccatacctgcttcaggcgttgcatttcgtcgatccgggcatccagatcgtgctatgcgcgggcgcgcccgacactccggagatcatgaacgaggtcaaaaccgcgttcgccaagcttgacgaggagcgcggcaacatcatctggattgaggagatgctgccgaagccggagctcaacgcgcttgagcacggttgcgacgcgttcatctgcccatccatctacgagccactcggtatcgtgaacttggaggccatggcgtgtggccttccggtggtggcctccgcgaccggcggcattcccgaagtcgtcgtcgatggcgaaaccggatatctcgtgcctgtcgaccagctgcacgacggcaccggcactccgaccaatccagacaagttcgtgcatgacatggccgacgctatcaaccgcatcatggccgatcctgaaaaggcgaagcagatgggacaggccggttacgagcgtgcgcgcgaccacttcagctgggagtcgatcgccgacaagaccgtcaaggtctatgaagacgtgcttgccgagcagggcaaaaccgccgaataaccagttcaccacgtagacgatgcgtggaacgccttccgctgaaagcattatgctggcggaaggcgtttccatatctacaagccgaacaacgataggggaggaagaatgccggagcagaacatcgcactggaactcgctgacgtggaatttcgtcgccgtggacgcgtgattctcaccaaggtcaatctgaaaatcaacaagggcgagaaatgggtgctgttcggacccaacggcatcggcaaatccagcttggttcaaatgatgagcaccagaggattcccgtcggaaggcaccgtcgacattctcggcaatcgcttgggcaaggtcgatgtgttctcctatcgcaaccgtatcggtttgagctccgcggaactgagtcgcgcgttccctccccaagaagatccgctcgacgccatcgtgaccgcattgaccgcgaccaccggccgttggcgcgacacctacaccgacgaagactatgccaaggcgcgttccctgatgcgtgaattcggtatcgaatatctcgaaggtaaaatgatgttcaaactttcggaaggcgagcgtacgcgcgtgctgatctgccgtgcgttgatggctgatccggatctgctgattttggacgagccgactaccggtcttgatttgggcggtcgtgagattgcgcttcgtgcgttgagccgtgtcggcgccgagcagtcggatcgtgccgtggtgctggtgacgcatcgtcttgaggagattccgcagggattcgaccatgtggcgatcatgggcaggatcaccggcagcgaggccgacgcctacgccgacaatgtcgcaggcaacgatccggctccgggcaccatcgtgtactcgggtgatctggaacacggtttcacttcggaacggttgagcgaagtgttcggtttggagcttgaggtgacgcatgcgaatggacgttggagcgcgtacgcgcggtaacgggtgctgtgtgcgccggaatatgctgtagcatgaatagcgtcggacaggagtcattcggttccgtgctgtcgtgatggtggaatccgtgtgggtatgaaggagtgattgatgcgtcgaggaccgttgacggcgggtgagaaggtacagttcacggatcgcagatccaataagatcaccgaccaattggtgccgggtggtgtgacgcagacctcgcacggcatcattctgcatgacgatgtgatcgggcagtcggaagggtccgtggtggtgacggtgagcgccaaacgtgaggcgcagatcaatcaggatcatccggaacgcgacgccaacaagccttggaagggaacgcgcgccattggcggatggcagttcgcggtgatgcgccctcggttggccgattatgtgctgtcgatgcctcgtggcgcgcagatcatgtatccgaaggacattgctcaagtgattcagcttggcgacattcgttccggcatgaacgtgttggaatccggtgccggatccggcgccatgagcgtcaacctgctggacgcggtgggggagcgtggaagactgaccaccatcgagatgcgttcggaattcgcccgcgtggccgaagcgaatgccacggtctatttcggtgggcgccccgcatggtgggatctgaaaatcggtgatttcgattcggtcgccgccacattgccggagcattccttcgaccgcatcatgcttgacatgcttgacccctggaaccgtcttgagcaggcataccgagtgattgcgcccggcggtgtgctcgtggcgtatgtgaccactactacgcagctaagccgtatggcggaggcgttgagggaggctggctgctggacggaaccggatatccaggagactctggaacgcgactggaaggttcagggattggcgatacgtcccgaccatcagatgatcggacacaccggcttccttatggtttcgcgggctatggcgccgggatttcaggcgttgcgcaagcgtgaccgtgccacgaaagacacgaccaccgatattgattcgctgagcgccgaagaacgtgccgaacagctcgaagatcttgagttgcgggatatttccgatcgcaagttgcgtaaggtgctgcgtgatctcgacgcgcaggtcgaggctatcggcgattgatacggtgtttcttgccgttgttctgagacaatagtcatagcgcgttgcgttggtacatacgctggatcgttaaggattggagcattcgtccatgggaacgagcctcaagaaggttgcgaaaaaagccaaggattacaagtatgtgttgctggtgatgcgtcacgccaaaaccgagccgtttggtgacggtggcgacgccgggcgtgagctgaccgacaaggggcgtaagcaggcgaaagccgtcgccaaaggcctggccgcgcacaagatggtgccgacgcgcattgcgtgctccagcgccaccagggccaggcagacttgcgatcgcatgcttaaggtgttcggcgacgacccgaaggtcgactatcgtcagagtctgtacgaaggtggggtgcagtcggtatttgacgagcttgcccagaccaaggagaagcatcgcgagctgttggtgctcggccatgagcccactgtgtcgatcgcatgccaatggctggcgagctccgaatcggatgcaatgctgctcgacatgctgaatctgggcatgtcgccggcatcgctcgccgtgttcggatcaaatgagccattcaaccaatggcagctgcacagtggcgaactcatcgcattgctgacggccaaggattttgaatgattccttcgcctctcggcatgatgctgagaggcgtgaaatgttgccatgccaactgatataaatcgtgcttatagcgacacttaaattttcttgatgagttatagctggcgatttcgtggtagcttgagcgggttgcattgttcatatcagatggaggattcatgtccgttctcacttccgtctccggtttccctcgcatcggccagaaccgcgagctgaagaagattatcgaagcttattggaagggtgtcgcaacgctcgacgacgtgcgcgccaccgccaaggagctgcgcgccaagcattggaagctgcagcaggaagccggaatcgatttgattccgagcaacgacttcagctattacgaccaaatgctcgacactgccatcctgctgaacgtcattccgcagcgctaccagcgcctcgccttcgacaatcccgaagagacgctgttcgccatgggccgcggctaccaaggagacaagggcgacgtcaccgcgctgccgatgaagaagtggttcaccaccaactaccactatctggtgccggaagtcgacgaagccaccgacatcaagctcaacagcaccaagccgttcgacgaattcaacgaggcgaaggcgctcggcatcaccaccaagccggtgctcatcggcccgtacaccttcctcaagctcgcccgcaatccgcaggccgaagaactcgaatacgacaagggcctggtcaacgcggtcgccgccgtctacgccgaggtcgtggccaagttcgccgagctgggcgccgaatggatccagatcgacgaaccgtacctcgtgctcgacaaggagccgggcgacgtcgaactgttcaagagcctgtacaccaagatcctgcccgcacgcgacggcaagatcaaggtgctgctcaacacctacttcggccacatcgccgacgtgtatgagacagtcaacctgctcgccttcgacggcatcggactcgatctcaacgaaggcaaggacgagaatctcgccgccgttgaaaagttcggcgtcgcagagagcaccaccatcttcgccggtgtggtcaacggccgcaacatctggcgtaacgattacgccgtcagccttggactcgtcgacgcgctgaagaaggtcaccgacaacgtggccgtctccaccgcaagctccctgctgcatgtgccgttcagcaccgaaggtgaagacggtctcgccgatgatgtgcgcaagcatttcgccttcgccgttgaaaagctcggcgaactgcacgacctcgcggttctcgccgacgccagcgaggaagacaagaaggcatccggggcattggcagccaaccaggcgctcttcgacggtacccgcgtcgccgccgacaagaacgtggcggaacgtctcgcagccctgaccgactcggacttcgtgcgccagccggcacgtgccgaacgtcagaaggcacagcgggaggcgttgaacctgccattgctgccgaccaccaccatcggatccttcccgcaaaccaaggaagtgcgcgccgaacgcgccagactgcgcaagggcgaaatcaccaagactgaatacgacgaatacatgaaggcgcagatcgacgcctgcatcaagcatcaggagcagatcggccttgacgtgctcgtgcacggcgaattcgagcgtaacgatatggtcgaatacttcggccagaacctcaacggtttcctgttcaccaagaacgcttgggtgcagtcctacggcacccgttgtgtgaagcctccgatcgtatggggcgacgtgtcccgcgccaacccgatcaccgtggaatggagcgcctacgcacagtcccgtaccagccatgtgatgaagggcatgctcaccggcccggtcactattctcaactggtcctggccacgcgaggacatcacccacgagcagcagacccagcagctggccctcgccatccgcgacgaagtgctcgacctcgaagccgcaggcatcaaggtcatccagatcgacgaggccgccctgcgtgaaaagctgccgctcaggaagaccgactggcacaagaagtacctcgactgggccattccggcattccgactggtgcactccgcggtcaagccgaccacgcagatccacacccacatgtgctactcggagttcaacgacatcatcaccgacatcgacgccatggacgccgacgtgatctccttcgaagcctcccgcggcgatctcgtggtgctcgacgccattcacgacgccaacttcgaaaccgaagctggcccgggcgtctacgatatccactcgccgcgcatcccgtccgaagccgaaatcgaggaacgcatctacgaaatcctcaagaagatggacgtcgaaaaggtgtggatcaaccccgactgcggtttgaagacccgcggcaacgccgaaacctggccaagcctcgaaaacctcgtggccgcagcccaggctgtgcgtgccaagctgaccaaataaggcgaaacgttaggaacaagacgacagccatgcattcgccaatgttctcgctcgaggtgttccctccgaagcgaacctcccctgtaggcaccatctacgacacgttggatggcctgcaggggttggaccccgatttcatttccgtcacctacggcaccggcaaatcatccgaccgtacattgaccgcgcgcatcgcccacacggtaagcgaatacggcatccccagcgtggcccatctgaccgcgcagtatctgaacaaggatgacgtcgaccaggcactcgacatgttcgaacaggccaaggtctccggcgtgctcgccttgcgtggcgaccgcatcgacggtgccgaaccggcaggagtattcgaacatgccagcgatctggccgtatacatcagccagcaacgtccggacatgaaaatctacggcgcctgctacccggaaaagcacccacagtcggcaacgctggaagaggacatcgacaatctcaaaaagaaagtcgatgccggcgtgacgcatctgatctcacaactgttctacgacaacgaggacttcctgagattcctcgacaaagcgagggctgcgggaatcgacgtgccgatcgaagcgggcatcatgccggtcatgaacgcgaaatcggtgctgaacatgtcgaacaaatgccagtcgaaagttcctgaaaaactcggcatcatgctcgataaatggggaggtgacaaggctctgctcaaagaagcgggcatcgcctacgcatccgagcagatctgcgaactggtggcgcggggcgtcgacggcgtgcacctgtacacgatgaaccatccatgtgtcagccgacgcatttggtccaacgtcaaaccattcttcgtctgatttcaggcgatgcaacaaacatcaagggtggttgcgggtatttcgcaaccgcccttggttttatcagcggttactatagaaaccatgacttccatgcaacacaagttcggggcgcttgatctgattcgagcagggctgcaagatctcgacagggctcgcacgttgttcgacgagctgcacaatgacggcatcgatgacgacaggatgcggctgctactagccacgctggaaaaagcgtgcgatcccgacatcgcactcagcaacctggtggacatcatcaaagtgatgcaaagtcaaggcaaggatttcaccaacatcatcgccgatgaaaactctttcgtgcgactgatcaccgtgctcggcgtatccgatgaaatgggcaagctcatgcgattccgcccggaactcgtagaagccgcagccaacgatgcctgcgaaagccatctctacaatcacgaacagcgcaaagcgcatgtgctcaaatcggtaggtgccgatcccaatgaccatgccatgccgaccgcaagcctgccacttgccgaagctgcgacggcgctacgtaaaacctatcgcaaacaactcgccgcaatcatggcgcaagacgccacggcgaacgatcccatcgaaatccaaccgcgcatcagcaccgaactttccgaccttgcggacgcggcgcttgaaggcgcgctcgccatcgcacgccatgaagtggacggcagcgaacatgtgcgtttcgccatcatcggcatgggcaaactgggcgcacaggagctcaactatgtatccgacgtggacctgatctacgtggtggaacccgccgacatggacaccaacggcatgacactcagccgaatcggcaccaaaatggccaccacgctgcaacgtgtatgccaatccgtcatcatgggcgtcgcagaaccgacactctggcagatcgacggtggactacgccccgaaggcaaggacggtccgctggtacgcagactcgaatcccacgaagcctattacgagcaatgggcggaaaactgggaattccaggccctgctcaaagcccgcccggtagccggcgacaccgacctcggacaagcgtatatggatatgacccgaccgttcgtttggacagcttccaagcgagacaacttcgtctatgactgccagcagatgcgcaaacgtgtcgaagaccttattcccaacccgctgaaagaccgcgaaatcaaactcggcaggggaggcttgcgcgacgtcgaattcaccgtgcagatgctccaactcgtgcacggccgctccgacgaagcattgcgtaccagctccacactcgaatccctgcaggccttggccgaaggcgggtacgtctcacgcaaacaagccaagaaactttcatgggactaccgattcgaacgtgtgatggaacaccgccagcaaatgtgggcgctcaaacgcacccacctgttcccagacctcggcaaagccaacgctggcggtcttgaacgcaaacgagacatcaccatcgacgagctgaaccaaaatcccgaactacgtcgactcgcgcgcgcatttcacatgcatcccgaagaactcgtcaacaaatacgatgagacacgtcgtgaggtgcgtcacctgcacatggacatctattaccggcccatgctgcccatcaacgcgggactcgacgacgaacaggtggaactctccacgaaagccacgcaggaacgattcgaatccatcggattcgccgatgccgacgcggccatgcggcacgtcaccgcgctcaccgcaggcatctcccgtgcggcaaaaatcaaccgcatcctgctccccgcagtactgcaatggctcggcgaagggcagaatcccgacatgggactgcttaactggcgcaaacttgaagaaaacttcggctccgaaagcggatacctcggattcctacgcgattcaccatccgcggcacaacgcctatgccacgtactatccaactcacgattcctcggcgacgcactcaacaaatccgtcgaatcagtcacatggctcggcaacgacgactctttgcaaccacgttcgcgagaaagcctcgacattcaaaccaaggcgacgcttgaacgcaatgccggcaacatcaacgatttcgccaactccatccgagccatgcgcagacacgaaatcgaacgcatcggtctcgcttggatgagtggcgtgatcgacgatgaagcatcgctcgccggcatgaccgacgtatacgacgcggccatcgaagcatcgctgcagtgggccatccagcatcgcatcaacgacatacagatcgacgaagctccggcggcgatcgccatcatcggcatgggacggtacggcggtagggaagtgaacttcagctctgatgctgacgtgatcatcatctacaggccggccgaaggtgccgatgacgaccaagccaaccttttcgcacgaaaagtgcaggaagacctacgtgcgatcctgcaaggtccaaccacattcgaaccaaaaatcgaacttgacatggatcttaggcctgaaggcaaaaacggaccgctcgtacgttcctacgcatcctgcgaggaatactatcgatcctgggcaagcacatgggagcatcaggcgctattacgcgcacgatatgcggcaggcgacgcgtctcttgccgaggatttcctcatgaacatcgccgacccgttgcgttatccgaaaatcgatcttacggaaacgcagatcgccgaaatccgcaaactcaaggcacgtatggaagctgaacgtctgccgcgcggagtacgtagggatcgccatctgaagctcggcaagggcggactgtctgacgttgagtggacgatccagttgctgcaattgcagcatgcgggagacaatgccaacttgcgtgtcaacggtacgttgcaggcattgaacgagttggaacatcgcaagctgatttccgctggcgatgctgtggtgttgcgtaaggcatggcgtatgtgcacggccgcgcgcaacggcagttatctgtggagcggacgcgtcaatcaggctgatattttgccggacgattcatattcgctgggaggcatcgccgtgtatctcggttacgatgcgaatcgcggccaacatttcgaaaacgacctgctcgccgtgatacgcaaagcccgtgacgtaacggaacgcctgttctacggtcgttcgtgagtcgtgccatttgaacggctaggagcatggtgtggccgtcggaccgaagttatacggctctgacggttatgctgattcagggtttcgtgcatggaaggatggaggttgcgccacgaatacttgtgaacacgcggtgaactggcagggtctgcatttcaggctatagttggctaggtcacttcgagtggccaccttcaaccacaagttgcatgaaaggtgagccgttgtcttcagtactcgaacaggcggttgaaacgccgatggtcgggaaaagcgtcatcacattggatgatctttccattcgccagattcaagaattactccacaaggcgcagtacattgattctcatcgtaaagaagtggcgcacacctgcgacggcagggtgctcgccactttattttatgagcccagcacccgtacgcgtctgagctttgaaaccgccatgctccgactcggcggcaaggtgatcggcttcgccggcgcccagctcgcttccgtgaccaagggcgaaaccatttcggacaccctgaaaaccgtgtccaactacgtggacgtggtggcgatccgccacccgaaggaaggcgccgcgctcgtggcgtcccgtgcagcctccgtgccggtcatcaacgccggcgatggtggacatatgcaccccacgcagactctggccgatcttgcgacgatgcagtcgcgcttcggtcgcgtgaacaatctgactgtcggactgtgcggcgatctgactttcgggcgcaccgtgcattccctgatcgaaaccctgtgccgtttcggcaatgtgaacttcgtgctgatcagcccggatgagctcaagaccccgcagtatgtgctcgaccgcatcaacgccaccgactcctgctcctacacggaagtcaaggatctcgtttccgtgatcggcgatctcgacgtgctgtacatgacccgagtgcagaaggaacgcttcttcaacgaagacgactatctgcgactgcgcgacacctacattctcgacgaagccaagatggcttacgccaagaaagacatggccgtgctgcacccgctgccgcgagtcaacgaaatcgccgtcgaagtggatgacgacccacgcgctgcctacttcgaacaggtcaagaacggcatgcttatgcgcatggcattggaaagctcggtggtcggagacgaactgccgggatatgaaccgcttgaatccaaggaggttgcagcctgatggaagtcaccagcattcagaacggcatcatcatcgaccatgtgcctgctggcaccgcgctcaaggtgctcgaatacctgaaaattgatccggctaagaccaagctcgcgctgatcatgaacaccgacagccacatgttcggcaccaaagacatcatcaaaatcgaaagcgaagaggaagccgaaaccatcgaccttgacgtgctcggccttgtggcacgcaccgcaaccgtcggcattgtgcgcggcggtaaaatcgtagagaaaaagcagcctacactgccggaacatgtggtcaatatcatcaaatgcgtgaacccgcgctgcgtgactaccaccgagccagccgtacagatgttccacctggtgcattccgaccgtcaggaataccgctgcgactactgtgacgaggaagcgaagttctgacccatgaccctcacccttcacgacatcaaggtttggaacaccggcgaagtcatcgacctgatcgtcccatctgacgctgatgaaacggtggacgcttcggccatgaccatcgccccgggattcgaagatccccacgtccacttccgcgatccgggccagacctacaaggaatccatggtttccggttgcgcggctgccgcctctggcgggtatacgaacgtgctcatcatgccgaacaccgttcccgccatggatggcgtgaaggtgacggcgggggaaccgggcgccagtgaagtgctcgacgccggtttcgacacggtcatcgactatttgcagcattacgaacaagcccatgatgtgaccttgccggtgcgttatgacctgtgcgtatgcgcttccaaagggcgtgcaggcaaggaagcaaccgacgtggccgactggatcggctacctgcctgaacacgatgacgacaacaaggacgcctaccagctgtgccacccggtgaccgccatcagcgatgacggttccgcggtaacaccggaaatcctcgaccaagtgttcgacaacgtcaagaaatcaggcttatacctgatcgagcattgcgaacaccacgacaccggggcggtcaatgaaggtcccgtatcacgagaactgggcgtacccggcattcccgaagataccgaactgaaaatcgtcgaacgcgatatcgagatggcgcgcaaaaccggcgtgcatgtgcacttccagcatgtcagcactgcgatttctttcgacgcgattcgcaaggccaaagctgaaggcttaccgatcacgtgcgaaactgcaccgcactacgttgcgttgtgcgatgaagcattgctgaaatacggcactctcgccaagatgaatccgccgttgcgctccgaagaggatcgcaaggcaaccatcgcagccgtagctgacggcaccgtcgatctgctggccaccgaccatgcaccgcataccatggaagagaaggaccttggtttcctcgatgctccgaacggcatcattggtcttgaatgcgcgtatggcgtatgccacaagattcttgtggacggtggctttatctccgacgaacgcctgattgaactcatgtcgactgcgccagccgaacttatgggccacagcaaggccgacgtcacagcgttgcttgacgaatacgcagacgccgtccccggagacgacgacaccaaacgcgtgctggacctcgtcaaggttcctgcagaagaccgcgcggatctggtagtgctcaacaccgacgaggcatggaccgtgaatcctgaacgattccattcctcggctcgtaacaccccgtttggtggatggcaggtcaccggccgtccgctcgccaccatcatcggctcgaaactagtcttcagccgtatcaacaaggaggattgatggatcgcctgatcgaagcaatcgaagccaagcagaatccgagcgttgtgggacttgacccgaccgaagcgctcgtgccagcgcaaatcgtggccggctttgccgaggaaatcagcgaacaggttgaagatccggcggaagcgccgtccatgcagctttccgtggccttcttcgaattcaaccgcgccatcatcgacgctgtcgcagacatcgtgcctgcggtcaaaccgcagatcgccatgtatgagacgctcggtccggcaggcatcgacgcctacaccatgacctgcgaatacgccaagcagcagggcctgtacgtgctcggcgacgtcaagcgcggagacatcggctctaccgcggctgcatatgctcatcacctcagcggtataggattggacgacaccgcctatgatccatggcatgaggatgcggtgaccgtgaacccatacctcggcaccgatggcatcacaccgttcgtcgacgccgccaccgccaacgacaaagacattttcgtgcttgtacgcacctccaatccgtctagcagtgaactgcaggaacttgaactcgcctccggtgaacgcgtatacgagcatgtcgccgatctggtggaaggctggggcgccgaaaccatcggcaagaacggctattcacgtgtaggcgcagtggtcggagccacgcacccagaggaaggcaaggcattgcgcgcacgcatgccgcacacgttcttccttgtaccgggatacggcgctcaaggcggcaccgcgcaaggtgtggccggcatgttcgaccgtgacggcatgggtgcgcttgtcaactcgtcacgtggcgttatcggtgcatggaaaaagtccggcaagtattctgaatccatgagcgccgacgatgctctggatctggttgcggaatcagcccgtgaggcagccaaagatatgcgtgacaatctgcgtgcggtcttgccgtaacctgccgactggccaactgttcaatctgaaagaaaaacaaccaccaaaccatcgaacgtaacagagagggagttcatgaccaccgcaacaacgttcgttccgaccgttgccgaagcgactgcggcaggctttttcccgagccggcatgaagtcgaggtcgttgacaatcaggaactgactgacggcgtgtaccgtttgacgttccgtgacgaatacatcgccagccatgcaaagccggcacaattcgttgacgtatattccaacgatccaagcaagctgatgccgcgtccgttcggcgtttgcgaaaccaacggcgacgaagtcagcctcatgttcgccgtggtaggcaagggcaccgcagaatttgccggattgaaagctggggacaccattcgtgtgatgggcccgctcggcaattcgttcaagaccaaggagcccgccaattatgtgctcgtggcaggaggtcttggcgtgcctccgctcgtgcatgcggcacagcatatcgccggcatcgaaggcgcggtcagcaccgcggtgttcggctaccgcaacgtgcgtttcggcgacgaatatgcgggcaagtatgccgacaaggtgtacagcatcgacgagagcgaaggcaacgtgatcaccttgcttgaccgcatcgaaggcgagttgatggattcgggactcaagccggtgattctgacctgcggtcctctgccgatgatgaaggccgtcgccgcatgggccgtgaagcgtgacatggcgtgccagctgagcttggaacagcgcatgggctgtggctatggcacttgcgtgctgtgtacggtcgacacgttggacggacgtttgaaggtctgctccgatggtccggtctttactcgcgaacgtttgggatggggtgaatgagatgatcgacgatacccagcatgagaacctgtacggttcgtacgagtggaagcatcccacgcaggtggcgggcgtgccgtggaagaatccggtcgccacggcttccggcaccttccagtatgcggcggtccgctggttctacgacgtgagccaactgggcgcggtcaccaccaagggcgtctccccggtgccatgggaaggcaatcccggcattcgtaccgctgaaggcccatccagcaacatcaacgcggtcggcctgcagaacccgggtgtggaccattatttggaagacgacctgcccaagctcaaggccatcaacgccacggtcatcgccaatgtggccggtcactgcgacgacgactatgtcgaagtcgtgtccaagctgaacgattctccggcagacatgctggaaatcaacgtgagctgcccgaacgtgtccgccggaggtatgagcgtcggcactgatccggtggcgttgagccgtctgatcacccgcctgcgcaagctcaccgacaagaagatgattgtcaagctcacgccgaacgtcaccgacatcaccgtgcctgcccgcgcggccgtggaaagcggcgccgacgcgctgagcatgatcaacacactgctcggcatgcgcatcaacattcgcactggagaaccgatcatcgaccatgtgaccggcggcgtttccggaccggccgtgctgccgatgggactcgtggccgtgtggaagacccgctccgcattaccgaacactccgatcatcggcatcggaggcatcgattccggtgagaaggcgcttgaatacctgtatgccggagcgaacgccgtggaagtcggtgcggccgcactgttcgaaccgaccgcgccattgcgtgtggcccgcgaactcgacgagctgctcgacgcacgtcccgaactcgcagacaagctcgccaagggcgaaacttggcgttgacctcgatcattcatcaaaggagcatgacatgactgaatccctcgaccaccgttttaccaagttcctgctggaagcgcaggcgctgaaattcggcgagttcacgctgaagtccggtcgtaagtcgccgtatttcatcaatgcgggcgcattcaacgacggacgtaagatcgccacgctcggcgcattctatgcggagaagatcgcggcggaaatcgaagcaggcaatctgccgaacgacatcgacaccattttcggtcctgcctacaagggcattccgctgggcgtctccaccgcgatcgctctgacttccggccacggtatggaagtcggctacaccttcgaccgcaaggagaagaaggatcatggcgacggcggcatgatggtcggcacccagctgaccgacggcatgaaggtactgctcgtcgacgatgtgatgaccgcaggcaccgcagtacgcgaggtcattcccaagctcaaggccgaagcggatgtggaggtcgtcggcttggtgctttccgtggatcgtatggaaaagaccaaggattccgacacgtccgcggtgaaggccgtcgaagcagagttcggcttcccggtattcgccattgccaacgtgcgcgagatcttcgaggccggccagcatatcgaaaccgctgacggcaccgcgtatgtgaccgacgagatcaaggccgctgccgacgcttatctggagcagtatggtgcctgaattctataggcgggtcctatagttgacatatgaaaagtgcctcacaccaatcgaaagcatcggtgcgaggcacttttcaatctcatatcagagtgcatccagttgatgagtgcattcagtcgatcaggttgtatccatggtcggccaccaccgacttgagcttctccaaatagttttccgcggccttcgacagcttcgcacgctcgttcgtgatccagccgaccagcatggtctcatcggtgtcaagcggcacggtcacgattttctcattgttgagatcgccgttgtcgatgccggtgcacacggtgtagccgttcagaccgatgatgaagttcagaatcgtcgcacggtcggtcacgttgatctgcttgggggagtattccggccagaccgcctcttcggcgaagaagaagctgccctcctcgccctgctcgtactggatgaacgggaacggcttcaagtcgtccatcgtgactttcttcttgccggccagtggattgttgcgtgaaatgaacacatgcaacggagcacggaacagtggatggaattccaaatgcttttcgcgcaacatcttgccaatcacgtctttgttgaaatcggacaggtagatgatgccgatttcggaaagcatgttcgccacttggttgatgatgtctttggtgcgcgtctcacgaatggtgaactcgtattcgtcggatttgatggagttgatcatttccacgaacgcttcgacggcgaacatgtaatgctgtgtggacacggagcacagctgcttgcgtggcttcgcgttcttgtaacgttcttcgagcagcgacgcctgatcgagcacctggcgcgcgtaggtgaggaattccgctccgtccacggtcaaggcgatgccttgcgacgagcgggtgaagatctcgatgccaagctcgttctcgagttccttcacagacgagctcaacgcgggctgtgacacgtacagctcgtgcgaggcttcgttcatggaaccgcattccacgattttcacaatatatttcagctgaagaagagtcataaattcaggttagagccatgtactgaccgtgggggagtgcttataccctcttgtctggatagtggactgccgatcgcgcagatcaaggacgtgaaaaaaccaattgcagcttgacgaggatcgcacacagttggaaaccccacaaaccgtgctcgacaaaaccggtcaggtgttcgcccaatgggagcggaccggcttgacgggtcaggcccacaagcaaaagagttgcccctatcggagtgctccatatcggcataagcgacaaaaagggattgcccggctttctacacaccagacaatcccgttcgtcacaacctactacagttcggtctactggtacagatggccgccctgctcgcggaagcgctcgctcatctcttgcatgccggcagcgatggtttgcgcgtcggcgacgagcttctcctgtgcttcggcattaccgaattttttgcggatgttttggctgatggccatggaacagaacttcggaccgcacatcgaacagaaatgcgccatcttcgcaggctcggccggcaaagtatcatcatggaacgcgatggcggtgtccggatcgtagctcaggttgaactggtcaagccaacggaattcgaaacgtgccttgctcatggcattgtcgcggtcgatggcatgcggatgatgcttggcgatatcagccgcatggcaggcgatcttgtatgcgatcacaccttgcttcacatcgtccttatttggcagcccaagatgttccttcggcgtcacataacacagcatggcagtgccatagcgggcgatttccacaccgccgatcgccgacgtgatgtggtcgtagccgggagcggtgtcggtggtgagcggtccaagcgtatagaacggcgcgtccttgcagatcgccttttccatctcgatgttcatgcgcacggtgtcgaacggaatatggccgggtccttcgatcatcacctgcacgtcgtgttcccatgcgcgctgcgtaagctcgcccaaagtcatcagttcggcgaactgtgccgcatcgttcgcatcggcaagcgatcccggacgaagtccatcacccagtgagaatgcgacatcgtacttggcgaagatctcacacaactcatcgaaatgcgtatacaggaagctttcctgatgatgctgcaaacaccattcggccatgatcgaaccgccacgcgaaacgatgcccgtcatacgattcgccgtcaacggcacgaaacgcagcagcacaccggcgtgaatcgtcatgtaatccacgccttgctcgcactgttcgatcactgtgtcgcggaacagttcccagctgagcttggacgcatcatcctccaccttttcgagcgcctgatacattggcacggtgccgatcggcacgggggagttgcgcagaatccattcacgagtggtgtgaatgtcgttgccggtagacagatccatcacagtgtcggcaccccacttggtggcccacgtgagcttctccacctcctcgtcaatagacgaagtgaccgccgaattgcccatattggcgttgagcttggtgaggaacttcgagccgatgatcatgggttcagcttcgggatggttgatattgcaaggcatgaccgcacgccctgcggccagttcgctgcgtaccaattccacgctgcaatgctcgcgctccgccacatagcgcatttccggcgtgatgatgttgtggcgcgcgtaccacatttgcgtcaccggatgatccttggccttcatcggcttatgctggcgaccacgccattccttggaagccttgccacgtttgatggcgcgtttgccgtcatcttccaaattgcggcgacgtccttcatattcttcgacgtctccacggtcaagaatccagtccaaacgtaggggagcgagaccctccttcggatcgcatttcggaccttcggtgttgtaatccttgaatggtgcgttcggtccgacgccaggagtgtcagacagtttgatttcagtgtacggcacttgcagatcgtaggaaccgaattcgttttcgaaatgcaccggcgtggttttgcgaatatgtgctttgtctcgctgcttggaatcgcgtgcggcaatgtcgacgcgctgttgcttggcaagcttggaggcggccttggcttccttcgcattggtgaacttcttttcgccggatgcgccgtcggctgtgttgtcagtgttgatttccgctgttttctgggctttcacgcgcggcgcgtacccgtgcttcgtgtcgccacgtacggctttccagcgcgctaccatattgcgggttgcagcttccggatcatcggctcctgcaatcgtggacaccacgaaccagcctgccgcctttgaatgcgccagcatctccatatcatctgcggtcacgccaccgcctaccactaccggaaaaccactggctgaacaaatggtgttgatctgctcttcgtcaagcgtgcgaccggaaccgtcattgccgcctacggacgcttccggcttggtgacggaaacatgcagtggtgccgcaccgatatagtcgatgcagccgtcgggcaattcgttgatgagtttgaccaggctttccgtttcggcggacaagcccacgatggcatcttcgccaagcagtgcacgggcttcgcgcggttccatatcggtctgtccgatgtgcacgccgtcaaccttgatgcctttgctgcgggcctgccagaccacgtccacacggtcgtcgatcacgaatgccacggaatccgacttattgttgtcttcgatgatttgcgcgatatcacgcgccatgtcggtgagatccttcgcgtcagcgtctttgacgcgcagttggatgaagcttgcgcccccgcgcaatgcgtcatcgatgacgtcggtgatcggtcggcctttgcaatcctgtggtcctaccacaaaataggcgctcaggtcgaagctgtctcgcatcgacgcatatggataattgctcatgattcccccttgattatgatgttttgggttgggaaaacttgatttcgcaggcaatgggtatgctgacgcgcccgtatgctcggttatacgggatagaaaacggaattacgattgatgattgcgcgatgcagactgtttggtcgacgcatctgctgcgcagacttttacggatgccaattgacgctggcaatgcgtgtgcgctacgacactcattcttcgctccctacgatggtgttaaccaacaggttcaaagggtcaggcattcgcctatctcagctccgttggggagcccccctgctttacgtgttggctatgaatctacgccctgcactggacgtaactttcatcgaagcccacaggagagttaggccagccgtcactttcgcatgtatcgcctccatccgcgtcacgcctccgccgcgcaactcacagcaaactctccttgcaggctaatctatacttcagttcaatgcattgcgtgtgaaagaggtcgactacatgttggaaacggaacggctgacattgagggcttgggcggaaacagatgcggaaagcttgtactcctatgcgaaagatccggatatcgggcctatcgcgggctggcccgcacaccgatcgaaagaagaaagtctcaatacgattcgtcatgtgctcaatggcaaggaatgctacgcgatttgcgagcgcggcagcaataaccccattggttcgattgagttaaagcttaatggtcatacggatatgacggatcgtgatgatgagtgtgagttgggttactggctgggcaagcctttctgggggaggggttatatgccggaggcagccaaggaggttatccgtcatggttttgttgatcttggtatgagtgcgatttggtgcggctattatgacggcaatctgaagtcgaagcgggtgcaggagaaggttggttttgtctatcatcacacgtgtgatgaggtaccggtgcctcttatgcacgaggtgcgtgtcgggcacgtgaatgttcttaccaaatcacgctggcaaaatttagctgcctgctgattgtgctagaagctaacctagaatgctttggaagggtcttggtgggcttcgaacggatgctggtcaagaccctttagagcttcatgatgttttcctcgatgcgacggatgatgtcaatgaaagcttcatcgttgtgcccggttggatctggcagattccaattatcgtcgaaagtcttgccgatatagggacatcccacgtcgcagcccatggagatcgcggtgtcaggttttggaatatccgaaatcagcttggagtattgcgttttctccatgtcgatgccgtaaagctctttcatgagtcgtacggcatcctgattgatctgcggcttggtttccacacctgcggaataaaaatcacaatcggttccgcgtagatgctttcccaacgcttcggcaatctggctgcggcatgaattatgcatgcaaataaaagccacttttctcatagctttccctgtctgcgatgttatgatttcacgattgctgtcccgtattatacgtttcgcccaatgctccgcgttcacatcatcgaataacacaatgcccggtacgaccatgtcataagctggtcgtaccgggcattggcttggattattcgccccagacttcttcggcgatggaccttacgagtgcgatcttggcccactgctgctcctcagtgagcttgttgccttcctcagtggaggcaaaaccgcactgggtggacaggcataagcggtcgagcggcacatgctgggccgcttcggagatgcgagccttaatcacttccggatcttcaagttccggtctcttggaggtgacgaggccaagcacaacctgtttatcgccggaaacctcagccagtggcgcgaagtcaccggaacggtcgtcgtcgaactccagatagtaggcgtccacgttctcttcgccgaacagcttggctgcgaccggagcataaccgccggacgacagccacgtggaatgaaaattaccacggcagatatgggtgttgatcaccaaatcatcaggctggtctgcgatcactgtgttgatcacgtcaagattctcctgctgcaggcgggccgcatcctcatcgctccagccgagacgctcacgcacgctcttgtcgcacaggcgagtccaagtgcagtcatcgaactgcacgttacggcagccggcggcatacaggtcggcaatgacctgacggtatgcggccacgatatccgcggtcagctcgtcgtcatctttgtagaactcgtcgtacgggtaggcgttcttgttgccggtaagcacgaaacgggtctgcgctggggaaggcatggtttggcgagcaacggtattgtcatcttcaaactgcctgacgaacttgaaatgctccacgaacggatgatcgtgtccgtcgagcttgccggtcaccgtggcagtgtcggcgggagtgacctcgtcatggaaggcaacgcgatgggcggctgcgacatggtccacgccgttgaagccccacatgaaatcgaaatgccaccagccgcgacggaattcaccatcggtgatgacatgcagaccggcggccttctgcttggcaaccagatcagtgatcagcctgtcttcgacggccttcagcccagcggcatcgatggtgcctgcagcataatctgcacgagcctgcttgagttcgtccggacgcagataagaaccgaccacatcggcgcggaacggcgcattcttggaatatgtcatgattctccttcgactattgacttgcaattaacaatcacaacgacaaaaccaacaatatgatatcccaccacccacgaacgaggcacattccatccgcctggttgacaacgtacttccgtccatccgcagagttttcaatgctggaataaatgggggtaaatgacactgcatggcgttccgatattggcagacgcgcggccgatgattgtgcaaagaatcgcgaaaggcatgcggaatcacgacatgagttgcgttgtgttcgtatataatcgcaacggacatgaacgactgcaaggaggctgccatgactgtgccgcaacgagtgcttgacactatgaattccggactgatctacacctgcgatgacgaagagatgatcaaagcacagaaggaacagatggaactgctatacgacttcaatgcaacccgccccagtcaaatgacgcaacgcaacgaaatcgcacgccaactgcttggcgaattcggcgaggacgcttatatcgaaccgccgttacatgccaattggggatgcaacacgtatttcagtgcgcacgcttacgccaatttcaaccttacgttagttgatgatggtgaagtgcatatcggcgaacataccatgatcggcccgaactgcactatcattaccaccggccatccgattcgtcctgacctgcgcgagaaggtcacacagtattctctgccggtcaccatcggccgtaatgtgtggttgggcgccaacgttaccgtgcttcccggcgtcaccattggcgacaattcggtgattggcgcatgctcgctggttaccaaagatattcccgccaatatggtcgcattcggacagccatgcaaggtgtatcgcgaaatcggcgaacatgatgacgtctactattggcgtgaccgcatgatcaacccaccctatgaccagaagcagtaaaacaaatcactatcgaccaaccgttcaaacaggtcgaatcatcgtggactagtcgttatgacagatccacgatctcataatttgcgactgtcaagcgaaataccgggcgcaccattgctccaccacacgggcaaggtgcgccttctttgaaaactcagtcctggttgctccaatcaatcatgcttcccaccataacgtgcgaaacgtaacgcacgcatgtccgcggtagatatttagataattatctaaataagaaaatgtgtaaacattgcgaagtgaaggaggaatgtatggcaggggagggattcaaagcgctctccgatcccacgcgacggcgcattttggaattgctgcgcgaacgtgacatgacggctggtgaacttgcggaacaattcaacatgagcaaaccgtcgatcagccaccatctgaccacgttgaaaaccgcgggactggtaaccgacgaacggcacgggcagaacatcatctacagtctcaacaccacggtgatgcaggatctgatcggatggttcatgggattcatggacggcgatggaaacgtcaatcaagcgaatgatcaaacagacaataaataaaggagggtcttatgcgcgggaacaacttgaacgatttaaaaaacaacatcaacaatgccgaagacaagaacaagactgattcgggggagaagatcgctccgatcggacgcaatctgtgcattgcgcttgttgcactgtgtgtagtcaacatcatcgcacatcttgcctgctatagtcggcttcccgaaaacgtgccgattcattggggtgccgatggttcggtcaatggttatggcccgcgtgccgtaacgttgattcttgatgtattgccgttgctgtgcttgggacttttcctcgtcatcccgaagatggaccccaagggagaaaactacatgaaggccagcggactgtatcgtggattcgtcatcgcgttcacactcatcatgtgcggtgtcacatggttcactgaagccaccgcattcggtgtaatcccagctaccggcggtcccgttgggcttattgtcagcgtggtattgggcgcgctgttcgtcggcttaggcaattaccttccgcgcatgcgccagaattacactttcggcatcagaacgccttgggccctggtcgacgagaacaattggaagcgtacgcagcgtgtgggtggcatctctttcatggtgttgggagtgctgttgattgtggcgggtgttgtcagctctgtcgtgcctgtgggcgacatgctcatggtcgcaattattgtgacgatagcggttggtgcagcgctcgttccttatgtatacagctacctgttgttccgccgcagtcgcggttcgcggcaaaactgaagtaacgtcatagcgacgctagataccgtcgccttgacgcagaacacaaatcaacgttgacaaacgccgttggcaatctgggaaagtttaatgaacggactcaggagaaccaattgcaaacagtgaaggaatcgaatctgaatttcttcagtccaacaatcggggtgcggttcacatgcgtgcgatccgcaccctttgttaattcaagtgttcgttttgaaaaagtcagaaatccatgcccaaagatttcagatcgcggcgagcctgaccggcgttagtgaagcggaacgcgtgcatgcccacggcctgtgcgccagtgacgttcttcgcggtgtcgtcgaagaacacgctggattccggcctgagattgaaacggctcagcgccagttcgtagatgtcggcattcggcttgtgcatcttctctacgccggacaccaccgtgccctgcagcagctcgccgagctgcgggaaacgttcgaatgcgaaatggaacgtctcatgcgaccaattcgtcaacccccacacgccgtagcctgcagccttcaaatcacgaagcagctgttccatatccggaatcatgcgggggagcgcatcgccgtaacgttcgatgtaatcgcggaaaatctcggcgatctcttcgccctgttcacgtaccacgtcgggataaatggcttcgaaatcctcgccatggtccatgcgatcctcataatcgtagaagccgcacggatcattatccgcgcaaatacggtctacaaccacttgggggtacctgccttcaaggcatgcgcgcgtctgccagtcgataagcacgccgcaaaaatcaaagaccacatcggtgacgttggcactgggggaggtcatgaaaatccttcctgcaaaatacggattggcaacgctagtgtagcgcaaagccaccgatgctggggctggtgttcggtaaatttgttttgcaattaaagtaattgcaaaaatgccggctgaatgccgccgataatatcgctcgcgatgatcggatggccgatttccccgaaatgctgctttttggaatgcccatagatctgcggacgatgccatccacgctgttcggatcgcgatgcgatcgcgcccgcaagaccatgtatgtaggctccggccgccacgacttcgggaactaatgccgaatcctcggcaagcatgtcgtcctgttgcgcgagcagggcgcccaacatgccggcaagcacatcgcccgatcctgcggtggacatccacgccggcgcgcgtccggaaagaatcacccgctcgttgccttcgccgtccgtgccgaccaccatggtcaccgcgcccttcaacaatacggtcgcgccggtcagctcatggaccctgcgggcgcaggcgagcggctgcgagcgcactttgtcgacgctggcttcgtttccgtctagccgagtcaacatgcgggccagctccccgacgtgcggggtgacaaccacctgagccggcactttgcctggcagcaggtccaaagctccggcgtctaccacgatcggcggcatgcccagggcgctttcattcctggcgtcgtcattggagccggttttttcctgcagtgcgtaatgcttcaacaacgcggttatggtttcgcgttgaatgtcggtgtcggcggcttcgtcgtcacccgtgggaacgccggaaccaaccacccatgattggacgcggcccttgccgatcaccgcctcgggcaacgaggaaagcaccatgtcctgcgctcgttgcgggccgagatagcgcaccatgccagtgttggcgcgcgccgccgccgtggccgacaatacggctgcaccggggtaacgggcggagccggtcaccaagccgaccactccacgcgaatacttgccgtccgaaagttgcggaaggcgaatcgaatccgttacgaaatcgccgtccgtcatttcggccgcggggacgcaatcatcaatgtcgaaaccgaaatcgaccaaagtgaggcggccgcatgcgtatgaggcgggtggcaccatcgcgcacggcttcatcgcgccgaatgttaccgtaacatcagcaggaatgtacggtcctggaagcgaaccgtcatttacgccaacgccggacggcgtgtcgatcgccacgacgagcggcagggcggaggaaggctcgttgttcggcagggcgggcctgtcgggaagttcgccatcgaatcccaaggaggaagcgatggcgcctgcgatgccacgcaatgcgccgcttacgccgattccggtcatcgcgtcgatgatcacatgggagccctgaacgtattcaacggcggcctgcagtcgttctccggcctctcccgcggaaaaacccgtggtgcatcctgggatttcggcggcgggatcaagtacgagaacacggcctccggcatgcacgaacgcgccgaacgcctcctcgtgcagggaacgtcccacggcgatcgcggtgacatgcgcgccttcgttcgccagttccgcgccggcgtatagaccgtcgccgccattatctcccgcccctacaaggagggctacccgcgcgtcctcgacggcgaggtcctcatcatcgagcagtgtcatggtcacatgggccgcagccgaggcggccatgcgcatcagcggcacgccgtcgtcaagcagcggacgttccatctcgcgcacggtatcggaatcgtaagcgctgtacagcagtgtttgcaaacggtcggcgtcgtcggcgatgtccataacgttcccttcctcgtcgtctatgagcaacaatccctactgtagtcgtaatattgggagtcaaggatttttcggcgtggaatggagaccaaaatggcatatatcgaaatgcagcatagttacaagcgttaccaaatgggttccaccaccatcaccgcgaacgatgatgtgagcttcggcatcgaaaaaggcgaactggccatcattctgggcgcgtcgggcgcgggcaagtcgacggtgctcaacattttgggtggcatggacacgaattcagaaggcagcgtggtcatcgacggacgcgacatttccaactattccccgaaacagctgacggcttatcgcaggacggacatcggtttcgtgttccagttctacaatcttgtggcgaatttgaccgcgaaggaaaacgtcgagctcgcctcgcagatcgtttccgatgctcaggatgccgtcaaagtgttggaagacgtcggtctcggcgatcgtgtcgacaattttcccgcgcagctttccggcggtgaacagcagcgtgtggccatcgcccgagctgtggcgaagaatccgaagatcctgctgtgcgacgagccgaccggcgcgttggactacaacaccggcaagcaggtcctgcagattctgcaggacatgagccgtaggaaaggcgccaccgtggtgatcgtgacccataattccgcgatcgcgccgatcgcggaccgtgtgatccgcatgcatgatggcaaggtcaccgccgtcgacgtcaacgagcatccgatggacatcgcggaactcgaatggtgatgtcgcgacacgctgtgcgacactcgatttgcgaagacaaaggatttgtgtaatatatgtgacttgtgcacggaagcaattccgtacaggaagcacattcctgcgtagctcagttggcagagcatccgactgttaatcggacggtcactggttcaagcccagtcgcaggagcgcgtttttaggtttttcctgattttcgtcggggagaagcttagaacaggagaatattcctgcgtagctcagttggcagagcatccgactgttaatcggacggtcactggttcaagcccagtcgcaggagccacatgaaagcccttggaaatcaagggctttttgttactctaacgaatcaagcacgtcgtcgatcagcgtgcgctcgtgcggtccatcggtcttgagccgaggaaagcgccgcaacgcgttggcgggacttgccccggccgcgcgcgccacattcgatttcgactcgccgtgcgccaaagccgtttccgcaagacggtccaccagcgagtccgacaccttgcggatctgctcggcaacccacaactgcgccagttcgggggagagcgcgtaatcgtcctgcaattcgcttgacgcttcctgcacggccgcccacagcaccataaaaggcttctgatagtaggtgatccgatcgtaatcggactcgctttccagttgctgcaacgctttgcgctgtgacgtgttatcgctcatacgttccatcgtatgccgagacacgcccggagcctgtggataactcatcctccgaccacagggccgtttcagctggacaagcacaactccacactgtcatgctggcgatttaccacagcacaacgcaacggcgcaaacacagcaacgtgaaggagccatcatggacgaacgtgaatatcgcaggcgaatccgacggaacagaatcgcacaggaggaaaagaagcgcatccgccagcagttgcgccaaaccatggtcgtatgcgctctggcatgtgtcatgctgctcgtgtgctgcctatggtcggccgaaccgacgtatgcgaaaacgaatgcggcgaccgcgtccggttcctgcgccgtcctgatgcgatggccgctgaacggcgcgcaggtggtcggcaagtacgatgcgccgaaacaacagtggcttccgggccatcggggtgtcgacctgcttgcggaccctcaggaagccatcgtcgcgcccgcggacggcgtgatcgccttcagcggcaacgtgggcggcaaagccgtggtcaccatccggcatggaggcgacctttccggcctgacctcgacgttcgaacccgccattgcggaacgcgatgtcggcgcacatgttgcgcagggggagcgtttcgcgcgtgtggagggcgaatccgaccattgcgacgagcggtgcctgcattgggggataaaatcggaaggacggcaatacaccaatccggaaagcaaaacccgtacggtgagaatcggattgaaaggcctgtgaaacaggggtcgacagaaccattgattttgtccatacgtcgtggcctcgtcgaaaaaagtgaagctctcaggctatgatgctacatatacgacgattacgcaggggagaaatgccatgtacaaggaatacacgcggcctttggaacagcagatcgacacggataagaacattttctcggtgcttgatgaacgagcgaaccgcactccgaacgattcattggtcgaatacaagaacgagcatggcgagtggtcgtcgttcagcgccaccgaattccgtgccaaggtcatcgccatcgccaaaggcctgatcgcccaaggcatcatgcccggcgaatcggtgtccatcatctctcacacctgctggcagtggactgcgctcgacgtggccatcatgtcgatcggagcgctcaccgttcccgtatacgagacgaattctcccgcgcaggtcaaaatgatcttcaacgacgccaacgtcaaaatggcgttcgcagaagatgacgcgcaacgcgacaagatcgaatccatcagaaacgaatgctccaatcttggcgacgtctacgtcatcggacttggcgcgatcgacacgatgatcgaatacggacatgccgtgtccgacgccgaattccaagagcgcgaacatgcggtcaaaggatcggacctcgccaccatcgtgtacacctccggctccacaggcacgccaaaaggcattgagctcacccattccaatttcgtgttcatcacctattcgggcattagctccatgcccgatatcgcgatgaagccgaaccgtcgtctgctgctgttccttccactggcgcacgtgttcgcacgctacatgcagttcttctgcttcgcaggtaacgtctcgctcggcctatccagcaacttgaagacgatcctggctgatttcaaagcgttcaagccgacgttcatccttgccgtgccgcgtatcttcgaaaagatatacaatgcggcgtcgcaaaaggccggagccggcctcaaaggacgtattttcgcaggtgcaacgcagacggcgcgcgactggtcgtacgcacagcagtcaggcgaaggcattccggttgtcttgaatctcaagcatgcgctgtacaacaagctggtgtactcctcgatcatggacgtgttcggcggccatgtggaatacgcggtttccggaggcgctccgcttgattcatccatcgcgcattttttcaatggcgtcggactgccgctgctggaaggctacggcatgaccgaaacctgcgctccgtcaagcgtcaatccgacctccggatacaagattggcaccatcggactgcctctgcagggcgtggccatgggtgtcgacgaggaaggtgaactgtgcatcaagagcccggccgtatgcgccggctaccacaacaatcccgacgtcaccaggcagcagattgtcgacggctggctgcataccggtgatcttggttccatcgacgacgaaggcttcgtctccatcgtcggacgtaagaaggacctcatcatcaccgccggcggcaagaacgtctctccatgcgaaatggaagcgtcgatcatgacgtcgcccgtggtgagtcaatgcgtgatgatcggcgaccgcaagccgttcatagcggccatcattgcgttggatcttggcgaaacgaacgcatggcttgcatcgaaaggcgcggaatgcgcggcatccctcgaggaggcctcccgcaatccgatcgtgcgcgccgaagtggaacgtgccgtcaacaaagccaacgagctcgcatcccgtgccgaatcgatccgtaagttcgaaatcgtgccggacgagttcaccgaagaaaacggcttggtcacgccgagcatgaaggcacgccgtcaggcggtggttgatcactaccgcatgctgatcgacaccgtcatctacgttccgaagaagtagaatgcgatgatcggcggtaggaatgtgccggccgcaacataaaaagctggcttccgtcgcggcggttcgacggaggccagctttttccatctcttgtcggatttcctatgtctgataatccggattaccttgttgccggtctacaagcctgcttcggcgagcgagatatatcccggttcgatcagcgttttcttcagattgctggcgctgaccgcaagcgcctcttcctgaatggtcggcactttcatgtcttccatggcgacggatgagatgaacgtcagcttcgcaagtttgcccgacgtgttgagctgcacgcaggtctgtgcgatgtcggatgctaaggtcttgcgattttccaaagcggtcatccactgtttgccgttcacgatattcggtatggagctgacgtaggcgccgtaaccggtgatgatcggccattgcgagttctgctcgtcaagggaatcgctggtatcctccgtatcggaatcgccgtcatcggattcaggcgcctgcgcaggatcgggaacggactgttttttcaggtctttcttgccggtgatattgtctacgatgccggaaatggtgatggatgggttgatgtcggccgccgaaccggtatatccaagatcgttgagctcttcggaagcatagccggccacataatcattgcaggagatgatgccgtcgatgcgggtatggcgcgatgtgtccttatccatgccgagacgtccggcgagcgtggatttgacccgctcacttttcgccgcgtcgaacgccacggacacccaatcggattccgtgctcgacgaggtcagcgtgccggatggggaaacggccttcccatctttgaaatacggtccaagcactgaccaaatgcctttgaacacgccttgcgcgaaagtcgcgtccgctgtgctgccgctttcattggcggcatcgtaggggagtagcacttcgatatgcttcggattgtcggagctggttttgtcgagctcgagcttgctgaccagctgtttggcttgaagctggccgatctgctcggccgtggtcatcggcacgtacacatccggagtgaaaccctgcagcgtgttcgacactaacacgactttcatgccctcgttttgagcgagctgcaatgcggaaaccaaacgttccgcggattgggcgtagtcctgggcgtcttcgtcggaggagctcccattccatgtgatggcgtgcgacacatagtctccatattggcggtcggattcggtggtgtcggccaccggcgccactaccagagtggttttgtcggaggaatccgcatcgtcgctggtgctgttgacgtgattcaccacgtaatcctgcacgctttggctttgcttgtcgagacttggcgccgctttgacggtgatgttggcgcctttgacatcattgtctttcaatgatgaaacgatttccggcaccagcttctcccatttgctcagaggcgtctgctgggagatggtgatgccgtccgaaggggtgaagatcaccacgttgccggcatcggtggcagtggcggtgctgggggagtccgtttcatgcgattgcgtttcattggcggatgagcaggcgcccatggtcatgatgagcgaggtcgatgccaacagtgcgaacagacgtttcgtcacggtcgtgcggtgcagtgtcatgccgtttccttcatgaaaatcgaatgatgattcctatgctgagctccgattgtaatatccggacgtcaaaaagggctggatatgcgtgtgaaccatacatatccagcccttttgagcctgctgctggccgttcagccaaaggttattcggctaggtcattcggccagagccttggcgagattctcgtccaaagcgttcatgaagccttcggtgtcaagccaggcctgatccggaccaacgagcatggcgagatccttggtcatctgaccgccttcaacggtagacacgatgaccttctccaaagtttcggcgaaatacttgacttccggagtgttatccaagtcggcgcggtgcttgagaccgccggtccaagcgaaaatcgatgcgatcggattggtggaggtcttctcgcccttctgccagcggcggtagtggcgggtcacagtgccgtgtgcggcctcggcctcgacggtctggccgtcaggggtcatgagcacggaggtcatgaggccgagagagccgaagccttgcgccacggaatcggactgcacgtcgccatcatagttcttgcaggcccaaatgtagccgccatgccacttgagggagctggccaccatgtcgtcgatcagacgatgctcataagtcaggcccgctgcggcgtacttgtctttgtattcgttttcgaacacttcggcgaacgtatccttgaactggccgtcgtatgccttgagaatcgtgttcttggtggaaagatacaccggatagccgcgcatcagaccatagttaaagcaggcgcgggcgaaaccacggatggaatcgttcacgttgtactgcacctgggccacgccgccgtcggcaccatagttgtacacgacatgttcgatcggctcggaaccatcttccggagtgaaggtgacggtaagcgtgcctgcccccggaaccttgaaatcagtggccttatactggtcgccgaacgcatggcgggctactacaatcggcttggtccagccgggaaccaggcgcggaacgttgctcatcacgatcggctcgcggaaaatggttccgccgagaatattgcggatggtgccattgggggacttccacatcttcttcaggccgaattccttgacacgcgcctcatccggcgtgatggtggcgcactttacgccgacatgttcacgctggatggccttcgccgcgtcgacggtcacctgatcgtcggtggcatcgcggttttcgatgccgagatcgtaatactcgagatccacgtcgaggtatggaaggatcaggcgatccttgatatctttccagatgacgcgggtcatttcgtcgccgtcgagttcgacgaccttgccttcgaccttgattttggccatgtgttgccctcctgtcgggattgaaggtgataagttcctgtcttataacgaacgtgttaacggcacctgttaatgtccaaaaaaacggtgtggcggcaggtgacacgctcttgcatactgtcattgctgagcattagccttgaaaacatgtctcaggaaattgaaatcggtttgggcaagaagggccgtctggcatactctctggacgacgtttccattgttccctcccgtcgtactcgcgatccgcaggatgtgtccacctcgtggcaggttgacgcttatgaattcgacgtgccggttatcggcgctccgatggattcggtgaccagcccggccaccgccatcgccatgggcaagatgggcgcgcttggcgtgctcgacctcgaaggcctgtggacccgctacgacgatccgcagccgctgcttgacgagatcgccgaactgccggccgaaagcgcgaccgagcgtattcagcagatctacgccgagccgatcaagccggagctcattgtcgagcgtctgcatgagattcgtgacgccggcgtcaccgttgcgggcgccctgtccccgcagcgcacgcaggactattattcgaccgtgctcgaagcgggcgtcgacctgttcgtcatccgcggcacggtcgtttccgccgagcacgtctcccaggatcacgagccattgaacctgaagaagttcatctacgatctggatgtgcccgtcatcgtaggcggcgccgccaactacaccgcggccctgcacttgatgcgtaccggcgcggccggcgtgctcgtcggcttcggcggcggcgcagtatccgcgaaccgcaacaccatcggtgttcacgctccgatggccaccgccatcgccgacgtggccgaagcccgccgcgactacatggacgagtccggcggccgttacgtccaagtgatcgccgacggcggcatgggcgactccggcagcttcatcaaggcgttcgcgcttggcgccgatgccgtgatgcttggctctccgctggcccgtgccgaggaagctccgggcaagggcatgcattggggtgccgaagcccgtcatcagacgcttccgcgcggcttccgcacgaacgtcggcaccgtcggcaccctggaagatatcatgttcggccccagccacaatgcggacggcaccaccaattacattggcgcgctccgtcgtgccatggcaaccaccggctatgtcgatctcaagagcttccagcgttgcccggtcacggtcgctccgacccgctgaacgagctttgcggtaaagcctgaataacggttcattgatcctgcagcgtcatgctgcaggatcttttttttgttatgtttccccggctaagaaagtcaggttggaatgattaagctatacatcgcaaatgaaagagcagaggtgagatgaatggcagcgcatagaagtggcgattcccgacgtttggacccgttgtccggacgattcacggattacatcgtgatcgatacggaaacaaccggattgagtgtgcgcaaaggtgccaagctcattgagatcggcgcggtcaaaatccgtaatgatgagctggttgacgaattcgaccagctcatcaacccgttcgaacacgtcccgtcaagaatcactggtttgacgggaatcgacgatggcatgctgctcggcaaaccggatgtgcgtgaagtcatggatgagtttgcacgctggtgttcggacacagccgtggtcatggcgcacaatgcgtccttcgacatgtcgttcctcgacaatgctgtacagctcgcttactcggagcgagacgcgcgctttgcgcaccatttcgtcgacactctggacctcagccgtcgactgcatccggaaaaacgaagccacaaagtttccaccctcatcgtcgactaccacatcgccgacatggaggagcaccgcgcattgtccgacgccaggcaggagtggatgctgtaccgcgccatgcgtgacgaggccgagctgctcggcatgctctgacagcctaacgtcgttcgaacacttcgatccggtattctcccacaggtgtctgttgatttgtggatggattatttgttcggcttcgtgccgcagcaggcgacatctccactggcggagaacattgcattgggtgcgaagttcagagcgaaaccgctctgttggtgggagacgttggctgaatcggatttggcgtcattcgtgatatttgccctctgtgagggctccgttccggcaacgaacgaggcgatatctcctggaacgcctgcgctacgtaactgacgcacggtgactggaaccgtgccgatgctgctttccgaggtgaacgcgaccactccggcagggaagaacgctttgaagaagtggattggattcaacttcgtcagtgttaagcagcaggaagaatacggttttcgcaccaatactctttaagcgcatggactctccaaggttcgtgatgctggagatgatgctgaacagcagcagcggaaccaccagtgcggtaattgcgttggaccagatggaacccaccgcgccgacataatcagtgtggccgttgaaagcgattcccaaaatgataccgaatgccgttgcaagcaacacgcgtgtggtgaaacccgcgtttttcttacgtttgagaaacgccaggatgacgaacaggatcgcggctacgccgagggcgatccaatcatatgcgatgtctgacattactatcattcccttcccaaaaaatggtgatacattacgtgagatacccccacgttcatgtcggacatcaatctatccgctccgtctccggcgcaacgccttgtagttattgctgttttccatagtcgtctatcagacggtagtcattccgaggcacgcatgctgacattccagcgctccacaagtcattccgagacgtggttgttttgcgtttagggagggctcgttttaagatggaacgtcggataactggcttcgtgtctggatttgtgagagccggaggaattggagattagacatggcattaagtgccgcgattattcttgcggcgggtgagggcacccgcatgcgttccaacaagccgaaagtgctgcacactttggccggaaagacgtttttgaaccgtgtgatggactccgtgtcggcgctcgaccctgaaacgttggccgtggtcgtgcactaccaggcggaacgagtcgccgaagcggcccgctcctacaatgagcgtgtcaccatcgtcaatcaggacgacattcccggcaccgggcgagccgtgcagtgcgccatgacgcagttgaaggagcaaggcggtcttgacggctcggtgctgatcgcagcttcggatatgccgctgctcgacgccgacacgttgaaccagctgcttgccttccatgagcaaagcggcaacggagccaccgtgctcaccaccattcttgacgatcctactggctatggtcgcatcatccgcgacagcaaaggcaacgtgctgcgcatcgtggaacagaaggacgccaacagcagcgaactggccgtgcatgaagtgaacacgtccgtctacgtgttcgatgccaaactgctggctgaagcgatcgccaacctcaaatccaacaacgcccaaggcgagttctacctgaccgacgcactcgaaaccgccaaagccaacggtgccgtcggtgcgttcgccgcccccgacccgttgagcgtcgaaggtgtcaacgaccgcgtgcagctcgcagcgctcgccaaagctcacaacaagcgtatctgcgagcattggatgcgtaagggcgtgaccattctcgactctgaaaccacgtggatcgaagatgacgtgcgtatcgaacgcgatgcggtgatccttcccggatgcttcctggaaggccagaccgtgatcggcgagggcgcgcaggtcggcccatacacaacacttatcagcgcggtcatcgatgccgacgcccatgtggagcgttcccgcgtgcaggaaacccacatcggtcgcgcggccaacatcggtccgtggacgtacctgcgtccgggcaacgatcttggcgaggagtccaaggccggcgcctttgtggaaatgaagaaggcgcacatcggcaacggcaccaaggtgccgcatctgagctatgtcggcgacgccgacttgggtgagcacaccaatatcggcggcggtaccatcaccgccaactatgatggcgtgcacaagcaccacaccaccatcggatcgaacgtgcacgtcggtgccggcaacctgttcgtggcccctgtcgaagtcggcagcggcgtcactaccggagccggttccgtggtacgccacgacgttccggacgattccatggtctattccgaaaacacacaacatgtagtagagggctggaagcccgaatgggagcgctgaatatgccggcagtacaagattccatcgacgccatccgcatcgccgccgccgcggccgaccgtatgaaggccaccgaccttgttgccttcgacgtcaccgaaccattggccattaccgacgcgatgctcgtcgccaccgcttcgaacgaacgtcaggtgttggcggttgccgaagagatcgaaaaggacctgtatctcaaaagcggcaagcgtcaaccgcgttcccgcgaaggcttgaccgaaggccagtgggtgctgctcgactatggtgatttcgtgatccacgtcatgcatcaggagtcccgcgacttctatcgcctcgaacgcttgtggaaggattgcccgagcatcgacctgcagctcgaacatccggagacttccgacgaagagaccgcggaaaccgcggaataacacgtatgaacatgccttcccgtatagatgcggaaggcatgttttcatatcaagcgaagcagttttcgcaaacattccataatcgagaaagcaacggagagcagcagcatgcctcgaaacgtcgaacttgagcataacagcgcagtaccggaacacgtgcacgccatcacgctggtgcgtcacggacgtaccgcctacaatgcgcagcatcgtctgcaaggccagatcgacattcccctcgacgaagtcggacaatggcaggttcgccagacggccgacgcattgcgtgaactgtatgttgatcgtcgtcccgatattccgaaccggctggtcatctgttccgatctggggcgtgccgcagccaccgcgcatgcgttcgccgacccgctgggcttggaagtgcatcccgacatccgcgtgcgtgaacgcagcttcggcgattgggaaggcattccggttgaggaactcgcgcaacggtacccggaagactatcgttcctgggctgaattccgtggcggcgaactcaaatacggtgccgaacccaaggaggaagtcggacgtcgtggcgtcgaagcgttgaacgattgggcgttccgtgccggatccgacacggacttgtacgtgttctcgcatggtgcatggatttcccaaacgttgcagacgctgctgggaatggcggatgcgcatggcgatttcgccgacattttgtcgatgcgcaacgctcactgggtgcggctcattccattggagatcggttccacattgcgttggcgtttgatggactacaatcacggtcccgctatcgccgattccgaggaatgggagcatcccagcctgtagccagcctgtagccggccgatacatgatgtcggacgctggtctgtcaccgctttttcaagcttttcacagaatcgccagtactttcatagcgaaattagctatcgtcatggcttgtgaaaaacttttttaagggaatctctttttcgtcgatttgcgcgggtgcgctggcggcggtcacgtcattcctactttccgcgaaaatcggtatcgcgggatcggtgattggtgtggccgcgggttcggttgtttccgcggttgccacgcaggtctacaagaacgttttgaaggcatcaggggagaagatccaacaggccgtgccgttcccgtcgagtagcgagacggtttcgaatgagcgagctgcggatgaaacgcaggtgtttggctcttccgaacaggatgatgagacgaggattattggatcgtctcctgttgcgtcggatgtcacgatggtattgtctgccgatacggctgcggtagcgcagtccggtttaccgcgcgtcatttcctccggacaggaatatgcggatgcgactcgtgcgctcggcgatattgccggggcaggggagacttccgttttcccgaacggacagcgtggcgtcagcgatgttggcgtagttaccggtaagaccggaacactcggaagcgcgcatgatgcccgagtacagcatgctgggcagcgttcctcgaattggttgcatagcaagtacgctccggcgatcatcgcattcgtcagtgctttggttggtgtgggagtgagcgcgggattgattcttgctttcaccggcggtcaggggacggacaccgtggtgcgtgacgtggtgcatgagaaggttgtaccttcgcatggaaataccgatgactatcagactggcgacgggcagacccccgtgcaaaagcctaagtccgattccacggattcgaacgacgaaaccaccacggacggcagcgacaaaaccaccaacggatccaccgactcgtccacttccaacggcacatcgagcaataccaatggatccacgtccggaaacagcgggtcgtcatccgataattccagcaatggttccagccagaacggaacggattcgtccaacggcactggctcaaacggaggcacgtccggcaccactggtgatggctcatcatccggatccggaaacagcggaaccgatggttcgactggcactggcacgtcgggatccaccgacggtactaccggctcgacgggagatgcaagtagtaactaatgtcgctggtggcgcacttcccatgtcgcccgcataaggttcacataaggtgattgcgtagtgcggttttactcatgccaattcctcagtgcgggcgacacgccgaaatttgcgtgacttatgtctgcgatgtatattatacagagtttgcagggcagactttggggctatggcgcagctggtagcgcatctccatggcatggagagggtcaggggttcgaatccccttagctccacgattatcgagggccactccgtaaggggtggtcctttttgttgaaacgacactgtttcgcggacgtgcttgccgaacctcaaaaacggttcaaggtgatagaaaccggttataaggcggtaaagaaacaggacttccacgacgacgcggagaaccttcggcaagatcgtatacaagccgaacagacggacgcatgaacgacctgtgtcggcaggggtgtcggcgacggacggtagagccgacatgggcttattgttaattttcattcatagatgctttgtcttgtcttatgagtgcttctaatttataattctcataaaatataaatgactttttgaaagcagtgaccgttatgagcatggaatacaggactttggcgcggctgttccacgccgacaggagcatggactcctacgccaaccacgaccggctcgtcagacaacgcctcgaagcggactccacattcacaaccggaatcggcacacccttgggcgaactgttcatcgccacgccgcgctgcgtgtgcatgctcacacagaaggtgctcctcgccgaacgccgggtatcggccatgtggcggagcatcccaggagtcatgcggtggaactatatctaccacgccatatccgaggaattgctcgccaccaacgagatggagggggtcaggtcgacgcggaaggagacggaagccgccgtggccgcagcccggcaggccaggaccgagggcgacatggagaaggccaggttcggcgagttcgcgaaactgtatctcaacctcaccaatcgcgacgttgaactgcccaagactctcgaggacatcagggacatctacgacaagatagccctcgacgagatcgacgacaagaacaggcccgacggggagctgttcaggaaaggcgatgtcgaggtccaaggaccgcacggcaccgtcatccacagcggcgtcagcagcgaggcgcggatatcagcgctgctcgcacagatgatggacctcgcccggtcggataccataccgttcctgcagcgggcgatagccagccacttcctgttcgaatacatccacccgttctacgacggcaacggcaggacaggcaggtatctgctcgcgctctacctcagcaacgatctcactctgcccaccgtgctgtccctctccaggacgatcgcggagaacaagaacgaatactacaaggcgttcactgaggccgaggacaaactcaacagcggggaactcacgttcttcgtatacaccatcctcggactcatcgaacgggcgcaggaatccctgatcgaggagctcggcgtcaaaatcgaccagctcgacaaggcgaccgtcctgcgtgacgagctacggagggaacatgcactgtccacgaacgcgaccctgcttctctacgcagtcatgcaggaggagctgttcgacaccaccaagtccatgacgctcgaagatgcaggcggcgacctcatgctgacgaaacagacgatccgcaaatacgtggatgagctggcgggcgcgagcctcatcgagttcacaggaagacgccctctcagattcagggcctccggggcgttgcgtacgcgcatacaagcaaagcgagaatgggggatggaataaaatgcctttgtgctttctctggcagatactgtctgacatatctaagccagcaaacaagaattgccacatcgcaaaaagcccaggctaaatcggaaatgtctgaatctgcataaattcttttgagggaaaaacccatcaatggaataaaggaattcacacacaatatctaaaccaagtgcggatatcggcatgctgcaggctttgtctttgaacccattgcgaatcaactcgacgtgcatatcgtccagcagataccgctgatgccaacccaaaatcaatcctttcttttccatgattgattggatagcggatgatcgtggtctgacgcctcagcaaagtgcgaaacaggtgttatctctcctaaattcggtttcagatggagcgcgtatgtgatgttattcacgttgggcgaacatgcgttgtggggtttcttgtcgtagtctgaaagtatgcccgcattccatgggcatatagacgaaaggacggcatcatggcagatctcaccgatgagatgaagggattcctcaacagcaacctcgcatgggtggccaccatcagcaaagaaggccaggtcgatctcggtccgaagatgagcatgttcatcatcgacaacaaccatatcggctaccacgagcgcaccgcgggccagacataccgtaacctgcttgacggcagtgatctggtcgtcgcggtcgccaacctcgaacagaagaagggataccgtttccgcggcaacgtcgtgctgcattccgatgacgccatctatgacgaacaggtcaaagtcgccgaagaacgcggcacgaaaaagccgatgaccattccggttttggagatcacggaaattcaggatctcactccgggcgctacggcaggcaaaaccatcgtcaaggactgatcggttccatactgaaccagtcgaaacgacaatatcggagaaccgcagacgggactgtatgtccggtctgcggttcgctgttatcggaacggaagatcgcgaatctgcagcatatcgttcgcggcggttcgaccatggattcctatacggcagttgcatgcatgggttgtggataagtgtggataagtgttcgctcatccacttatccacagattttcttaaagaggtggcgggcgaatattggtttctgccatgctggtctgcacgcataagcgaagacgcctatgcgacaaccaacaaccaaagaaggtgaaccatgacacaacacaccatacgccgccgatggacctccatgcttgcgctgggcatgatcgcggctcttgccatgccgggcacggcccaagccacgccgcaactcggcgatttaggcgtcaagcagtccatgagcgtgaaggcaagcaacggggaaagcctcgaaggcaaggacctccgcgccatccagcttgccacatataccgccgcaagcgtggacggcaacacgatcgtcggctacgatctgaccacgaacacggcattggcatccgacatcaccgcggcagccaaagcggccggagccaccgatacgaaccttaccgtcaacggcaaaaacgatccgatggtgtgggtggtgaagaacctgaccgactcgcgcagcgatccatggagcggaaagctacgcaacttctgcaacagcctcgccaaacaaaccaacttcgccaagcaggatggaacggcggtttccacactcagccaagacaaagccaccatgtcgaccggcaacgtactcgtaccgggaatctacgccatcgtggaccgtacaccggcgacaaccacactaagcagcggcaccgccatcaaaacaaccgcgtccatcatgatgatgaacggcaccgcggtcaacggcgtcaaccaactacgtacggccggcggcacgaccctgaccctcgggcaagtgatctacaaggtatccaacgtggaatcgccagacaaaaaagtcaacgtcggcagtgcctggaaagacagcgcatccgaagcgataggcaaggacctgacctaccgtgtgacgcagaaaatccccaactggacaggctacgagcactactatcttgcgttgaacgatacgcttggcgcgggtctcgactatggttcgctcacctcgatcaccgtcggcggcaaagcattggcgagcacgttctacaaggaaaacgtcaacggcaaaaccatcagctggctgttcggcgtcaacggagacattctcgcctcggacgcatcaaaggcggccctgccggtcggcgcgacgatcacagtcacctacaaggccagactcaacggcaatgcggtcatcggaagcccctgcaacgtcaactccatcgacttggaatactcccacaatcccaacgcatggcaggaccacaacaaccagcccggcaacgaggttaaagtctgcaccggtgaaatcgcattacgcaaggtcgacgccaaaagccaaaagctcaccggcgcgaaattcgccatcgcccaaggcgccagcgacaaaacgcctttgaaactcgtggccctcggcaacggcacctaccgcctcgccaccagcggcgataccaccacaaccaccacattcgaagccggcgaaaccaaaatccaaggactcaaaggcgaatacaccatcaccgaaacacaagcgccccaggactactcgtcgctcatgctgcccagcgcagtcgtcaccgtcaacgttgacgacaccaacatgacgtggagcctcgacgtcaaatccgaccccaacaacctcatcaaaaaaggcgacagccataccgtggtcgtcaccaacatccgtaccatcaccgaaataccgttgactggtgcggcaggcctcaccatgctcttcagcatcgcggcactcctcttcataggaggcatcgtcatgctgcgcatgtgccgatcaagcaacgactagccaacatccgacaataggcaacacatggcgattcccccgcatagcaaaccacggcacaaaaaagcgcccaacaaacgcagcatcatccgatggtgcgtgggaaccgccatgctcaccgcaacggcactcatcatcagcatccccctgatcatgcgcgccgaagacaacatccaacaagcagccaacgtcaaagcgtacgcagccaccatcaccaacaccgcaaacaaggcaatccaagaaagcaaacggcaggcgaaactctacaacgcgcgcctcgcaaaccaaaccagcaaccaaacagacggcgaacccgcaacgcaaaatcccgacgaatacaatcggcaactcgtcatcccacccagcgacgtcatggcaaccatcaactacccgaaactcggcatcagcctacccatacgccacggaacaagcgaacagacgctcgccatcggcgcagggcattgggaaggcacatccctgccaatcgggggagcgggaacccataccgtcatcaccgcacaccggggcctcgccgacaaactcatgttcaccaaactcgaccaagcccgagaaggtgacgaattcaccatcaccaccctcggcgaaaccctcacctatcaagtgcaaacaatccgcaccatcacccccgacgatttcacctggataaacaaacacgacgccagcgccgatcaggccacccttatgacctgcaccccatacggcatcaacacccaccggcttctcatcacaggaacgcgcgtccccaaccacgacgaatgcccgccagaaacaggatgcctcaccgacggaaccctctccaccacggcattcgcgctcacagccatctgggcgaccctcaccacactcgcacggcatagctacaatgaaatgcatgatcgacgaagtactcttcctgcgccacggacgcaccgcatacaatctcgcaagacgactgcaaggccaaatcgacattcccctcgacatcgtcggcaggtggcaggccgaccaaagcgcttatgaactcgccaaaacatactattgggcgaaagtcgcgcacatcgccgaccataatgatgaactcgcccaacccgcgtacgagggcgcgtatctcgccgatcttaacgaaatcaacgaggcaccggccgcgagccgacgcatggtcgtcgtatcatccgaccttttccgcgcccaacagaccgctcacgccatcgccgaccttctcggacttgacgtagccctcgacccacgcctgcgcgaacgcagcttcggcgaatgggaaggcatgacccgcgaggaaatcctcgaacagtacgccgacgactaccattcatggcgtgcccacgccggaggcgaaaccaagcatggcgtcgaaagccgcaggcataccggccagcgtggctcccaagccatacgaagcatcatcgccgaacatgccgatgatccgacggccaccacgctgctcgcagtcggccatggatcgtggatcgtggccaccgtcgccgtgctgctcgacatggatccggacgacctcaacaatctcggagccatgcgcaacgccttctggacgagcatgagcgtcaacacaggcggttccaacggtcctgcggatcccgacacatggcagtggaagctcgacgccttcaaccaaggtcccgccatcgccgcgcttaccgattgggagaatgggccgaaggaattgcgaggccccaacatgccattgtggaagcccatcgtgcagtgatccgcagtaaccgcaacgatctgcagtgactgtcgcctgccgcggacgcatgcgtcgaacatgaattctcgatgaaatctcaggcacgcggccggccaactctcaaggtgggactatcctaaataaggttgtttgcccgaatgttccagatcgatcgcaagagaccgatcgccggagatgttggattcgggctgccgtacagcgatagaacgtcggaaagcgcgaaaggcgggtgagagacatgttgagaatgttcagaacgattaacggccaggtggagcagatccaaaaacccgaaaacggatcttggttatgcctttcggatccgacggatgtggaactcgccaacgtttccatggaaaccggcgtcgatctcgccgacctgcgcgccccgcttgatgacgaagaacgctcccgcgtggacgtggaagacgattacacgatgatcatcgtcgacattccaaccgtcgaagagcgcggcgggcgagactggtacgagaccatcccgttgtcgatcatcatcacgcagtcggccatcatcaccgtctgcatgcaggacactccggtgttgcacccgttcatggaaggtacgatccgcggtttcaacacgtatatgaaaacgcgtttcatcctgcagatcctgtaccgcaacgccaccatgtatctgcggtatctgcgtatcatcgaccgcgaaagcgacaagctcgaactcaaactgcgccattccatgcagaatcgtgagattctcatgctgctcgaactgagcaaaacgttggtctacttcaccacgtcgctcaaatcgaacgaaatcgtgatggaaaagctgaccacgctgccgcgcatcaagcagtatccggaagacgaggatctgctcgacgacgtcatcaccgaaaacaagcaggcaatcgagatggccaacatctacagcggcgttcttgccaacatgaccgacgcgttcgcgtcgatcgtgtcgaacaatctgaacaacgtgatgcgcatcttcacgatcatctccatcacgctgtcgattccgacattgatcttctcaatgtacggcatgaacttccaggagggcatgctaggcatgccgttgacggacaagccgtggggcttcgccgtgatcatcggaatctcgctggtcgtttcggccattgtcacctggttcctgacgcgttcgcgcatgttcaagtagaatcgcgtagaatcgcgcgtatgctacgtctgtcacgtctgtcacgaaatatcgcggcgctggtatgcgccgcttcgaccgtattgggcacgagcgcgtgcggcacttccatttccgtagtgaccaatggtctcgcgcaggggccgaccattgcgattggcgtggccgcggaccagcctggtttgggttttctgcatgggggagagtattcgggtttcgatatttccgtggcgcaatatgtggcgaacacgctgggattcgcgaaaaaacagatcgtgttcaaacaggtgctgccgtcgacgcgcgtttcgtcacttgaagacggcaccgtggacatggtggtcgatgctttcgccgctgatgacgttcaggatggtgaggttgagcttgcaggaccgtatctgactgtgcatgcggcattgttggtacgttccgacagtgcgggaaccatcaccggaaccgatgatcttgccggaaggacggtatgcgtggccaaaggaggaataccctcctacagcgtgcgaaatcttgcggaagatgtgaccgtgagcgaacgcgacacgtatccgcaatgcgaaacggcattgatgatcgggcaggcggacgccatcgcggcagatgacgccatagcggcgggcctcgcatccaacaggggaggcggatatctcaaggtcgtaggcgaaacgttcggcgaacgttcgtacgcgatcgcggtcaaatccggccaatccacgctggccaaacagatcgacgccgcattgcagtccatgatggacgacggctcgtggaagcaggccatagacaagatgaaacagtcgatcggctacgttcccgacatgtcgctcaaccctcccgcgataacgctctcggcagcgtcggaaggctgacggcccccgccttgcgtgacgctttgcaaaacgcttcttgcataatgattgacgccttgcgaagtgtccagttgcgcggctagtttcatgcattatgagtgacattgagaaaagcgcgcagacgcagtcgaacgaaccagccgaaccgtcgttccgttacaacgcggatttggctcagggcattgaggaaaaatggcagaagatttgggatgacgaaggcaccttctgggccgccaacgtcaatggcgatctgaaggacggcaagggtcgcaacgctgaaggacgcccgtcgtacttcgccatggatatgttcccgtacccgtcgggcaagggcctgcatgtgggccatccgctcggctacctcgccaccgatgtggtcagccgctaccaccgcatgaagggcgagaacgtgttgcacgccatgggctacgacgccttcggtctgccggctgagcaatatgcagtccagaccggccagcatccgcgcatcaccaccgagcagaacatcgccaacatgcgccgccagctgcatcgtatgggcctgagcttcgacaaccgccgctccttcgccaccattgacccgggctatgtgcgttggacccagtggatcttctcccgcatctacgattcctggtacgacgaggatgccaccaacccgtctggctccaagggctgcgcacgcccgatcagcacgctggtggagcagttcgaatccggcgagcgtgagattccgggattcgcaggcaagcagtggaatgatctgaccgaagccgagcaggccgacgtgctcaacgacttccgcctggcatacatctccaagtctccggtgaactggtgcccgggcctgggcacggtgctcgccaacgaggaggtcaccgccgaaggcaagtccgaacgcggtaacttcccggtgttccagcgtgagctgcgccagtggtccatgcgcatcaccgcatacggccaccgtctgatcgaagatcttgacggcatcgactggccggaaaaggtcaagctcatgcagcgcaactggatcggcgaatcccacggcgcttccgtgcatttcgacgtcgaaaccccgaacggcgtcaaggacatggagatctacaccacccgtcccgataccctgttcggcaccacgttcgccgtggtctccccggagcatcatctgctcgaggatgttcccgccgaatggccgtccgagactccggaagactggaagggcggctacgccactccggtcgaggctgtgaaggcctaccgtatggccgcggaatccaagaccgccaaggaccgtgtggacgaggcgggcgagaagaccggcctgttcaccggcctgtacgccatcaacccgatcaccggagccaagctgccgctgttcaccgcagactatgtgcttatggattacggcaccggcgccatcatggccgtgccgggtggcgaccagcgtgattacgatttcgcggtcaagttcggtctgccggtcacctacaccgtgcagccgctgccggaatccggcgacgatctggccaactatgagggcaaggctccgttcgtctcccacgacggcatcgtcatcaactccgctgtggacgccacccgtgccaagggcgacgcgttgagcctcaatggactgcgcgtggacgaagccatcgacaaggtgaacgcatggctggaagaggctggtgtcggcaagggcacggtcagctaccgtctgcgcgactggctgttcagccgccagcgttactggggcgagccgttcccgatcgtctacggcgaagatggcaccccgcatctgttgccggacgaccagctgccgatcaacctgccggacgtgccggactacagcccgaagactttcgatccggaagacgccgaatccaatcctgaagcgccgctgagccgcaacgaggattgggtgaaggtcgaactcgacttgggcgacggcaagaagacctactaccgcgacaccaacaccatgccgaactgggccggatcctgctggtactacatgcgctacctcgacccgaccgacaccgaacacatggtggagaagagcgagttcgactactggatgggcccgaaccacaacgagaccactggcaagtccggcggcgtggacctgtatatcggtggcgtggagcacgccgtgctgcacttgctgtactcccgcttctggcacaaggtgctcttcgacctcggcttcgtggattccgcggaaccgttccacaagctgttcaaccagggcatgatccaggcatacgcctacaccgacgaccgtggccagtacgtgccggccgccgaagtggtggaaggcccggccgacgccaacggagagccgaccttcacctggaacggagagcacgccaaccgcgagtttggcaagatgggcaagagcctgaagaacatcatcacgccggacgacatgtatgcgaactacggcgcggacaccttccgcctgtatgagatgggcatgggcccgctggccgaatcccgtccgtggaacacgcgcaacgtggtcggatccatgcgcttcctgcagcgcctgtggcgcaacgtcgtcgacgagaacaccggcgaagtgcgcgtcaccgatggtaagctcgacacgaagacgctgaagctgctgaacaacacgatcgccgacgtgaccgtggaaatggaagcgatgcgtcctaacacggccatcgccaagctcatcgtgctcaacaaccatctgaccagcctcaacgaagtgccgcgcgcggccgtcgaaccgttgattctgatgctttccccgatcgctccgcacatctgcgaggaactgtggaacaagctcggacacggcgaatcgttggcccacgccgaatggccgaaggccgacgaacgctatgtcggccaggacgccgtcaccgcggtcgtgcagatcaagggcaaggtgcgcgccaagctcgaggtctcgcccgacatcgatcctaaggaacttgagaagatggcgttggaagccgtcgccgatcgtctgggcggcaaggaaccgcgcaaggtcatcgtcaaggctccgaagatcgtgtccatcgttcctgcggaatgatatttcgaaaaacggatccaacggcttctggcgagacctttgacgaggcttccaacagggtgggaaccgtttccgcataaggcgacacgccgaacatgtggataactcccatccttcgaccacaggggccgtttcgactggacaacatgcccatgcatcctccactttggatgcatgggcattatcgttaccccgccgggcaggcgcaacaggcaagccgaaaccgcatcgcagtccgcgcaacggctgcgcggacttggcatgcccgaaacacgtggaaagaacgcgcgcgggcagaacgttcgcaacgaacatgctgttcccgcgatatccgaaacaacctcaatatccgagatttccgcagcggctgaaacgtccactgcaatcgcgacaactgaacaatcgcctgaacccgcaaaacccacattgcgggatctggccggcgtcaagccttccgacaaaccgactgaacaggaccggcccaaacgcgaccgtccacgactcgtcttccaaccaatccacgcggtcatcgccatactcaccctgtcgtgcgcgctctgcgcaagcctgaccatgctcatccaacaggccgtccactacagtgcgctccaacaatcgcagatcacccaatccgaacaatcgaaggcgaacggaaccgagaaagacaagacggcgtccacgcaaacaacaccaagccagcagccatccacggaacccgacagccagagcgaaccaacatccggaccagcggagcccgccgatccggctgacggtctgctgaacatcaacaccgcaggatccgacgaactgcagaccttgaaaggcgtcggccccgtgaccgcgcaacgcatcatcgactatcgcaatcagatcggccgtttcgacaatgtcgaccaactgttggaagtcaaaggcatcggcgagaaaacgctggcgaaattccgagaccaagtgtgcgcacgatgagaggaaacacgttcgaatggcgggatggggagcaggggagcagggattggcgtctgctgccggccgccctatgcgggtgggcggcgagcttggccacgcatatgggattcgactattgcgtcgaacgggatggtcggttcggcatgctgccgctcgttgtggcattggcggtaccgttgctggcattattgggattattgggattgccgttcctgcgatcgcctatgctgcgagtgccggttggcgtgcggcgggcggtctcggcatggcatttcagcattatcgtatgcgtggtcgcggcgatggcatgcgcgtcttccgcgttgacctacgacgtattgcaatggagggatgcggcctcgtacgcggccagaaacggcgaaagcgacgttgtcacgctggtacgtacgacatctcccgcagtgaattcgaacagacgtgcaaacgattgccagattgatgcgacgatctcaacgatcacggcaagccaggtcacgcagccaagcatgatgcgggtgcgcgtctatgcggaccggccggactgcggcacgctcaaacaaggcggcgaataccggatgcggggcacgctcgccatatcgcaatacggtgccatgccgctatggctgacggacatcgcctccgtggaacgcatacggggaccgaacctcgcattgcgcacgatcggcatgatgcagcaggcgttcttcgaacagacgtcacggctttccgaccaagggaaagtgctcgttcccggcctgaccttaggtattcttgggcaggattacgttcctccagatagtggcaatggccagacgggcacgggtattgattccacatacgccaatctgcttgaaaacgccttccaacgttcgggcatactgcatctgatggcggtcagcggcgggcatcttgcggtcgtcgccaccctggtgcgcgccgtctgctcgttcctgctgctgcccaaacgcgtcacggccatcgccatcggcgcgtcgtacatcatgctggcgatgtgcgtgttcccatccgattcggtgtcgcgcgccctgctcatgggtttggcgggagcgggcttcctgttcctcggccgaagaacgcaagccctgtcaaccctcagctggaccacgttgggcatgctcatggtcaatccgcacatgtcacgcagtttcggattcgcattgtcatgcgccgccgtacttggcatcgtactgttcgcaggaccgttaggcgcatggctcacaccgatcatgccggcattcatcgcgcaaaccatggccatgaccatcgccgcgcaactcttcaccctgccgatccaagtgcttatcgaaccagaactgccggtctactccattccagccaatctggtcgtcgcacccttcgtgggattctccacacttgccggactcgccagtctcgccatctcatggatactgccaagcctcgggttcatattcgccagcctcgcctcatggggcaccgccatcatggaattcatggccctcaacctcggatcaggagaccacgccaccattccatggaccggagacgcaggcggcgcgctactgatcatcctcgtcgaaatcatcggatacacgaccgcacgattcgccggaacactcttcgcccgcatcaccacaacggaaccaaacctgccgggccgacgcctcatacacaatccgatcgaacgggcgaaagcatggggcgaacgaacctacaacgcgctcaaaaccatgaaatggaacgaatgaatcttgtccaccgatacagcgagattgaatactatgccgaaaccatccgcaacaacgcccttccacctcatctacggaggcgacccgtacctcaacgagcagaccgtacgcgacctgcgccaccaagcgcaacgcaaacaccccgacgcggaaaccatcgaactcgacgcaaccaacgccgatcattacgccttcgacgaagcggtaagcccatcactgctctccgaacgatcaatcgtcatcgtatccaacctgcaaaacgccgacgacaaactcggcgaaaccatggtcgcctactgcaagcaagccgtcaacaatccagccgaagccagcatcgtcatctgccaacacgaaggcggcatcaaaggcaaacgactcatcgaccaactcaccaaagccggagccgtcaaagaaaccgtagccgacctcaaaaaagccgaagcgaaactcaacttcaccatacaatgcttcgaacgacgcaaccgacgcatcgaacccatggccgcacaacaactcgtggccgtactcggcgacaaaaccggcgaactcgcagccatggcaggacaactctgcttcgacttcgacgacaatcccataacattggaacgcgtcaaccaatacctcacagcaaatccccaagtagacggcttccgtgtcgccgacctcgcactctccggacgtgccgccgacgccatcatcgccatgcgcgcctcaatagaacaaggcaccgcgccaatcgcactcatcggagcgctcgccatgaaactacgcaccatggccaaagcctcagccgtacgctccggcaccatcagcgaagcggaagcgaaaaccaattcatgggtgctgaaaaacgccaccagacagctctccggatggacctccgacggcatgagacgatgcatccaaatgctcgcatgggccgacgaacaaagcaaaactaacggatcggaccctgtctacgcgctagaacgatccatcgaactgatcagcagcaaaggacgaaccaactaacatgagcgaggcaaccattactgacgccaacgaaaacaccagcgaaggcactgccaaaaccgtcaccgtcgaagcgacaaccggcgaagccatgcgcgaactcggcaaacaagtcgcacacctcacccacggcggagacgtcatactcctctcagggccactcggcgcaggaaaaaccaccttcgcacaaggcttcggcgcaggactcaacatcagcgaacccatcgtctcgccaaccttcaccatcgcacgcgaactcaaaggccaattccccagcggtaactccgcccacctcatacacgtcgacgcctaccgactcggcggcaacgcctacgccccaggccaaaatgccatcgaacgactactcgatgaactcgaatccctcggactcgacgaagaactcgaagaccccagcgacaacaccatcatcctcatggaatggggagaacagatggcagccgcgctcgcaccggaacgcctcgaaatccacatcgaccggccactcaacaccgttagcacagacgaaacaagcagagccgacaacgaactcaccagcaacggcacccgcaccgtaaccttcattcccgtcggcgcatcctggcaaaccttcgacatcacacgcaacaaccgctaaaacaccagcagcaagcacgattccagcatcggttgtacagtagttcccagcttggtataaggagtttccacaaaatgcagacactggtgatcgacacctcatacggctcaaccgtcggcatggtcggacacgaccccatcgtcgaaaccgactcacgcacccacgtcgaaaaactacaggtgaacatcgccacaaccgtggaacaagccggcctcaaaccggaaaacatcgaccgcatcatcgtaggcatcggacctgcacccttcaccggactacgcgcaggaatcgttgcagccaaagcgctcgccttcgccaccggtgcacagcttatcgggcagaatgtgctttccccgcaggtgcttgtgcgcaacgcggagcatgacggccgccatcatctgacgctcgccgtgaacgatgcgcgacgcaagcagctgtatttcacattgttggatggcagcggctatgaggccggtggcagcgcaggcgaagaccatgacgcaaacgttgaaaacggctgtgtggaaaccctgatcgacatggatatcgactatcccgaatcgattgcgaaccgtgtcaacgaggtgctggaacggcttcgccaggccgatccgaacgtggaatatgtggtcgacgtcgtcggccatggagcggcgaaatacgcgcaatcgtgggcaagccttcccgaaggcggcgaagtgcgcgatcaggcgctgctcgacgagggcgcgtccggattggaacgattcgcggccttcgccacttcgcaacagtctttggtgaatccggagccggtcgaaccgttgtatttgcgcaggccggacgtgtcggtgccgaacccgttgaagcatgtactcaaccatgccggcgcggaacgcacggagtgacgatacggcatgatcgttgaccatacaagcatcgatgaacagatcgcagtgccgcagatggccgctttggaagcggacctgttcggcaggggagcgtggagcgaacagtcgattcgccaggaattccaagcgccagcacgcacgtatctgttcgatattgatgatgacggcaagaccgcggattgcgggattgcgggttgcgttgccgtggatgagccggttgctggatcggttgcaggcgattctgctagacaacagcccgttgtgcgcggctatgccggtttctggtatgacggcgacgatgcggaaatcatgacgatcggcgtcggcagacggttccaacggcagggaatcgcggcttcgttgatggaggcgttgattgcgcgggcacgtgagcagggggccaaacgcatgttgcttgaagtgcgagtcgacaatactccggccttggcattgtacgaacggttcggttttgccaaaatgggattgcgcaaacgctactaccagcccgaaggcatcgacgcgtacaccatgagccttgaccttgagccgaggatcgtcggcttcgcagcagcggaacaataaacagaacaaccaaacggaacagcaagcaaagcagcgaacggagcagcaatgagcggaccaatcgtactcggcatcgaatccacctgcgacgagaccgcggcctcggtagtgcaggggcgcaccctgatttccaacgtcgtcgcatcctccatggatgagcacgcgcgttacgggggtgtgattccagaaattgcgtcacgcgcccacgccgaagcgttcgtgccatgcgtttccaaggcgttggccgatgcgaacatgacgttgtctgacgtcgacgcgatcgccgtgtccgcaggtcctggacttgctggctgcctcgccgttggcgtgtccggcgcgaaatcgcttgcctgggcggcgaataagccgatttacggcatcaaccatgtgatcgggcatattgcggtcacacagttgcagttcggcccgttccccgaagacacgctcgccttgatcgtgtccggcggacacacgtccttgctgcatgttgaggatgtcgcacgtcatatcgacgtggtcggcaccacgcttgatgatgcggccggcgaatgcttcgacaaggtcgctcgcctgctcggtttcccctatccgggcggaccgcatatcgatcgtcatgcgcagttgggcgacccgcatgccatcaaagtgccgcagggactcacccaaggcaaagcgggccagcagcatccgtacgatttcagcttttccggcgtgaaaacggccgtcgcgcgttggatcgaggaacagcaggcgcaaggcaatgagattcccgtcgatgacgtgtgcgcgtcgctggcggattccgtggcgaccgtactcgccaagaaggcgatgcgcggctgcgagcagtacgattcgaagacgttgattgtaggaggtggcttctccgcgaattcgcagcttcgtgccaaactgttggaagtcggggccgagcatggggtagaggtgcgtgtaccgcagctcaaactgtgcaccgacaacggtgccatggtggccatgctgggcgtcaacctggtcgaagcgggagtggctccgtcaaacccggatttcgccatcgattcggccatgccgttgacgaagatttccatgtaagattaggccgaaagcatcgtatggaaacgttttgcaagtcgaaacacacatgtgacacgctgaagatttgaaatccacaagttttgatgtaatatctttgtcttgtgcacagcgcattcctgcgtagctcagttggcagagcatccgactgttaatcggacggtcactggttcaagcccagtcgcaggagccatttgaaagcccttggaaatcaagggcttttgtcatattcgaggaatcaacgaagatgcccatacagcatccccgactcagaggtgcaggaaaaatgagctacatccacatcactgaagagaacatcgacaaggaacatatctgctgtgccatgtccggcaagcaaagccttgcgaaaaaagagtggctcaagcagcgtttcaacgaaggtctcgtcttctatcgtagcgaggaacgaggcaaatgcttcatcgaatatattccggcggaaaacgcatgggtgccgatcgatgcggacgggtggatctatatcaactgtctatgggtggccggttctttgaaaggtcatggacattccggtaatctgctgagcgaatgcatccgagacgccaaagagcaggggcgcaaaggcatttgcattctctcagccgagggtcgcaaacgagagttccttgccgatccgaagtttctgtcctacaagggtttcgaagtgaccgacatatctgattgcggcatcaatctcatggccctgccttttgaagagaatgcggagctgccgaaattcaaggaatgcgccaagcatcccgcggtggacgaagacgggttcgtgctctactacaccgatcaatgcccgtttacatgctattgggttccgcgggtgcggcaaacggcggaagagcacaatattccattcaaaacgattcatatcaccgataaagagaccgcccaacgtacgcccgcgccggtcaccacgtatgcgttgtttagggacggcaaattcctcacccaaggcatccagtccgacaaaaagtttctggcattggccggcttgtaacgtcctgaatcttccacccactgggggaaccttcccgccaagaaggcagttggcgtacggattgttccagcgggtgggtgttttggggactcgggaggcgggctattctctaacacgcatgcaggagacctcgaatttgcgcgtttgacggagactctgctatcggttgcgaggatccagcggatcacggtcgtcgtagaatgcgtagatatccagactaggttcttccacgggcaaaacttaagattttcccagcaaacggcgtttaccatgaacacgcaagcaagaaaaacacggcaaatcatggaagggagtccatatgtgcactggtgttcgtttctccgacgatgagggaaacacatatttcggccgtaatctcgactggagcttctcctacggcgagaccattctggtcactccgcgaggctaccggtatgactatgcgtatggggccaaaggcaagagcgagccgaatgcggtgatcggcgtgggcgtggttatggccgatcgccccatgtatttcgattgcgccaacgagcatggcttggccatcgccggattgaacttccccggatacgcctccttcgcgcacgaaccggtcgagggaaccgaaaacgtcgccactttcgaattcccgctgtgggtggcacgcaatttcgacagtgtcgacgaagtcgaagaggcgttgaaggacgtgacgctcgtttcgcaggtcgtgcccggccagcaggagtccttgctgcactggttcattggcgatggcacccgtagcatcgtcatcgagcagatggctgatggcatgcatgttcatcatgacgatgtggatgtgctcaccaatcaaccgaccttcgacttccatatggaaaacctgcgcaactacatgtgcgtgagcaacgaaatggcggagccgaccacttggggcaaggcggaactgagcgcatggggcgccggcgtgagcatgcacggcattcccggtgacgtgagttcgccgtcgcgtttcgtacgtgtcgcctacaccaacacgcactatccacagcagaacaacgagtccgccaatgtgtctcgtctgttccacacgctggcctccgtacagatggttgaaggcatgtccaagatgggcaacggccagttcgagcgcacgctgttcaccagcggttattccggaaagactaacacgtattacatgaacacgtatgaggatccggcgatccgctcgtttgccatgtccgacttcgacatggattcgagcgagctgatcaccgccgattgattccggaatttcgagttcgaagattccgcagtaatcgcactatgtgcgatggcataaaaggacgcaacgtcgcagtcggcgttgcgtccttttaatcagtaaaactgatgagatttgattaaaaaattaaaatggtcgaggcatgcttccaaacgtactttcaggcgttttcttcgttatgttccttatgcgaggaagcgaatcgcgacagaacacctgacttacgtaaagcgcaatacattccccaggaaccgaaaccggcgaatgccaccgcgctaagcagctcgcaaatagtgccgatgatgcctcgcgggctgaagaacgtgaatgcctgatagtagaagaacagcaggtagaagttgtagacgattccaatcgccaaagcagacagaatggtgacgccgagcgtccaacgacggtagcggaacagtgcgaataccgcttctgcggctgccgcctgcagcaatgcgattaccaccaggctcacactgtatttcgtgccgagtaccacctcgacgaacgatgcgaccaaaagcacgtaggccgaagctcccggcttgcgcacgatcagagagcccagcgtggcggggaagtagaacaaagcatgaagtagcgccgctgaaccaggaagaatcaaagtcatcaacggaaaaagaccatacgacaggccgtcgaacacccaaaacatcactcccgacatcacgccgaccgccgcgccgaccgcgatatcgaccacacgccatgtgagggccttgtgtattccttggtttgttttcaaaggctgccttacctgcttcgacagcttcgcgtctgtattatgaataacggttttagagaatggcttcgccataatgataatgaatccttgcgttggtcgatgccgtgcaccgtgagtcggagatcgcggcagtcgccgtgggccgttcctcgacctgcgcggctcgggcaggaacgacgaaaggtattatacgacgtgttgtttgccgaatacgcatcatggatttccctgtatccaaaatatcgttacaaatattccaaatccgggcgtacggtccagtccagtacatctaatccgcacgatttcgttcaactcagcagcataagagctttttgttgtgaggtggcattcgtccaaaacagcgtggtctgatgttccttacgatgaacacgtaagttacgctttgcagacgcaacttagctaattgtcaggattacatgttcttttgctatgagatagcatgcaacacgccaattagacttcaagcactttaagtttttacagtgcagggtatgagcacttcaacatggcatacgattcgtgaagcatccatgatttccggacttcccgaatccactttgcgctactacgagcaaatcggtatcattgccccgatcgcacgtgacccaagttctggccatcgcgcctacaccgacgaagacattcaatcgttggtcactatttcctgcttgtctgcgactggcatgccgcttgacgccatgcgcgagtatctgaaaaaccgtttcgacggaaccgaaggtgcgcgcaggcaaatggcgctactggacgcgcaggcgttgcgtttggccgcaaaagccgaaagcatccgcatgcagcaagcctatgtttcccttaaaacattgtattggcgtgccgtggcggaaggccatgacgacgaagcgcaacgacttctggaggaaaaccacgatgtcatcgaaacagtgaaaaaacagattcgtagcaaggctgacgcataagtcgaggcgtcatcgcagacgttaccttaattcaattcgtataacaaaggagcaactcatgaaggcagcgatcttcaagggagtcaagcagatggcatgcgaagagcatgccgaaccgaccatcatcgatgggggagatgccatcatccgcgtggtacgcgcatgcgtgtgcggatccgacctgtggttctaccgcgacggcagcaaggaacccaacactcaggccggacatgaggccatcggcgtggtcgagcagatcggcgacgacgtgaccgtggctaagccgggcgatttcgtgatcgtaccgttcccgttcagctgcggcaagtgcccggtatgcaaggccggtttcgaatccagctgcccccacggcggatatttcggagacgagggattgggctgccaggcggaatacctgcgcgttcccgaggccgatggcacgctggtggtcgttccgggcgacgcgaagagcttctccgacgaaatgctcgcatcgctgctcaccctctctgacgtgatgtcgaccggttaccatgcggctgcttccgccgaaatcaagccgggagacaccgcagtcgtgttcggcgacggtgcggtcggcctgtgcggagtgctgtccgccaagctgatgggcgccacccgcatcatttccatgagccgccatgccgaccgccaacgtatcgcacgcgaattcggtgccaccgatttcgtggaggaacgtggcgacgaggctgtagccaaggtactggaaatgactgatggttacggtgccgacgccgtgcttgaatgcgtagggtccgcattgtcgaacgacactgccatgaaggttgcgcgtgcgggcgctgtagtcgggcgcgttggcttgccgcacggcgtggaagccgatattccaggactgttctaccgcaacgttggtctgcgcggcggtccggcaccggtgcgcacgtacgatctgcagcgactgctcaaggaagtgctcgacggcaacatcaatcccggcatcgtctacacctccgaatacacgctcgacgatattcaggaagcgtacgcggccatggacgagcgccgcaccgtaaagtcgctgctgcgcatcagtgaggtctgagcaatataccgacgatagaataagcgcaaatcaaacgaaaggaagcaaatcttgtttgaagagctgcacaaacggatgaattcgttctggaacaatgacaggacattgtcgcaaaccgatccggaattcattgaattcttctcgaatttcgcttatgacgaagtggtgaacgaaccgggagcgaaccatcctgatttggatgacaaaacccgctctttggccattcttgccgtgctggtcggatgccaaggcttggatgctttcgaaatgatgctgccggtggcctacgaaaccggactgtcgtccatcgccatcaaggaaatggtgtatcaggcgaccgcatactgtggtttcggcaaagccctgccgttcctgaagagactcaacaactttctcggcgcggccaacgtgcatcttccgcttgaaccgcaaggcaccaccacgccggaaacgcgtgccagggcgggcgaagacaagcagatcgaaatcttcggtgaaggaatgcgtggattcacgcaatccggccccgaagatacgcgacacatcaacaagtggcttgcctgcaactgcttcggcgactactacacgcgcggtggcttgagcacgcgtgagcgtgaaatgatcacgttgtgcttccttgccgcgcagggcggttgcgagccgcagctgacgtctcatgcgaaggccaatatgggcgtaggcaatgagaaggcatttctgattgccgttatttcgcagtgcatgccgtatatcgggtatccgcgtacgctgaatgcgattcgttgcatcaacgatgcagcggagcagatgcaaggctgattgcggtaggatttcgttcgcttcagtacgaaaggggctgtttgccagtcacgattggattggcaaacagccccttatatgttttttacaagcgcgctacgcgtgtgcgatcatcactcgccccatacgtccttggcgacggactgcacgagcgcgatcttggcccactgctgctcttcggtaagcttgttgccttcctcggtggacgcgaaaccgcactgggtggacaggcacaagcggtcaagcggcacatactgggccgcttcggcaatgcgagccttgatcacttccggatcctcaagttccggcttcttggaagtgatcagaccgagcacaaccttcttatctccggaaaccttggcgagcggctcgaagtcgccggaacgatcatcgtcgaactccaggtagtaggcggcgacgttttccttgccgaaaagcacgtcggccacagtggcgtatccgccggcggaagcccacgtggagtggtaattgccacggcagtcgtgcgtggtgatcaccagatcctctggcagatcctcgatggcggcgttgttcatggcggcatactgttcctgcatggcggcgaactcatcggcggtgtaatgctggttgaagttcggatcacagaacatgccccacgtgcagtcatccagctgaacattgcggcagccggcctcatacaatgccatgatcagaccatggaaggccttggcgttgtcgtcggcaagctcgtcgtaatccttctgggtgtcgccgtagaactcgtgcacggaagcgatgttctccgggcggaacagttccgcatacagctgtgccggagccggaatggtctggcgtgcaatggcggtgtcgtcttcgaactgcttgatgaacttgaaatgctcaacgaacgggtgggccgggtcgaaggcgatcttgctggtcaggcgtgcggattcggcgcgggtctcctcatcgtggaagaaatagcccttgtccatcgacaccttttccacgccggcgaagccccacatgcagtcgagatgccaccagccacggcggaattcaccgtcggtgatgacgtgcagaccggcggccttctgcttggcgaccagttcggtaatggcattatcttccacggccttgagtgcggcctcgtcaatcttgcctgctgcgaaatcggcgcgagcctgcttgagttctgccggacgcaggtatgagccgaccacgtcggcgcggaacggcgcgttctgggaatacgtcattggatgctccttgttgtgctgtcagtgaaaatacctagggaagactagtcaatccttcagaaaaatgcacgattacgtcgggaatatgagacgggcgcattatagtgttttgcgattgaacgacatatgattcggtggggggttgatatgagtgatgggaccgggcggcaggcaatggcagcgcaaagtggtacgtcggataatccgaaatcctccaatcaggaatcatcgaaaaagccgaaaacgctcggcaaatatctgttggtgtcggcaacgcaaaccattgtggaattcggatcgttcaccttgctgcatgtgctttccgtaccatccgccatcgcgaacggcgtggccatcgtgctgtcggcttcgtacaacttcctgatgaaccgcaatgtcacgttcaaatcgtccagcaatttcggccgtagcgtggctttgttcatgctgctgtgggtttggaattacctgttcggttcgatcatgctggcatggctgtcttccgcattcggatggaatgcggtgttggtgaagttcctgactatggcatgtcagttcgcgtggggctatccgctgtgcaaggaagtgatttttcgctgaacctgcaagcgtgtcaatccgggtggcaccctatgacagcaccctatgtatgattgaatatgtcttgtattaactccagaaagaaatggaaaggcaatgaacgaatcgcaagattccaacgacagtagtacgagcaatccgaacgatattcgccaacaggaggcagaacatcaaggagcggccgtaaaagcggcgctcggagccaacattggtgtggccatcgccaagctcgctgcggcgttctttaccggatcgtccgcgatgctttccgaatcggtgcattccatcgccgactgttccaacgaaatcgtgctcatggcaggcggtcgcttctccaagcataagacggacggcgatcatccgttcggtctgtaccgcgccaaatatctcgcttcgttcgtagtggcgacgctgctgtttttcgtcggtggtttcttctccacttcggaggcggtgaagaaattgttcgccattgccgaagaccccgcactgcgtgacgtcaaccagatggaactgctggtggcgtttatcgtggtgtttatcagcgcttgtttggaaggctacggcctgcatcaaagcatcaaggaagcgaacgagcgtatggagcgcacgggtgtggcccatatgggtgtgttccgtttttggaggcgtaccaagtcggcggagcttgcgtccgtcattatggaagacacgcttgctttgatcggcttggcattcgcaggggctggcatcggtcttgcgattctgtttgataatgagatatttgatgcattcggcggtttgatggttggtcttgtattgattgcgggatcgttgctgctcatgttcaaatccggttcgctgttgattggtgaggccgtcgattcggatacgcgcaagaagattgagcaggctgttatttcaacgcctggtgtggaacgactgctgaatatgcagaccgtgcatatgtccgaggatgacattctgctgtgcgtcaaggtgcagaccagcaagctcgaccgcgattacgatgttgaaaccgtgaacaaaatcgaacgaagcgtgcgtaccgcgctgccgtggttccgtttcgaaatctacgtagagcccgacctctaccgcgccgaccacaaaatcgtctcgtagtggtgtgcggtgtacctatggttatgagacgtagagtatgaggcgacgatacggttttcaggaggagctggcattccgatgagttcggagtgccagctcctccttttcatgtgctttcttgttatgcgtctccttgagcccatacatatgcatcctttccaacatccgagctttagcctcatcaacctcggcgcgagtaatgccgctatccagtatgaactgctcaatgctatagctcattacatttcctttcgtatgattcctctaatctaatggattacccccatatctaatagatcgtaaaacccgttttcttgaagcaaaggcgtctaggtggaggtatgtctcagatgcgattggtttgtttatctcgagatgcgagacacacttacccccccctaaagtggtagggtgggtggtgcattcggggacgcatgcgcccctgtcataacgctccgggagacaggatggagaaaatggagaatatggagaatccgaagaaactggccgttgcgaccatcgcaggcttgaccgaggtggccggtatggccgcgcccgccatggcagatgagacggccgccgatccgatggtgggccagacccagtcggccgatccgacgaaggatgcgctcgacaaggccaacacggccgtatccgaatcccagaccgcttatgataatgcccagcagaatgtgcaggacggtcaatccaaggtggatgatgcgtatgcttccgacccggccacgaatgcggcgcagtccgaactggatgccgcccagtcggctaagaaggatgccgaccagtcggcggctgacgcgcaggccgatgtggatgccgcccaggctgctctggctgaagtgaacgccacgctgaagacagccgaaaccgcattggccacggcgaagtccgacgcggaatccgcgcaggacgcgtacgacaaggcccacaaggttgtcaccccgtcgaaggatacgaccatcacggttgatactccggacagtgcgaacagtgcgaacagggcggccgtgaagacctccacgcaggccaagcttggcgacacgggcgtggacgtgatggagaccgccgtgtttaccattatggccgccggtaccgccggagccacgctcatgctgaagcgtcgtggtgacggccgttacggtcttatggcacgccacgccaagtaggtttttgccataaaatcctagaaaatgatgtgcggatgggaacgaacgattcccatccgctttttcctaaaacgtatgtgacataactcatcgaaagcacaagtatgcagggaaaactatctgaagtttccaacccgaatataagcgatgccgggtcaaagaatgtaactgaaaacaagaagaagagcagaaagcctgctgtgatcgccgtggcttcggtcgcggccgtggctgtgctggctggtggcggctggttcgtttggaagacctacgcgaaccatgagctggccgaggcgagacaggcgtgtgtggaagcgtcggaaagctaccgcaaggcggcggactcgtattccgggctggtggatggcgacgcggccacagcctcccagatcaccgtgaagcaggtggcggatgcgaagaccgtggatgcgttggccgaagcgttgaaggcgaacgagcctgacgtggtcgcctgcgtggccgattcgaaggcggattacgagtcgaagaacagcctgattgaaaagaacaccggctggtacgggaaacacgagaagagcttggaagaagcggtgaaggccgtgaacgattcgaaactggagaagaccgtttccgatgcggaacggttgttgaaggattcggacggcaaggtcgccgatgcggcgacgcgcgacgaactgtccaaggcagtcaaggccagggatgcggacaagatcgcggccgcgtcgaagaaggtcaacgactcggtgacggcgaagacgaaggcggacgaggaggcgcagcgcaaggccgaggaggaggccgccgcgcaggccgccgcacaggcccagacgcagcagtcgtattcggcgccgcaacagtcgtacacgccctcgtattcaggcggcacgtcgggttcgaccagcggtggttccagcagcagcgcgcccgacttcgttccaagcagcggagggtacggcgtagagccggatggcagctggcatccagggaacattattcagcactgattcagacgactcttcttctcaagggacccttcggggtccctttttcgtatccgcagccttccgggaaaatgtccaacccgacacgcccgaaaccggattgcatagcaggtggatgacggaaacgaatccgatatcgacgtttgtcgacggctgggcatgtgaagtgttcggacgggatttgttctcctgtccgaccccaccgggagtggggtgaacatctgcagatggatctctgaagggagacggaacattgggttccaagaacagtaacggaaggcgaaagacgctggccctgctcgccgccacggcgacgttggccggaggcctgaccgccggcaccgcctgggcgggcggcggcggagaccagggaggcaccggcggaggcggctcggccgcgcagttctgggactacaaggacgacgcgacgggctcgtggggttccgcgacggacctgaacagcgtgagccgcgccatggccgcgcggggcgtgcgcatggacgattcggccggcaaggccgccaaggcgttgagcgacgcgaacgcggaatgcgtggccggcttccgccagaggcatccgggcgagggcgacggcgactgccgcgtcgtggccgtgggcgcggcgtccggcaacgggtccaccaccagcgtgtggaacgggtccggcgtctacgacgcgaagatatggaaggacaactggtacaagaacatcgcgccaaatgaatacctttatgcaggctctcagcactaccataccggcgatggcttcagcgacgatccgtcgaacagcgtcgacaagatcatggaacgccatgtcgactcgacccgcagcatcgtcgtgatcgtgctcgacaaataccagcccgccccgccgaactacacgctgagcgtggccacgaaggcatccggcacgaccaccaaggccggcgacacgcagaacgtggcggacatggtcaccaccagccgtaacggcagctcgatcagcgagaacgtgaccggcaccagcacgctccgctgggccggcgtggacggcaccacccacaacacatggaacggtgataccgaagtcaccgccgaaggctactactacgcatccgaggacgaaaccatcctccagcccgtcgcacgcaaagacggcgaaaccgtcgaccagatcaccagcacgctgaggtgactgtgaacgtcccgaatcttccagctactggaagattcttcccgctgacgagcacatgagcgcaccaaattctccagtgggtggaggaatctgcccattaacggttacgatcgcatggtcggcacatgcgagaagaatcagtggcatgactgaagccgcacatgatgattatcagttgcccgaagaattcgaacactgtttgaaacttgcccctgtacgcgatgcgcctagcgcgttggaccgtgtcaagcaggtcgtacgcattctgcacgaaccaggcggatgcccttgggacggcgagcagaccaatacaagcctgcttaaaccactgttggaagaaacctacgaatacatcgacgccgtggaaacgaacgatcgcgacaacatgcgtgaagaactcggcgacatgctgctgcaatccgttttccaagcgcaagtgtgtgccgtggatgcgcaggatccgttcggcatcgacgaagtgtgcaatcgtctcgtcgacaagctcatcacccgacatccgcacgtcttccaatcagacgacgctgccaacgcttccgcgccagcaccggaaaatgcgcaagatacgttgaaactgtgggaagcgatgaaacagaaagaaaagcatcgcaagtccatgctcgaaggcatctcccacgcgcaaggcgcattgccgcgcgccacgaaaatcgtatcgagagtacacaaatcgcagtattgcgatcagcttgaaacagcattcacaacaagcgcaagtcaaatggacgaacagcatgatggcgatcatccttacgctgacgaaatcatcgccatcatccgcaaagcgcaacgtgacggcgtagacgtggaatccgacctgcgttgccgcctgcgcgacatagaatccgaaatcgaacatatcgaaaggaccatgaaccatgagtgacgtcaaagcactcgaccctgcgctgctcaaacagtattccacagacttcaacgctgaccgcgccaatctggtggcagccaacgcggcagtatcatccggtgtgctcgccgcagccaccgactataagggcgagcgcgtgctgcagaatgatttctccatcgagctgaagcaggggagtatcaccaatcagcgtagttcggggcgttgttggatgtttgcggcgcttaatacgttgcgttatgagttgatgcatcgttggaatttggaggatttcgagttttcggaaacctacctgtttttctgggatgcgatggagaagtcgaacacgtatttggagaatgtgcttgccacgttggatgagccgctggatagtcgtgtgttcgaggcgattaattatggtccggccgatgatggtggttggtggcagatgttcgctgatttggtgaacaagtatggtttggtgccgaagagtgcttatccggagtcggctaattcgaagagttcggatgcgttcaagcagtatttgaatacgaagctacgtgagttcgcgtccgatttgcgtgaccgtcatgcggctggaacgtcgttggatgagttgcgtgcgttgaagaatgcggatatggctacggtgtatcgcatgtgtgcgatcgcgttgggtgagcctccggagcgttttgattttcttgcgcgtacgagcgatgacaaggatgacggcaagaagaaaaccacgggggaggggccgtctgaaaaggctgcgaaaaccggtaaggatgagcgtccgcagattcgtgaattcggtatcactccgatggagttttataagaagtacgtgccggtggatgtgaacgatctggtcacgttatgcaatgtgccgatggagagtcgtccgtttggcaagcggtatcgtattcgtttttccgccaatgtggcggaagcgggtgatatggagtttgcgaacgtgcctcttgacgtgttcaagaaggctgctgtggaccagatcagtgacggtcatccgatttggttcgcttgtgattgcatgcagttctcgttgcgtggcgatggctattttgattgcgataccgtgcgcgttgaccagcttttcggtacgaaattcacgttcgacaaggccaagggattggagtatggcgattgcccaagcaatcatgccatgacgttgactggcgtgaatttggatgctgacgggcgtccgaaccgttggaaggtggagaacagttggggcaaggataatggtcaggatggctattatgtggcgtccgatgcttggttcgaccgttatgttaccgaactgatcattcgcaaggagtatctcgatgaggctacgcgcgaaatactggccgatcagccggttgagcttgagccttgggagccgctcaccaagcgaagccggtgaaggcttgcgcatatcgcgcatgattcggtttgattgcaataaggaatgagataaacagtggagggcgtcgattgacagattcggcgccctccacttattgcagtatttagtcattatttaattgctattcggcagtaccaaggcatgcttcgaaggaacggcgggtgaggcgtctacggttgacgacgcccacgagcttgccttgttcaaccaccggcactttcttgtactgttgatagccgaacatctggcagacttgcgcgatattggcatccgattgcacggtgacggccggctttgcggcaataaccatgacgttcatatcaagcagttctgcgtgagacagttccgggaattcgccgcgggccatgccagtgaccagcgtggaaatgtcggaaaccggcgcgttgtcttgtgcgaagcggcgcagtacgtcgctatcggagatgaagccgaccacgtggcgttcgtcatcgacgataggcatgccgctgatgttcttttccaacatcatgcgcactgcgtcacgtacctcggcatccgaggctaccgtgtaaacgtcatgctgcatcacatcggcaacggtcttgacatccaaagcgggaacatgctgttgcgcggacttgttccatccggcggcatcgccgatggcgtgaactatcttgccggacaatggtgtgacgatcagcatctgaatcggcaacgcgatggtgaaattgtaggggaacatgcgccagaatcccgtgaacgcgccgaatgtgaaaccgaatgccatgatggcgccgaatacggtcatgaacacggtcatcagcaccaccatgaggaatttgaccgtgatgcctttccataccgcacggtcggttgccgcgcagaatgtattcataatcgcgcgggagcttggcgtgcagatgcacaaatcgcaaatcatgccgaccacgtaggccaacggccagttgaacaatgcgtagctccacgccgccgcaccgacgtcaccgatacgtacgccgtaattgagtgccgccatcacataaatcatgatcgcggacatgatgaaactgaagagaatgccctccttgccgttacgtggcacggaacttcctttcgctatgcgttcgatgtgttgctgcatcggcccctctggtctgttccgcacgtcatgttccaacaggagcgcggaaggctagggggcgcacaacgaaatccgaaaaggttcggacgatcgcaatggcgacttcctggcaaacgaatcggctcaagccctcaatgggcatgcaagatgcgattcatgagtcggggccgcttgcaaatcacagattgttcgcagaccccaagacaaatacggaaataccgaacgtgctcgaaacgcatgtggaaagaaaaagccggacgttttcgcgtccggcataaatacaatccgaataaaactcgaattactcggcttactcttcggcgaccaattccagataggaatcgttccataggtcttcgtcgccgtcgggcatgagcagcacgcgttccgggttcaatgcctgcaccgcgccctcatcgtgggtgacgagcacaatggcaccctcatacttggcgatggccttgagaatctcatctcgtgaggccggatcaagattgttggtcggttcgtcgagcagcagcacgttcgcacggctggtcaccaaagtagccaacgccagtcgagtcttctcgccaccggaaagcacgcgagccggcttcaacgcatcatccccggaaaacaggaacgagccgagaatcgaacgcgcctgcgtatcattcagttccggagccacatgaatgaggttttccaacactgtggcattcaggtcaagcgtgtcatgttcctgcgcgaaatagccgattttgcagccgtgaccgtagtccacggaaccggtgtccggctcttccaaatgcgcgagcagacgcagggtggtggtcttaccagcaccgttgtatcccaaaatcaccacacgcgagcccttgtcaatagccagattcacgccggcgaatacaatgttcgaaccatacgctttcgaaacgtccttcgccatgatcggcgtgcgaccgcacggagccggctccgggaaccggatatccgccactttctcctgcttttgtgcctcggacgtgttctcgagaagtttctccgcacgacgcatcatgttctgcgcggccacggccttggtcgccttcgcatgcaggcggataccctgctgcatgaggcgttccgccttcttctcggccacttcacgttcgcgacggcgacgttcctcatcaaccacgcgctgatgcaggtaggctttccaaccgagggaatacatgtcgatctgtccgagctgcgcatccagatgccataccttgttcaccacttcgtccaacagttcggtggagtgggagatgaccaggaatccaccctcgtatttcttcaggtatccgcgtaaccattcgatggagtcggcgtccaaatggttggtcggttcgtcaaggattagtgtgtccgcatcagagaacaggatgcgggccaattcgatacgacggcgctggccgccggaaagcgtacccaattgctggcccatgacctcctgcggcaggccaaggcttgccgccattgcggtcgcttcggactgagccgcatagccgccggccttttcgaaatcctgcatggccttgtcgtaacggttcatcgctcgggtcatgacgtccggatccggatcggtcatttccttttcggctttgcggatacgactgatgatggaagcgatgtctcgcgcgctcatcatgcggtcgagcgcggtctgttccggatcggcagcatgcgtgtcctgcggcagatagccgagcttgcccgatacacgcactttgccggcggtgggcagcatgtcgccggtgatcacgcgggtgagcgtggtcttgccggcgccgttacgtccgaccagaccgatcttgtcgcccttggcgacgtggaaattcgtgggatgcagcaacgtgcgcgcgccgatctgaatctcaagctcctgcgcttcaattgccatgcctcaacacctctgcactttcgttactgtcgttccaaactggctgtgccgcacataacggcctgcccatcatttcataaggccaaacgccaatcgaacatcataccgaacgcctgtaaccacgtgaatcccaccgcgtggtacgcaatcgcaaatggaatagattgcgcggaagcgtaacaatcagattattctggtgagcaggcaaattcggaagggagcaaacatgaagaaagctttgatcattgtggatgtgcagccgacattttgcgaaggcggcgaactgggtgtagccggtggcaatgccgtcgcggaacgtatcgcggattacgtgaatgcgcatcgcggcgagtacgaatacatcgcaaccacgcaggattggcatatcgagcccggctcacactggtcggagcaacccgactatgtggatacgtggcccgtgcacggcaaggccggcactcccggcgccgaacttcatccagcgatcgccgcgctgcatgtagagcatcatttcaagaagggacagtattcgccgtcatattcggggttcgaaggatacgaggataatacggattcgattccttcccgcgaacaggtcgcctctgacatggctacagggcgtacgcttgccgttgcattggaatccgcgggtatcgaatgcgtcgacgtggttggcttggccgaatcgcactgtgtcaaggaaaccgcgctggacgcccgtaagcttggacttgaagtgcatgtcatcgaaaacctgaccgaaccggtcagtgaagaactcggcatcgcagcccgccggcaaatgctctccgccggcgtcatcctcgactagtttcttgaggaatgggacaacgaatggagaagggattgttcagcaggcgtgtttatgaggtggtgcggcgcattccgaagggtaaagtcgccacctatgggcaggttgcggctttggccggagcgccacgcaacgcgcgttttgtcggctatgccctgcattcgaatcctgagccgggtgtgattccatgtcatcgtgtggtgttccgagacggctcgttggcgcccggattcgcgttcggcggtccggaaagacagcggcttctgctcgaagaggaaggcgttgtcttcatctctccgaaaggtatgcccgaactaagcgagtcaggcaagatgaaagactcgaacgccggagcttccggactgcgagtcgatctcgcccgttgtcagtgggacgcctagtcgctttcaatccgtgtcaaccgcttacgcccccaacgacatttgctttatccgccgtggttggataatgggtgcctgccataaggcgaagaaagcaacggggacgcaaaggtggaacggcaaggcatgtggcaacaggacgcaccaggggcgatatcggtcggaatgccggttgtatcgttggcaccggctccgcgaaccatggcataacatcggcttaggtcgttggaaaatagcgcgacacgccgcgatttgcggagttggcatgcttcatgtatattttctactcgttgcccaccacggtggaaacaacttgcggacatagcttagttggtaaagcgcaaccttgccaaggttgagaccgcgggttcgagtcccgttgtccgctccattcgaaagcttccggaaggaagcttttttcatatccgaccgcaaatccgggcgtcatcctcaattcatcccgaccgaaatccgaactggaatcctcctctgttgagaaaacgtttgaccacaatgtgaacgttctcttgaaaagagataatccatgcgagaggctaggagaagttccgccaaaacaggcaacgatgccgggggagagcggaacggacggaggtaaaacaaatgaacgagaacagcgacattattttcgtgccggacgattccgccagccacgagtggacggaacgggacagcgaactcgtggaggagtatgcggcccagcttatgagcatgagcatctagccggaaattagatggggccgggttccctcttccatgacaggaaaagacgtcgcattcgtactgtaactgcggcgtcttttccttgttttcgtttagaatggagacttgccgccaaggcatcgaacacatggaaaggcgtattgttggctgagatcagacgggagatggaacggcttcgacccgtatacgaaaccggtgtcctacggttgctgctgcgtaacaattccatgctgtacgtcgcgttgttgcgttccacgttcgacccgctgacgggggagctgccgcgcgaaatcgtcgaagaacggttcgcacgcagtctcaaccggctcatcgaaaccggcgattacacgctgaaagacgggcagactgcgcgcgaggccgcgcattcggtcctgcttgacctcgcccgcgaaagggaaggcgactacgcctggctcgccaattccatggacgtggcctcgcaccgctacctgtaccgtctcacagcgcgagcgcaccgtgccatcgaagcgctcgaccggcttgaggacaccacgaaagcgctgtccggcgcgcaggccaacagcatcatcatggaaatcgagcatgctcgcatgcagttgaccgccgatccgcgcgagcgcatccgcctgctgaagagggacattgaggaacggcagaaggaaatcgacgagctggaacatagcgaggccttggaaaagctcacgtccgaacaggtcggcgacatcatcggcgtgattcacaacactctgcgaggagtgcccatcgacctgcgcgagctcgccctttccgaacgggacaacggcgacgcgctccgacggcgcatgcaggccggcaccatgagcgtggaaagcatcctcaccgcataccatgacgaataccgacgtgcgttccgcgaatccgacagcggacgtcgtttcgaagacgcgttccaagtcatcgtcaccgacgaaggccggcgcgagatcgacgacgcggtgcgggacatcgccagaaacccctatttggatggcgagccgagcgtgctgctcaaccaggtgcgttccgaactcaaacgcatctatgaaggcatcgaggacgtgcgccggcagatccgcacgtccgacgaggcggtcagccgtctcgtacgccagcagaccgacacgagctaccggaccatgctcgccaaactcaaccagctgttcgcaaagaccagcgccgaagccaaagcccatcccaatgaccaaagccggccctaccatacggacgccgggcaggcgaaattcccgacattgccatctcgtccggccagatcaatggcgcgcgccgcatcatccagcctgaacgacgccccagcggcgaccatcgaagcgccggacctcaagaacatggtcgaaatatgcgggccgcggctgacgcgcatgatcaggcttatccgcagcaatccggtgacgacatcggacggcatgttcgtggacctcgcggcaagcttcaaccagctgccgaaagccgaacggagggaaagcgaactggtcggcttcctcagcgccctgcgcacgcaggacgactcgtcatacgtgacatggcgctgcatatcgatcgacggcagcgaacgcgtatggcgcaccaaacccattctcaccaccgaaacgacgctcgacgacatcatcgaggagagataagcatgacggactatatcgaagccaacatcgaggaaacgatcctgacagaaggggagccggtattggaagaggccggcagccagcaggcctcgaccgcgctgttcaacggcgacaccggcgacatgcccgtcgaagcgcgcatggccgcgatcgcgctcaaacgcgaacgctacatcgacggcagcctgtatgacctcgcctgcgagaaccgtgaggtcgtggaacgttcgctcaacaacgacatgctcagactggtcgacaacacgaaataccgcatcatgtacgcgtcgccggtcaccgactcggagacatgcatccgttcgttgaaaacacgtatgagcctcacccgcgaggaggccgccacgcttgccgcgctacgcatcaaagcgttggaatacgaaaaccagaacgccgaaccatgcgactggcttatcagcttcgacgacatccgcgcattgctcgccaccggcgcgggattcctcaccgccagcaacgacgaggaaggcactgcgaagaaaatcacgtccatcatctcacgcatgcgcacctacgggtatctcgcgccgatcgaagacgacgacatgtacgtcctcacgccactggtgcccatggtgctcgaccgcggcctcgccgaccagtggctcggatccgaaaccacggacgagaacgcatccgccgacggccgcaccaacgccggcccggacgacaggcccatggaagacatagaacaagacgcattcgatttcaacaccgacgacaaccgtttcgacgaggaggaacactgatggcagacggcatgaagatcgtttccgacaagtggatgctacaaagccgacaaatcgtcaactggggctcatacggcggctggcacgaattccgcccatccatggacgaaaccatgccggtgaccctgctcgccggcgccagcgaatcaggcaaatccacactcgtcgacgcgcaaatctcactcctctacccatccggaaccccctacaataaggcgtcgaactccggacgttcggaacgcaacgactacacctacctgcgtggcatgatcggcgtaagcgatagcgaaaacggcgaaacgccgatcttcctgcgcggcaaagacgccgacggcaccccacagaacatctggggcgcaatcgtcgacacctacgtgaataaaaccgacggaggactgctctcctgcggcaaattcctctacctgaacgccggagacggacaagacggactacgccgccgctacatcacctggaaccgaaccatcgacccacgactcatggatcagtaccgcaacacaccattcacccggtccatgttcgaaaaaacctatccggaatgcaccacgcacaccaacgctgcggcattccacgcctccatctggcaggacatgggcctaagcgccgacgcctgccgcctcctgcacaaaatacaatcggcggacgccccctcaaaactcgacgacatcttcaagcaaggcgtgctcgacatacccgaatccatccgcctcgcccacgaaaccgtcgacgactacaaccggttcaacgaaaacttccacagcatggaagacaaaatggcccgcgtcgccatcctgcaaaacatccagacacgctacggcgaatacgcaaagcaaaccagcgaacgacgcgaatacgaacccatcaaccccgacagcgaacatggcaacgcaacactgtccgcatgggcgcgctcgcgcatggccagcgaagtgcgcgctggtctgccggccgcgcagcgcaaggtcaaggagtcgcaggaggccatcgatcgggcgatgcagcgcgtcggcgagctcaacacgcgaatcgacgccgtcaaggaacgtatccaaggcatcgacggcggcagtctgcagcagctcggcaaggatcttcaacgcgtgcgccaggacatcgacgaggcgagcaggcaacgtcatgccatagccgaacgattcgaacaggtcgaaggcaggcttcccgacagcgagcagacatgggacgccaaacgcgccatgctcgccgaaacgctcgacacatacgaggaacggttgaaggacgcgaacgccagattccagcagctggtaggggagcgtcacgaccgccagcgcgaccgtgacagcctacgacgggactatcagcgcaaactcacgcacaggacgcgcatcagcgatgacatggacgacgcgcgcacgcttatcatgcgggcgaccggattggacgcgtccgaactgccgtatgtggccgaactgatggacgtgaacgaacaggacgaacagtggcgtctggcaatgaacgtcacctacgcgcccatcgcgcagaccatcctcgtcgacaaacgccacgagcaaggattcgcggcgaaaatcagcgccatcgacccgaaactcatgacacgacgcacgtggcggttcatcgacaccggcatgcaatacgaatcctccgccagcgaaggctggatgtcgtcgaaactgcaataccgggaggactctccgttcgccggatggctgaaaaaccagacgacgtcgccacggttcgacgcgcgttgcgtgcacgccatcgacgacatgaaccatgacgaacgacaagtgcaggccgacggacaaatcaaatccggcgaccgtggattccacggcagcaaaggactacaccaggtcatcggcttcatgaacgaacaatacctggccgaactgaaaaaccaactcgacaaggcggagcaggcgttgcagaacgccgaccgtcgaagcgaacaaatgtccaacaccatcagcctgctgcaagacgagcacgagctcgcacgaatcgtagccgacatgccatggagcaaaatcgacgtgaacggactacgggaacaggaaacgcgaatccgcaggcagatcgaacgcatcgaaaacgacccggaactcggccaactgcaaaccgaactgaaacagctcaaccaacaggccaccgccgaaaacagaaaccagtaccaagccgaagacgacctcgacaaggcccaacacgccgtccaagccgaacaagcatggctcgacgcctacggcaacgacgacttcgacgacgccacactatccagcatggtatcgaacctactcgccgacgcatacgagaactgcttcggcgcatccgtacgcgcgcaagaccggtcaaaactcatcgcaggcctcttcgaccatgaaagcgaaacaccattccacacgcgcgcgctacgcaacatcgcacgcatcgcacgcacacgaatccaagaaatcgacgccagatccaaccaactgcgcgccgacacggaacgcatcatggacgactacctcaaaaaccactccacagacgacaacaccgtcatggcaagcgtggaagactaccgatacttcctcgacgaactcgacgaactcaacatgctcgtcacccgcgccgcaaccgacgaagaatacgccaacagcgtcaaaaaactctacatgagcttccaacagctcaaccgcgcgctacgcaccgacgaagaaaacatcaaagaacaactcaaccgcatcaacagcatgctcaaaggacaacaattcggcccacaaggcggcagactatcactcgacgtgaccttcagcccaatcgaccgacaattcgaaacaaccctcagccgcatcctgtcaaaactggaagactggacgcgcaacgcaagcgacaatcccacggaaacacgcaacgcattcaacaactgcgaaacattcgtgaacagactgcacaacgaactcgacaaaatacacgacaccaacggcatcaaagcatacggcgcacgcaacctcgacccacgcgtacgcagctcattctacgcaatcgtgcaccacgacaacgcccccgacgaacgcatcagctccaccggcggaaaatccggcggagccctccaagaactcacctcattcgtctacggcgcagccctcatctacctcctcggcggcgacctcaccgcacgtcccacctacaccacgctcttcctcgacgaagcactcatcaaagccgacggccgctacaccaaacgcgcgctcgccgtactaccccgactcggcttccaaatcatcgtctccgccccggaaagcaaaaccgcggaaatcctcaacgtcgccaacagagcatacgtcgcatacaaagacccatccaccggcaactcatacctacaggaactcgacagcgaaaccatcacacaggacgaaacgcagcccaccaccgcacccgcgaaaccaacaacggaggcataacccatggcaacggccagaagcaccaccaacagcgacatccacagccaactcaacggatacgtcaccgactatctcaccaagcacatgtatgacgccaacacctcctggccattgcgcaaaaccatccgactacccaaacaagccgaactcgaagcccattacacgcacatccgtgcccaagacgaagccatccgcaactgggcacaacaacaccactgcgaaaccagcgaaaaaaccaaaatcatctccaacggaatcgtccgacaaaccagccaactcatcgactcggtaaccatacccgacctcaacacggccctcaacatcaccacaccacaaacacgcaaactctaccaacgcgaacaccaacgcgcacacaccatcaccagccaattcaacctcgactccaacacctccataaacatcgccaaaatcctcaaaaaccacgacgataccgacttcaacctcgtcatacaagccgcacactacttcgccaaccacaacaccgaaaacatgaccccacgcatggtccccatccccggattcagcgcaaaatggctaggcaaaacaacatcaaaccgctgcaaagcaatctgcaaactcctcaaacgagaacaactagccctcaacgaccgccacggagaaatccgactccgactcctcgacacacaacaccacaaccaaccagacctcatcgtgacacaaccatggacagacggcgcgccacacgacatcacccacatcatcatcgtggaaaacaaagacacctaccaagccatacccacaacagaacacgccatctgcatattcggcagcggacacgcggcaacccgaatcaaaacactactaccttggatcacaaccacaccccacatcatctactggggagacatagacgcagacggcctcgaaatactctccgaactacgacaaaccggcatcacctgcgactccatactcatggacagcacagcatacaaaacatacgaaccatacggcaccaaactcgacaccaaaaaacaacccctcaaaacacgcgaccccaaaccaacaccaggactcacgcaacacgaaagaaacttatacgaacaactctgcaccgggaaaaacacaacctacctacgaatcgaacaagaacgcatccccatcaacgacgcaatgacaatactccacaaccaacaccaatggaacacaacacaccacaaatagaacacctgttcgaaatcataacgaaaatgaggtatcctaaacaactagaacaaaggacaaccaccagcggaggcaagccgtggcaaccaaacgcaacaacgcagcaaacggcgacgtcatagtcgaacgcgttctcaccagcgacgcattcctcgcaagagaaatcaaaaaagcccctctcaaaacgaaaaacggttcacttacagccgacctcaagcacctgcccaacgacctcaaaatcaccatccaaggcgctcgcgagcataatctgaagaacgtggatcttgagtttccgcgcaatcgcatggtggtgttcaccggactgtcgggttctggcaaatcctcgctcgccttcgatacgttattcgccgaaggccaacgcagatatgtggagtcgctgtcggcgtacgcaaggcagttcctggggcaaatggacaagcccgacgtcgatttcatcgaaggtttgagccctgcggtgtcgatcgatcagaagaccacgaaccgcaatccacgttcgactgtcggcacgattaccgagatttacgattatctgagattgctgtttgcccgcactggcattccgcattgcccggaatgcggcgcgttggtcagcgcacagacgccgcaacagatggtggacgcgttgctgcagtatccggagcgcacacgattccagattctcgcgccggtcgtccgtgggcgtaagggcgagttcgaggatctgcttgaactcttgcggggcgacggctacgcacgagcgctgattgacggcgaaatgaagcagctgtccgacgacatcaaactcaccaagcagaaaaagcacaccatcgaagtggtggtggatcgactggtggtcaaggacggcatccgtcagcgtctgaccgattccattgaaaccgcattgaagctcgccaagggtattgtggtggccgattttgtggatttggatgagaaggatcctgaccgccgtaagcctttttccgaaaaacgcgcatgcccgaacgggcatcagcttgaacttgatgagattgagccgcgcacgttctcgttcaacgccccgtacggtgcctgcccggtatgcacgggcatcggatacaagctggagattgatccggaactggtgattcccgatcccagcaagacactgaatgagaacgccatcgaaccgtggggcatgaccaaaggcaccggcgaatattatcgccatgtgcttgaggggctcggcgatgagatgggtttcgatctcgacaccccttggaaggatcttccggaagaggcccgtcaagccattatgtatgggcgtgatttcaaggtgcaggtctcgtatcgtaaccgttggggtcgtatgcgcgaatattccaccggtttcgaaggcgtggtgcgtacgctgatgcgtaggcatgacgagaccgactccgatcagatgaagcggtattacgaatcgtatatgcgtgaagtaccttgtcaggcatgccaaggccgtaggcttcgtccggaagtgctggcggtgaccgttggcggggaatccattgccgatgtgtgcgacatgtccgctgagacaagcctcgcatggatggacggcttgcagcttgaagggtcggccgcgcagatcgccggcgaggtgttgaaggagattcgtgcccgtcttggattcctcaacgacgtcggactgaactatctgacactgtctcgtgccgccaaaaccttgtctggcggcgaggcgcaacgtattcgtttggcgacccagatcggttccggtttggtgggcgtgatgtatgtgctcgacgagccatccatcggcttgcaccagcgtgacaatgagcggctgatcaccactctgcatcatctgcgcgatcttggcaacacgctgatcgttgtggagcatgacgaagacactatcaagaacgctgattgggttattgacatcggacctggagctggcgagcatggcggcgaagtgatttattccggtcccgcgaaaaagctcgttgacgctccgcgttcggttacgggcgactacattgccggccgccgaaagatcgaggtcccgcagtcccgtcgcaaagtacgtaagaccaagcagttgcgcgtggttggagcccgcgaaaacaatctgaaggatttgacggtcaacttcccactgggagtattcacttgcgtgacgggtgtttcgggttccggtaaatccactttggtcaatcagattctgtacccggtgcttgccaacaaactcaacggtgcgcgcatcgtgcccggcaagcatacccgtgtggaaggtgtgggccagtgcgacaaagtgatccacgttgaccagaatccgatcggacgcactccgcgttccaatccggccacctataccggagtatgggataagatccgcacgctgttcgccaaaacccctgaagcgcaagtccgtggatacggtccggggcggttctcgttcaatgtcaagggtggccggtgcgaagcatgccatggcgacggcactttgaagatcgaaatgaacttcctgccggacgtgtatgtggactgtgaggaatgccatggcaaacgctacaaccgcgaaacgttggaggtgaaatacaatggcaaatccgttgccgacgtgcttggcatgccgatcgaagaggctgcccagttcttcaaagcgtatccctccatctcccgctatctcgacacgcttgtgcaggtcggacttgggtatatccgactcggacagcctgctccaacgctttccggcggcgaatcgcagcgtgtgaagcttgcgaccgagttgcagcgaaggtctacgggcaaaaccgtgtatattcttgacgaacctaccacgggtttgcattttgaagatgtgcgcaaactgctgcttgtcttgcagggattggtggataagggcaataccgttattgtcattgaacacaatctcgatgtggtcaagtcggccgattggatcatcgaccttgggccggaaggcggtgacggaggcggcaccatcgttaccgaaggtacgccggaacaggtggctcaatgcgaacagtcttggaccggcaagttccttaagggcatgctgtgagcgcacccatcgagcggcacagccaagaggtttggcgcaaaaccgccgaacagttgaacggcgacggtttcagtgtcggtggtgatgattctcccggcaaagacgtaaacaagaacggcgcgcctctgctgggggattcacgtgacctgtttcgtccgaaaacatccgacattccggcgcagccgggcgtatacaagtggcgagatggtgaaggcagggtcatttacgtaggcaaggcgaaaaacctgcgcaaccgtttgaccaattatttccaaccgttgtatcagctgcatccccgcactcaaaccatggtattgacggcccgcaacctggaatggacggtcgttggtaccgaacttgagtcattgacgttggaatacacgtggatcaaagagtttgacccacgattcaacgttgtgttccgcgacgacaaaacctatccgtatctggcgatctcatccggtgaacgcgtgccgcgggtgtgggtgaccagaagccgcaaacgccgcgatacaagatatttcggcccgtacgccaaagtatgggatctgcgtcacagtctcgaccgtctcctcaagacttttcctgtgcgcacctgttcgcagaacgtttatcataaggcggaaatcactcatcgtccatgtttgcttgcgtccatcggcaaatgttcggccccttgcattggacgtatcagcgtcgaggaacaccggaagatgtgcgaacagcttattggcgtattaaccggtcgcatcggcaaatcgtatatcgcacagctcacgcgtgaaatgaaggaggccagcgacgagttggagttcgagaaagcggctcggttgcgcgatcagatccagatgctatccacagtggttgagcagaatgccgtggtgttcgattccgatgtcgatgcggatttcttcggcgtcgattcggacgagctggaagcttccgtgcacgcgttttacgtgcgtgccggttccatccgaggtgaacgcaattggagtgtggaacgggttgaggatgtgacggatgaggagctgattgccgaccttattgtgcaggtgtattcggaaaccgcaggggagacgattagggcttcgcagtcgactgttgtcaccgaacaacgcaatgccatcggatcgacgcaaatcgtgacggcgaccgatgcggtggcacgcgcgcaagctaccagggaacgtaacgagcggcaggatcagaccggtcgtgcggatttgttggctcctatctctccggtgccgcgcgaggtgattgttcccatcgagccggcccggcgtgaagagcttgaatcatggcttatcggattgcgcggtggtgccgtgagcattcgcgtggccagcagaggggataagagacagcttctggaccgtgccaacgataatgccaagcaggcaatgcagcgcagcaagatgagtcgcatcagcgatatgggcgcccgcagcacagccatgaatgatgttgccaaggctttgggacttgaacaggctccattgcgcatcgaatgctacgacatttccaataccgtcggcggagcgttccaggtcgcttccatggtggtattcgaggacgcgattgccaaaaagtccgaatatcgtcgtttcgccattcgcggagcggacggacagggtgcactcgacgatttgagcgcattgtacgagacgctgacgcgacgattccaacatggcaatatcgccggtgactccggcgaaagcatggataatgaacgtcgggcatccgagcatggtgaccagactcatgaaccgactgtccagcagaacaccaatcggcatcatttcgcatacaagcctaatctggtggtggtcgatggcggcaaaccgcaggtcatggcggccgcgaaggcgcttgaggattgcggtgtggatgacgtggccgtgtgcggattggcaaaacgtttggaagaggtgtgggtgccggatgacgactatccgatcattctcaaacgtcaatccgaaggcatgtatctactgcaacgcgtccgcgacgaatcgcatcgttttgccatcacctatcatcgtcagaccagaaggaaaggcgcgttgcgttccgccttggacgatattccaggcgtcggcgaggcataccagaagcgcctactgagccatttcggctcggttcgtgccatgcgtgaggcggatgtcgaggatttcgagcaggtcaaaggcgtcggaaaagccaaagccgcagccatttaccaagcgttgcacgcccacgacgggcaaccgtcgacggaaaatgccatttcgtcgaatagtccgaaagatgaaatggaataagattgggtagcgaaaaaagacaatcggattgctagcatgatgacggtgaatatatagggagggaatatgaccgaggtcaaccaccggtgcgcggttctgggcaagcccatcgcacattcattgtctccggtgctgcacaatgccgcttatcacgcgttgcatcttgacgactggtcgtacgacaagcatgaggtgggcgagcctgatcttgagggctttcttgaatcgcttgatccgacctggtcgggactcagcctgaccatgccattgaagaaaacgatccagccatacggaacaccgtgcaatacatgggccaaagagcttatggttgccaataccgcggtgtttgattggaccaaaacctgtgtcaatggcaattcgaacatccccttcatcaggctatataacacggacgtacgcggcatcgaactcgctttcgaacactcgtatcagacacgtgcgataacgccgaagacggaccgttcgggaacggccgtgatcatcggcaacggcaacaccgcaacgtcggcgttagcggcatgcgtggagatgtctgcgatcggacatgtcatcgttgtggctcgccatcctgagaagaacgccgatctcaagccacttgccgaacggtatatgccatcggaacagccgatcagcattgtcggcatggaccacgccatcgaagcgttgcgccaggctgatgtggcgataaacaccattcccggattggctgcggacggtattgccgaatcattgagaatgccatgtgtgcgcatgcatggaacattgctcgacgtcgtatatgacccacgccctaccaagctgatgcaggcatggcgccaacagggaggaatcgccattggcggcgagcagatgctgttgtatcaggccatggtgcaggtctggttgatgacgggaatctgggatgacgatccgccgagcggtatggttgatcaggattgcaccgcgcgtttggaacaagccatgcgcatcgcgcttgaggaggctctgtgatggcacagaaagacatcgacgtacaggcgaatggcacgcatgccagcgccccttcgccggctgaaggttttgaagtattgctgatcaccggcatgagcggtgcgggccgttcgcatgctgccgacagcattgaagacatgggttggtatgtggttgacaacatgcctccaaaactgctggtgcccttggtggacatgatgaccacgggatccaatattcacaaactcgccgctgttgtcgacgtgcgttcccgcgactatttcgatgacctgtccgcggtgctcagccatctggacgatcttggtgtgaaaacgcgtatcctgttccttgatgccagcaacgaggtgctgatcaaacgatatgaatccgtacgcaggcctcatccgttgcagcagggcaatcgactgattgacggcattctcgaggaacgagatctgcttgagaatctcaaagaacgtgcggacatcgttatcgacacgtcatcattgagtatccatcagctgtccacgaaattatatgaggccatgctcggatccggtccgaccacggtttccgtgcacatcttcagtttcggtttcaaatacggtattcccatcgacgccgactttgtggccgacgtgagattcctgccgaatccattttgggttcccaggcttcgctcgctgaccggacgcgacaaagaggtgagtgattacgtactttccagcgaaggggccgcggacttcctcgactcgtatgaaaaggcgctttcgattgcgattgaaggatatgcgcaggaagataagcattatgtgactattgcgattggttgcaccggaggccagcatcgttctgtcgcgatgagtgaggctttggctaagcgactgcgtgcgagggggttgtcggtttccgtttccgcacgcgagcttgataagcggtcagcggaaaaatgaccgcattatgagagaatagtgtccatatgtaaagaaacctggctgtgattgtccaagatattcggtatcacagtaagccgtggcagtgcggaatgattccgcgactcgcctgaaatttagggaagaacagcaaggtaggaggttggctcttggctcttctggatgacgtcaaaagcgagctggccgcaatcgataacgaactgccgatcgccaaaaaggcgcaggcgacagcgatgattcgattcggcaatggtttgcactcggtggatcaccacattctcgtgcaggtgcagctcgactcccaagatgcggctgcttggctgcaggacaccatcaagaacctgtatggtcatgaagccacgcttactcctgtctctaggcagacgccaaccggcaccgtgcagcgttatgtgattcgcgtgccgaagggcagtacggcgctcgtgctgcagaccggcctgtacagccgttacaccaagaacatggtgcttggtcttccaagcgatatcatcaacggcaaaatcgcgcagatcaagtccgcatggcgcggcgcgttcctcgccaacggacgtctgtccgatccaggcaaggccagctatcttgaaatcgtgtgcccgaaccatgaggccgctctggcactggtctccaccgcacggcgtctgggcatcaccgccaagccgcgtaagctacgcagctccgaacgcgtcaccctgcgcgatcccgacgccatcgaacgtatgctcattcttatgggtgcgccgcgctccgcacgcgagtggaccggaaagcgttccgacggcgaagctcggggcaaagccaaccgtctggccaacttcgacgacgccaacatgcgtcgcagcgccaaggcggctgcggaagcatgcgacaaggttcgtcaggcgtttgagattcttggagatgacattccagacaacctcaaatcggccggccagcttcgtctcgaccatgctgatgcgtcgctggaacagctgggacgtttggccgatccaccaatcaccaaggatgccatcgcgggccgtatccgtcgacttctgcagctcgccgagaaaaccgaaaaggcgcgccgccagtcggcttgattgaatcttttatgcaaaacaccatgcctgttttcgaacagtatggtgtttttgttcgtttgggcttgtattattcgtaaatggcaatatggccattccacgcttacaagcggctaggaaaggatatacatgaagacactcaaggatcttggagatctcaagggcaagcgcgttctcgttcgcgccgatttcaacgttccgctggacggcaccacgatcactgatgacggtcgtatcaaggccgctctgccgaccattaaggccctgcgcgaagaaggcgcgaaggtcattctgatggctcacctcggccgtccgaagggcaaggtcgttccggaactgtcccttgccccggtcgctgctcgtctcggcgagctgctcggcatcgaggtcccgctggctgaagacacctatggtgaggatgcccaggccaaggtcgccgcaatgggcgacggcgatgtcgttctgctgcagaacgtgcgttacaacccggaagaaaccagcaaggatccggaggagcgcgccgcttatgccaagaagattgctgcgctcggcgaagcgttcgtatccgatggcttcggcgtcgtgcaccgcgcacagggctccaattacgacgttgctgccgatcttccggctgctgccggcctgctggtcgagaaggaagtcaaggctctgtcccgcgctaccgttgagccggaacgcccgctgaccgtcgtgctcggcggttccaaggtctccgacaagctcggtgtgatcgaaaacctgctcgacaaggccaaccgtctggtcattggcggcggcatggtttacaccttcctcaaggccaagggcctcgaggtcggcacctccctgctggaagaggatcaggtcgagaccgtcaagggctacatcgagcgcgctgagcagaacggcgtcgaactcgtgttgccgaccgatatcgtggtgaacccggtcttcccgaagtccgatgaggacatcgctccggaagtcgtggctgccgacgccattccggctgacaagatgggtctggacatcggtccggattcccagaagctcttccacgacaagatcgtggattccaagaccgtcgtttggaacggcccgatgggcgtgttcgaggttccggctttcgctgccggcaccgaggccgtggcccagggtctggtcgacgctaccgcagctggtgcgttcaccatcgtcggcggcggtgattccgcttccgcagtgcgtaacctcggcttcccggaggatggcttctcgcacatctccaccggtggcggtgcctccctcgagttcctcgagggtaaggaactgccgggcctgaaggtgctcgactgattgcttaacgcataaccggaggtgctcccttatcaacaaaaaaggtgggggagcacctcttgttttcactaacccgaaaccacggcgtacgaacactgaatgaaataagaacggaggcaggcaaacacatggcatcgcaacgaattccactggtcgccggcaattggaagatgaacttcgaccatcttgaagccacctatttcgttcagcagctcgcatggaaacttcgtgacatccatttcgactaccgccattgtgaaatcgcattgatgccgtccttcacatcgttacgcagcgtgcaggtgttggtcgaatccgacaatttgaagattcactacggcgcacaggctgtttccgtaacatcgcagggcgcgttcactggagatgtgtctgccgatatgatcgcccacctcggctgttcgtatgtgattgtcggacattccgaacgacgaaagtaccatccggaagatgatgcgaacatcgtggatcaggtacgcgctgttttggcggccggaatgcagccgattctttgcgtcggcgaaagctacgaggaacgtcgcaaaggcattgagcttgatttcgccgtggggcaggtgcatgacgtcacacgcgatctttccgacgaggaagcgtcgcgtctgattgtggcgtatgagccgatatgggccatcggctccggaatggtggccactccacaatccgctcaggacgcggccaaggcgattcgggatgatttggctgaaactttcggcacgcatgtaggagagtccgtgcgcattctgtatggtggctccgtctcctcaaagaacgccgaagaattgattggcgagcccgatgtggatggattccttatcggcggcgccgcgctgaacgtggatgagctcaccagaatctgccagctcaccatgaatgcgacagtatgatgctcgcggagtaatgtttttatcgagttggcctttcaaggtgtggtcattattcgattttctcaataccttgcgctattgttaacagcagtgtttacgaactggaggttcactcgtgtccgctatggccatcgtcaagcttgtgctgcagattattcttgttattttcagcctcttgctcaccctgttgattctgatgcacaagggtaagggcggcggtctgtccgatatgttcggcggcggtctcacccagaatgcgggttcttccggtgtcgcggaaaagaacctgaatcgttggaccgtcatcatcgcggtgctgtgggttgccatcatcattgccctcggtctgatgacgaagttcgatctcatctgattggctttttgcttcggcccatgactggattacagtcatgggccgaagtgttttttatcgtagtattgtctacaacatacgagctaaggattgatttgacgtctttgaaaatcgagaaaacccaagaaaccacgatggtcgtcgcggatttggacggtactttgctgcatgatggcgaaacgttcgaggaacgttttcttacacaacgttccatcgatgtgattaaccgcatgcacgataatggcgtgaccttcgttgtggaaacggcacgtccggtcagcacaggcttttcgttcgtggaaaaactgccggttgatgccgttgcctatctcaatggagcattgatcgatttcaatccagcctcatcaaattatgaaatgctcacttcgccgatgctgccggaagacggccatctcaagaaaatcggattctcctcacagcgagcatgcgaagtctgcaagaatctgttgaatgaactgcccggtatggaagtcggcattgtcatggatgatgtgagatacaccaatttcgatgttacgaaatattggaaaacacagacctggcgatacactgacttcgacgatgttcctgaaggcatcgccgataagctcattatcttccctaacgatgagcagcggaatcaggtcggttctcttgtgcccaacgattttgacgtacatatctctgagggatcgctgtggatgttgatgaatcctcaagccaacaaggagcatgcgttggatttgctggcagaacattttgagacgccgatgagcaataccgtctcattcggtgacgatttggtcgacattgccatgctacgtaaatccggcaggggagtggcggtggcgaacgccaatccggatgtgttgaacatcgcagatgaaatctgtccatctaataatgatgacggtgtggcgcagtggattgaagataatctgctgtgatgtctcgtgatattcaagagttacatgagttgaacttcgtgaattgaacttttgttgcaaaaggatgcgaaatggttacatttgatattgaacttccgcaatttcgttagttggtttgtgttaggatttgaactagcgcttgatgaaaattgaactgaaaggactagtatggcggaatcgttctccaaccggttgaacgtcgctatggcgttccgcaatgtcaaacaaattgactttgtgcatgcggctgagaagttcaatatcaaacttggcaaaagtcatatgagtcagtacgtgagcggcaaaaccgtgccgcgtgccgatatcgcccattttcttgcggcttttctgcaggtcaatgaggactggctgatgggaaaggacgttcccatggagcagaatgtcgccaccttgcccgcaatcaagtctgatgaagcccaacatgatagcaatcctgcatcagcgcaatcaacagaaggaaagactatgcgcacctttacgaaatctcataagctcgacaatgtgctctacgacgttcgtggtccggtggcggacgaggcagcacgcatggaagccgcgggaacgcatattctgaaactcaatatcggcaatcctgcgccattcggattccggactccggatgaagtcgtgtatgatatggcgcaacagctccctgaaaccgaaggatattcaccgtccaagggtctgttctcggcacgcaaagccatcatgcagtatgcacagctcaagaatattccgaacgtctccatcgatgatatcttcaccggcaatggcgtcagcgagctcatcaacctgtcgctgtccgcgttgctggatgatggcgacgaggtgctggtgccttcgccggactatcctctgtggaccgcctgcgtgaatttggctggcggtaccgccgtgcattacatctgtgatgagggatccgaatggtatcccgatatcgacgatatccgctctaaaatcacggataagaccaaggcaattgtcatcatcaatccaaataatccgaccggagcgctttatccaaaggaactgctgcaacaaatcgtcgacattgcccgagaacatcagctcattattttctccgatgagatttacgatcgtttggtcatggatggactggagcatatttctatcgcatcgctggctccggacctgttctgtgtaacgttctccggtctgtcgaagtcgcatatgattgccggatatcgcattggatggatgatactttccggcaacaagcgtattgcgaaggattacatcgagggcttgaacatgctggcgaacatgcgtatgtgctcgaatgtcccagctcagtcggtggtacagaccgctttgggcgggcatcagagcgtcaaggattacatcaagccaggtggccgtgtgtacgagcaacgcgaactggtctatcagatgctcaatgaaattcccggcgttaccgcagttaagccgaaagcggcgttctatatcttcccgaagctgaacgtcaagaagttcaatattcactccgacgagcagtttgcgttggatctgctgcatgacaagcatattctgatcagtcatggcggtgcattcaactggcagaatccggatcatttcagggtggtatatctgccacgtatcacgatgttaaaggaaaccgtaagtgagatcggtgatttcttgagcacatatcatcaggcatgatgaccttgattgcttgaagggctttcatagtgtgaagtacgcgcagcatcgcgacactccgtccccaaatacttatagttatactgaccataagtagggttacgatggctccggccttagggccgagccatcgtttcattgtgaaaggggatattgtgaacgatttgctcaaaggaatcggcaacgtcgtcaatccgaagcgtgtgttccgcgagctgactgacttcaagccgggggagtttgtcctgatcacggtcatgctgttggcgcagttggtgtcattcttcgtgtccaaagattttccgcggcaggttgaattggtctgatttccggcctatgcatcgtgttcaatctcattctcgtcgaccgtgggcgactgaccaactatctgtggggcttcatcggttgcgccacttggctgatcgttgccatcatgaaccatctcgtcggagacatcttctctcagatcttctacgtcaccatgcagttcgtcggcgtatgggtgtggcagcgccagcttgatcgtcaggaaaaaaacgagtatgaggaagtcaatgcccgcatgttcacatggtggcaaggcattctcgccgtcatcgcaaccatcgtgatctatctgattgtggtattcgtgtcgagccatactggcggtgtacaggttcggcttgacggcacgctgctgcctcttggtatcgtcggacagattctcatgacatacggctaccgcagccagtgggtcgcatggattattcttgacgtgatcaaggtggttatctggttcaaccagctttccgccggaggtcctggcgccatgtcgatgttcgttcttcaggtggtcatgttggccaacggtttttacggcgcatgggtctggttccacaagagcagcgctatggccgtatcggatgatctgcaatcaagtatttgcacggaaaagcataatcgcaaatggtggccgctgatcaatcaatcgttccgtcgcgagttcacaacgatcatattggttgttgggccggcttccgtcggcaaaaccacattggtgacacgcttgtcgaaattgtatgacgctccgatcgcggtcgagtatgcccgtgaatttgaggaagcctgcaatgttgacgatgatgaacttaccgctttcgattacgagcggctgattctttccaagttctctcagaacgagcatgcaatagcatcgcatgccaatcatggcatcgttttttcttgatactgatgccatggttacgcgtgtctatgcggaacgctatctgccggccgatgagaacgccaagctgcaagccgacattcgatatggtgattgaacaggagaagcctgatctggtgttgctgattcctccgatcaccgaatatgtggatggtgggttccgtgcaatgcggtgggcttcgaatcggtatcggttccatgagactttggtacgcgtcattcaggagtcaccgtatgccgaccgtgtggtgacgcttgacaatccaacttttgaagggcgcaaaacgcaggcgattcaagcgatccgccaggccactggttttacgcctcgtaccggaataagctgaaaacatgtagagcaatagcagaaaccccctgccagaattctggcagggggatccttagcttagatcgctaacacttaagcaagaagctcagccgttgacgcggtcgatgccagcctggacgtcagtaaggacggaatcccaggacttgatgaaggaagcgacgccgtcggcttccagcttgtcggtgacagccttgaagtcgatgcccagctcagcgagcttggccatgatggcgtgggactcttcgtaggtacccttgatggtcggagcgccgttgccgtgatcggcgagagcgttcagggtcttctccggcatggtgttcacgatgagcggggcaacgagctcgtcaacgtagacgcaatcggaataggccgggttcttagtgccggtggaggcccacagcggacgctgcttcttggcgcccttggcttcgagagcagcccaacgcggatcgttggcgaacttgttctcgaacagctcgtaagcgaggcgagcgttggcgatagcggccttgccttcgagagccttggcctcatcggagccgatctcctcaagcttgttgtcgacggcggtgtccacgcgggacacgaagaaggaagcgacggaaccgatgtgcttcaggtcatggccgttggcgtcagcctgagcgatgccttcgatgaaggcatcgatgacctgctcgtaacgctcgagcgagaagatcagggtgacgttgacggagatgcccttggccagggttgcagtgattgccggcaggccttcgagggttgccgggatcttgatcatggcgttcggacggttgaccttctcccagagctcgacagcctgctgctcggtggcttcggtctcgtgggccagacgcggatcaacttcgatggaaacgcggccatcgacgaaatcggtggcttcggcgatctcacggaagatgtcggtggcgttgcgcacgtcggtggtggtgagctcgcggatagcggtctcaacgtcaaccttgccgagctccttgagctgtgcatcgtacgggccgacctggctcagagccttctggaagatggacgggttggtggtgacgccaacgacgttcttgtccttgatgagctcctgcaggttgccggattcgatacgggtgcgggacagatcgtccagccagatcgagacaccggagtcagaggtgcgctgagttgcttcagtcattgtttttctccttgatacctttttggatcaaatctttatttattgtgcggtaaaaggggagaggcacatgcatcatgcccctccccgtcgaatcacttggcggcttcgacttccgcaatggaggccttggcggcttcgacaacatgctcggcggtgatgcccaggtcgatcatgttctgagcaccgtcgccctgcaggccgaactgctcgatggaaaccggcttgccgtaggagccgaggtacttgtaccacggcatggcaacgccagcctcgacggagacacgagccttgacggaggccggaagcacagcttccttgtactcggcgtcctgctcctcgaaccattcgagggacggagcggacacaacgcgagccttaatgccttcaccagccagggtcttggctgcggagacggcccactgcacttcggaaccggtggccatgataatgacgtcaggggtgccctcggtgtcgacaagcacgtaagcgcccttcttgacgccgtccttggccttctcagcggtttcggcaagaaccggaacgccctggcgggtcagcaccatggctgcaggcagagtgttcttcttctcgaagaagtaacggtaggcttcggcggtctcgtaagcgtcggccgggcggacgacctcaagctgcgggatggcacggaaggaagccaggtgctccaccggctggtgggtcggaccatcttcgccgacggcgacggagtcgtgggaccacacatacaggttcggaatctgcatgagggcggccagacgcacagcggaacgctcgtagtcggagaacatgaagaaggtgccaccgaacggacgggtatgggagcccagcaggatgccgttggtgatggtacccatggtgaactcgcgcacgccgaagtgcagctgacggccgtacgggctgcagaccggccactgcttggtggcgcactcggcaggagcgaaggtggcagcgcccttaagatcggtcttgttggagccaccgaggtcggcggagccgccccagagttccggcatgacagcggcgatggcgttcagcacggaaccggaagcgccacgggttgcaacgcctttgccgacttcgaaggtagcctcgaggtcatcgatggccttgtcgaagccctccggcagttcgccggccttgaggcggtcatacagggcagcgttgtccgggttggccttgcgccatgcgttgtacttctcgtcccattccttgtgggcttcgaggccgcgctcggcaaccttgcgtgcgtgagccagagcctcttcgtcgacatggaaggactcttccggatcgtagccaagcagttccttgaggcctgcgacggcttcggcgcccagcttggagccgtgagaggacggatcattggtcttgcccggggtcggccatgcgatcagggtatcgaccttgatgagcttcggctggttcggagcggcctcgcgagccttggcgatggtgtcggccagaccctcgacgtcctccttgtaggagccgtcaggctggatgaagctgaactcgtcggtataccagccgtaggcctggaagcgcttgagcacgtcctcagccagaaccagattggtgtcgccctcgatctggatgcggttggcatcgaagatgacggtcaggttgcccagctgctggttggcagcgagggaggcagcttcgccagagataccttcttcgatatcgccttcgccgcagatgacccagatgttgtggtcgaacggggattcgcctgccggagcttccggatcaagcagaccacgctggaaacgctggccataggcgaaaccaatggcggaagcgaagccctggcccagcggaccagtggtcatttcgatgcccggggtcagaccatattccgggtgacccggggtacgggtgtcagcaccgccgcggaagttcttcaggtcatccagagtcaggccgtagccggagaagtacagctggacgtactgggtgagggaagcatgaccgccagaaaggatgaagcggtcgcgaccttcccaattgggatcgttcggatcatgcttgatgaaatgctggtacagagtgtaggcgataggcgccagggagacgggggaacccgggtggccgtgtcccgcacgctcaaccgcgtcggccgacaggaccttggccatcttgatggcgcgctcgtccagctcggtctccttgaattcggtcatggattactttccttccaattggtcgggccgcgtatccggcttgtgccgagcgctcgacgccctcacattgcgttttccatagtagcgatgtgaggtgacgttgtggtggatttttggcgtgttttggtagtttgtgttctgttaacgctcacagttaacattctcgtgcgattgctctgttcgattggtggtatgacgagcatttcgggagattgctatcgggaaaaacgagaaacgagtattctggaagcgaacgtattagcactcgcgcctcgcgagtgctaatacaatgggagaagtatttacggaagacggtttctcctaatatcgcagatattccgaaaaccggctcccgctgaatcgtatcgtgtatacataaagaggaggcacgcatgacgcagtcaagacgtatgttggtgctgcgtgccgtcgtcgaggactatattcgctcgcaggagccagtcggttcgaccaccttgaccaaagatcatgatctgggcgtcagctcggccaccgtccgtaatgatatggccgccttggaagatgagggatatcttattcaaccccatacgtcggcagggcgcataccaacggaaaaagggtaccgatacttcgtggaccgcttggccacagtggtgccgatgtctgaagcgcaacgccgtggcatcaacagttttctgtcgggatccgtcaatctgcaggacaccttgcagcgcgcagcccgccttctggcacagatcaccggtcaggtcgcggttgtggcggccccgtcgttggcgaaatcgacattacggcatatcgaaatcgttcccgtatcaatcaacaccctgttggccgtcgtcatcactgacaccggccgagtggcgcaacatatactcaacgtttccgagttgccggacaccacagtgctgtcgcatctggtcaacgaaatcaacgcgcagtgtgccagcgtttctttgacacgaaccgcggactatgtcaggcagatgtcatcccgcaaggaataccgccccatcagcaaactagcggaaacgcttgctcaagctttcgatggcatggccgacgacgagcgcgcgagcgaactctatatggcaggaacctcacgactcgcgcaccagcgtgccgtggccgatcttgcaccattgttcgatgcgctggaagagcaagtcgtgctcatgaaactcatgagcacgttgagcgaaaccacgcaatccgatggagtcggagtggccatcggctccgaaacgcacacgcccggtctgctgcatgcatccgtggtgaccagcgggtacggtcgaacctcggcaaccgctgacgacgtaacaaaaggcgagactgcggaggagcaggggagagagacaagcaatcacaccactgcagcgcaggattccaccgagcccatcgccttcgtcggatccataggaccgacgcatatggactatgcggcgaccatggcagcagtgcgtgccgttgccagatatctgaccgcattcgtggctcacgacgaaaaccaaaacaacagctgaccccgccttatggcacaatgacacgcgaaaagcaatagggagaaagaacaaccgtgacggactattacgaagtgctgggcgtagaccgctccgcaagcgacgacgagatcaaaaaagcttatcgaaagatgagccgcaaatatcatcccgatatcgcaggtccggaattcgaagacaaattcaaggaagtcaataacgcctacgaagtgttgtccgatccacagaagcgtcagatgttcgacgccggcgtggacccgaacgatccgaacgccggcggcatgcatggcggattcagcggcggattcggcgacatgggtgacattttcaacatgttcaccggaggtgctttcggcggtggcaacggcggtccgacccctcgtacacagccgggacgcgatgcactggccacagtgaccatcgacttgaagactgcggtgttcggcgacaccgcacatgttgaaatcaaaacgttcggtctgtgccaggaatgcgccggcaccggctgccagaaaggtacccagccggcacagtgccccgactgccatggtcagggctacgcacagcgcgtggtgcgcaccatgcttggccagatgatgaccaccgctccatgcgagcgttgcgagggacatggtaccgttatcgaaaatccgtgtccgtcctgccttggtcatggtcgtgtgcgtatctcccgtaatgtcggcgtgtccgtgcctgccggcgtgacgaacaatacccgtctgcgtctcgctaatcagggcgaggtgggtgaaaacggcggtgttgccggcgacctgtatgtcgacatccgcatcgctcaggatgacaccttcactcgtgacggtgatgatttgcactgctggatccaagtgccgatgagctgggccgtactggggcatgatctggaaatcgacacgttcgatggcaagcagtctgtgagagtgcctgcaggaagccagcctgacgacactgtgaccttgaagaatctgggcgtcacgcatcttaacaacaagagcgagcgtggcgatctggtggcgcatatcgcagtgaagattccgacaaagctcactgacgacgagcgtgccttgatggaacggtttgccgaaaagcatgacacagatgcccaacatgttgcggtaagcgcacgcccgacttccggaacgaagaagggcttcttctccaagctgaaggatgcactgcgctgaatttccctatcctcatgtcgtacatccgatgagaaaacgttagatcgcatatcaaatagccggttgcttcaaaaacgaagcgaccggctattttgtcaatgtttctgctgtagcaagcggattgcctcacgcctacaacagccaatcattaggcatatctacgtgtttatttgagcaatgaccggcacatagcgcgatactggttcacatagccaccgccgaagaacacgcagtggcctgcgatggggtagagctgccacaatgtggtgcgctcctgccatcctgctttcagcggatgtacggactggtatccgtcgagaatgtcccgcaagtacgacatgccgaataggtcaagcatggcgagatcctcttcacgatgcccgccgtgcgcggctgggtcgatcagcaccgcttccacggatccggaatcggccgaccacatgacattgccgctccacagatcgccgtgcactcgtgctggcttgtcattggccgccttgcccagtatttcaggcaacgcttcaatgacggcctcagtcagttccatatcgtaatcagtgagttcacggcgcttcataccaagctgtaccatcggacggagcctgccttcggccaaatatgtcgccacatcatcccattcgcctgcgtccatgggaacgggatcctgcaaggggccgaaataacaagttcccgtatatccggctggggcagatccaaagtaatcggctccggcatcatgcatacgcgcgagagcagcgccgaaatcatgcgcggcctgcaaagtcggaccacaggcgttcactcgttcaatgttgagataatccttgccccagtcgtacacgtctaccacacgtggtccgcctttggattgcgcttcgccaagccactgcaggccacggccctcgcattcgaagaaaccttcaggactgaatgccctgctcttgcgatatttgctcatgctgcccgacctttccttgcatgatccgccacatttgcgagaccttatggaatcgttagtgaagctccgatgggttttggcaccattgtgtgcatggtttgagacaactcaaggatccatagcgaaaaattagacccctctcgctagtcttggatgcggaaaagcagacgaaaccattgatacatataaaagagggttcatgaatttcttccaagcgattttccttggtctggtgcaggcattgaccgagtacctgccagtttcttccagcgcgcatattcgcattatcggcgatttgatgctgggatccgatccgggcgccgcgttcaccgcaatcatccagatcggcaccgagcttgccgtgattttgtatttccgacatgacatcatccgcattcttggggcatggttcggctccctgttcggcaaagaaggcaaggatttcaaaagccgtatgggagcgcacaatccagacacgcagatgggctggttcatcatcctcggcacgatgccgattctgattgccggcctgctgttcaagcatgcgatcgaagggtcactgcgtaatctgtggatcaccgtcaccgtacttgcattgttcggcgtgctgctgtgggtggtcgacgcccgttccaagcaggtcaagaccatgaaggaaatgacctggaaggatgcgctgatcttcggcatcggccagatgctcgcattgattcccggcgtttcccgttctgggggcaccatcacctttggacgcgccatgggatacacccgtgaggcagccgttcgagtgagcttcctcatggctattcctgccgtgttcggcgcaggcattctggaagccgtatcggccgtcaaggacgttgccgcgggggatgccggtatgttccccggctggggtcctaccatcgccgcagccatcgtggcatttgtggtcggctacgtggtgatcatcggcttcctgaagtttgtttccaccttctcgtacaaggcattcgccatctaccgcatcggcttggcgatcgtcgtggcattgctgctgattaccggcgtgctttcgccgctggaagccgcagctgcagcgtgaatctaattcgataatcgaataacaaaaaagtcgggccgatcatcctgcgatggtcggcccgacttatatattcactgcttattgccaatcacaacttaattgccacgcaagaacgattcagcctcacgaatcagctcttcgcaagcgggcatgccattcgacgcgatacgttgcgcttgagcgttcaaatcgtagtcgcgttccagacaggcaagataatcgccggcatgcgtctgctcgacaatctcgtcggcagccttgcgccattcggcggcttttctgttcaaatcaccttcagtcagcggatgctcaagtaaaagagacaatgcgcgaaccaattccagcgtgccctgcaagcactcggtattcgcacagtaatggggtacggacacccacatggatgtggtatgaaatcctgcgtccgccgcaaatgcgtcaagaatgttggggatgcccacagggccgttatattccttgtcgggttcgctttcgcagtcatttttggaaatgtcaagcggcaaaggcctggtgtgggggcaatcgtcgaacatggatccaagcgtgacgataccgctcacatcgtagtcttctgcgatgcgcaacgtctgcctgcagtattcctcccaacgataatttggctcgggggcgatctgagcgagaaaatgcagcgagggggagactgcaatgtcatagaacgtggtctgtggccagatgattcgtttacgaccttgtaccgagcaaatcatcggacgggctacctgatagtcgtagaaaccctcattgtcgatatgatgcacctcctgtgaatcatatcgcgacacaagatgccgtatgacgttcgtcgcagcctggcaggcgtcattccacccctcaaacgcggagatcattattgtctcgcgttttttcgtctcctcacacatgctttaaatgtataacgaaatcatatttccgcaaacacgcttccgccatcggtgaatgtgacgagcagggcatcccgatctagacaacggcatctcaaaatacccgaatgtcaagaaagctcaaaacctttttcggtagataaaagccctttgaaaacagcaaaacacgaacacgacacgcggacttgcaaattttgagaatgcggatatagtagatactcgtgctcaggcagtagtactgcggagaacatgcggacatagcttagttggtaaagcgcaaccttgccaaggttgagaccgcgggttcgagtcccgttgtccgctctaaggttccgattgattatcgacctttagggtgggttagccaagcggttaggcagcggcctgcaaagccgtatagacgagttcgactctcgtacccacctcttgttgtgcttgacgtgtgcgagtgcgacgcatgacccgggcggttggcgcagaggtagcgcacttccctgacacggaaggggtcacaagttcgaatcttgtatcgcccactggaacgtgagttcctatataacccatcatcgggtgattggcgcagcggctagcgcacttccttcacacggaaggggtcataggttcgattcctatatcacccaccatcgggcggcatgtcgtgccgccttttttgttggtttcgttggttttccgccgtttcgtgcggcatgtcggaaacgggtggcgcgtggtgttgggtttgggcgccatagcgattcatggcgcctatacttccaggcaacgcaacatcaatcaaaaagtcgagcaggatctcagaggtaagctgggactgccggccacaggcgaaatctattacgtgcaggatcgtccgttgtatcaggagtacgagaatctcgttctgaccacctacgacaaatggttcggataccatccatgatggaacgattttcgacaaggccaacgttcctgcaacagaggagggcggtgattatgttcaccagtatatggtgattttgactgactacaaagaatcggttgatattggatggtatcaaatgtcttccagcaccgatgaacctgatgatctcgttcaggcaggcatcgacgaattccagaattatgagaaccagttcctgaaggatgaggatcttgtacggcctattttgatgctgttgtaaggcatgagttgtctcacagggaaatctgggcgcgctgcggaaccgcgggtccgcctgtcgcgggcaacttgattggagctgcaaccaactcctatgcagtgaaatacatgggtgcggataaatcccagatcgagtccacgcagggagaagactataagatgacgcagcagagcgacgcggtggccgaggccattcactccggcgatgctcctaattcaagaagagccgtctgcaacaaggcattgcgggaaatgatcgacgagcagcgctgaaatcaatccccgcgaatataacttcgaatacagttttaagtccggaatacacactatccgggctttttccgtgttctttcaaggtgtatggctacaatggcagcttgtgagtgacgaagcattgaatctcaatcagccggtcaaagacatggggccgaacgagttgaaggcttatgccaggctcggcaaacagcagcatgacgaggcgaatcgtgagctggaacgccgttggcgcagctatgatgacatgttgccaaacgaccagttcgtgtcaattatcgacaagactgagggataagacccactttacggtgtatgattcgtgaccatgccggtctcaataccggctatttgcaagggtaatgactagaatggcgactatgactgatccgattccaagcgcaggtgaaacgaccatcattggccttcctgcaataaccgtaccggtgacttccaccggagaccgtcctctgacgaaagaggaccttgaaaccatcatgcgtcttgccgatggcacggcattgctgatctcgactaggggagcggtgtcggggtcgcggtatcttcttgacgaggatgagattaccgtcggccgtgatccaagagcggacattcttttggatgattccacggtttcccgcgcccatgcggtgttccgcaggtctgacggcaggtattccgttattgatgcgggcagcttgaacggcacctatgtgaaccgccagcgtgttgatcagcaggagctcaagaatggcgatgagattattcttggcaagttccgtctggtttatttcgacaataaagccgtcattgccggttgatccacgttatgcgggatagactgtgtacaacagcttcgcgcccatgagcttcgcacgaatgctcatgggcgttattgtagatgtcgtaggagagcgtgatgaacgaagcagagccaacaacgcggttgcgtctgcatgtgtcgactgcggtgcagggggagttattccccgcgaccggcactcagccggtgacgcgcggctacaagggtacggtggcttcaaaagtagcaggcatcacttatcgtcaacttgactattgggctcgcagacaaatcgtggaaccttccatcacgccgtcgcatggatccggttcgcgcaggctgtactcgttcaaggacgtggtgatccttgctgtgtcgaaaagactgcttgacgcgggcatcaatctgcaaaatgtgacgactgccatcagttttctgacgcagcgtaccgcggaacaacttgagaatatcacgattatgtgcgacggtcagcaagtgcacgaatgtacggatagtgagcaaatggtggcgttgttgcaaagcggtcgggcggtattcggcgtatcggtgggatctttatggaagcagatcagagagactcttgcccacgaggaatacgtcgatctgaccaccatgccttccatgatgggtggaaaccgacctgttgacgatatcactgcaatgcgcatgagaaagaacttcgaggcgcaacatcagacacgcgccgccgcgtcactgtaacataccagaatgcatgccgtatggttgatgcggactaagacggatgtacgagtcgttgatatgagatagatatgtacagacagacatacaacaggggagcaatacatgtttgatattctgccggcattgctgtggattgtcgcagcggtcatatcgttgaacatttgttcgattactgcaattcgaggaaatatcttctcaaaaaccaagagtgacgtatatccggtacgctggtcaattgtcggattgcatttcacatcgctgatcatcggagctctgccgtatccgatatatacgatgttcaaacccagcttttccttgaaatttcagcatttctacgaacaggttggttggccgtcggcagcactgatggttatgctcatcgccacggaactggtgtttatgtatctgcaggcccgaaacggcatgaaaagcgaaatggaaagaaaactcagccaagccattaaggactagccaaaagacatccatcgaagcgaaaacgcagccgtgtggaaaaacgtccagcgaagcgaggacgcaccatccatcatgccggtgggttatgtcgagcaaagtcccgaaagggacgtgctggcataacccaccgatgttatgtacagaaaagagcgtcagtcgaaaactgctgtagcttttctgacataacgtacattatcggacaaaagtgggagcaggtgcagggggtatttgagatgtacgcgatctctcaaaaccccaggtatgcaaatgtcatcgctggcatgcatacccaggggtttctttgtctttatgcacaagatgatccgctcgtgcatcagccgttatctatcaggcgaaatagtcttcgatggtttgcgcaagctcactaaccgaatcgatcaccttatacgcgccatgttctttcagctcgccaggctcggcataaccccagccgcatcccaagcaatccagaccgcacgctttggctccgtcagcatcggtccaacggtcaccgaccatgagcgccttatcgccagcggcttcgtcaaacccaatgtggtcgaacgcccattgaataacctgatctttgtcgagacgcgaattatcttcgctggcaccgtaaatgccgttgaccatggtgtccaaatggaaatgctcgcaaatcggaatgcactgatactgcggcttgcagcttgcgatcgccaagtagtatccgtcagcacgcagtttggccaactgttctgggataccgtcataaatggtattgttcaaacggcccggaaccttttgacccggattattcggatcatcgaacaccgcttcctgcgcataatacctgcggtagatggcaatgccctcatcgagtaagtcgtccggaatattattgcgctgcaacgactcgacaattgcaggaccaatgaatcgctgcaactcctcatcatcaggcactggataccccagttcctcaaataccttcaccacacaaccaatgatgcccggatcagacttggtcaatgtgccgtcaaggtcaagcagaacgactttcttgggttgcttggtcttctcggacatgagattaatgcactccttgttaaatgctcgatgcaatgtgaactgttcagttaacaattatgcccggtcttactgaccgggcatgcagttcaagtgtcgttcaactactggttactcgtagtctggaaaccagccgtcgcgatgcatctgcagacgcttttcaagcaacgtcttcagctcgtcttcagtacggcgttccaatagcatgtcccagtgtgtacgggtcggcttggaaatctcgtcggcctcacgatcctcgtcgccttcacgatgcgcggtcatgccgcaccggcactcccattcctccggaacctccgcgccttcagcgaacggcagaatcgtgcggtgtccctttgggcacacatatgcgacgtcgtttcgcgccgcgaaatccacattgtcatcagattccaacgactttgcgccgatgctcatgcctcgcaggctgcgttctgccatattgcctttgcctccttggattgtctgctctgtctaagctacagaacagttcggattgtcttttattccttattcgtctgcttgatgttcgattttagtcgacgccggagtatgcgacgatgccacgattgatgcgatcgtacgcctgttttgcgactggcgccaacgtttcggcacgatccgcaagatacggtccagccacggctatctgctgaagcacgtcggcaagccgtttgccgttacgcacgaaatcgccgcccgtcagatcggtgccgtacagcacctgcgacaggctttcaccttgcgcccaatcgtagacgatatcggtgatgccaaaatcgagttggcgaggctcctcaagcatgtgatcctcacataacatggcaatcgacgcatggacgcccttaagctgcgctgcgcacacggcgacgttcccttgaatgcctccagggtaacgacgcggctctcccccgcctcccctgcgggcttcgaacaccaacgatgcgacgacgctggccaattcacaggcgttcaacccgtcaaatgcgccatcgtcaatcgcctgcgccaatactagatcaagctcgctgtacaaatgccgcaacagctggccacgttccgtgagctgataatcaccatggcccgcggattcccgtaccggctgaagatagccgagattggaaagcacagcgcaaatatgatcaaactgacgtgccacggaaccggttcgcgaatcgtaacgatgctgtacccgttccaactcgcgcatctcacgagcccaacgatgtccccatttcaagtgcttctgcacatcagggcatttacggcatggatggtcgcggtcttcttctctgagtttcttgatgcgtttgtcaagatccataaacgcctggctgcgttccttctgcgtacggaacacctcatgcttgagtttgcgacgttcgttcttctccaaatcactcaaacgcatccgcaaacgcatgaattttttgaaatcgccgaattcacactggaaagcctgctcgtatccttccagagccttgcataaggtttccatctgtgcttcaagctgccatgccgactcgttggcttcccattgcgcaaaggagtggtcaagcgtaacgcgagctgtttcatagtcgctggaattcaatagattgacagccatattgaaggtcggtctgaagcttgagtgaagcggatacactcgtttgctggacaaggcggccgcagtggcgggaacaaaaccatggtggtccaccacaacggcatgtccgatggtgtcgatgccacgtcgtcccgcacgaccggtcaactgggtaaactcgccgggagtcaacccaacatgcccggtgccgtcgaatttctcaagcttttcaaccaccacacaccgtgcgggcatgttaatgcccaaagccagcgtttccgtggcgaagaccattttaaccaagccttcttcaaacaagcgttcgacaatctggcggaacaatgcgaccattcccgcatgatgcggagcgaacccttcttccagggcgaaacgaaattgcgagaaatgcagcgctttcaagtcttcttggctcaactggccttcgaccatctcatcgacgatccgtctgatttgttgcacttcgtcgctggtggtgagttccaagcctgcgttgatgcattggtcaaccgcttgatcgcaaccgtttcttgaaaaaatgaagtagattcccggcagcatgtcaagaaaattcaactcgtccacaaccgcccagcgtcgaggcgtatggcgttcgaccttatgcgggcgatcgtcccatcgtccacctttacctttggccctacgcttatcaggacgtcgctcgcccttgcgccgttccgcctgacgatcaagctgatcaagtctgtttatcagctgcgcattgagtttgaccgtctgttcgccattggcgtcacgccgatataggtcgatgagttctggttcggtatggtcatctgcctgtacgagcacgtgctgctccaacggtaccggacgctgttccgacatgaccaacgtggttttgccacgaacagattcgatccattcggaaaaatcctcgacattggaaaccgtcgcggaaagacctatgatgttcacgtttttcggcaagtggataatgacttcttcccagaccggccctcggaaacggtcagcaagatagtgcacttcgtcaaggatcacataacgaagcgcttcaagcgtcacggaatgctcatacagcatattgcgcaacacttccgtggtcatgaccacaatatccgcctcagagttgatggacgtgtctccggtcagcaatccgaccttatccgttccatactggtcgaccagatcatggtatttctggttgctcagcgctttgatcggcgtggtataaaaggctttgacattccgcgtctgcgccagatagatggcgaaatcggctgcgacagtcttgcctgctcccgtaggagctgccacgagcacattatcgccagcctccaacgcatcgttggcttgcatctggaattcgtcaagctcgaatggcatggatcttgcgaattcggccgcaaccgtgcgctgcttggcctgcgtttgtttgaatgcggcataccgttgcgcgggagacaactccacggtctcattgattttcgacgggtcaataccgttattacggcgacgatgatgggtcataattccttaatatggttgggtcaatcgttacaatgacgccattgtgcccactgttgagcatgacggcttcgcttcgcttcatgcctctcaatgactccggcatgggcatccgcataacgatctgcagcatcctttaaaggtctggtaaagaaaggcgcttcattctcgttgttttggggcaatggtttgcccatcgcctcgattcgttttgccgtccgttcacccagcttcgccacgtccttgaatgctcgatagccgtgtaaacatgcgtagacgactccggaaacaaccattgcaagcatgaacagagcgagcaacagccaaatccaccaaggcatagtctctcccccgtcagccttcattctcacgatcgccaatgctcagctcatgctgggcacgggcgacaatcatggtacgcaacgtttcgggagctacggcagtgatatgccgtgcgtgggaaatacagaatgcgacataccaggaatcggacgagacgatcagatgcaccttctcgccctctccgcacttctcgactgttgctcccgacagcccgtcaataaatgacagatcatcctgattggtgacgaacacagctggagttccattatcgaagctccatttgcgcaattcggatgcgggaacgtcgggaatgtcgattttcgcggtaggttcaaccagttcggccttttcaatgcgggaaatgcgaagcacctgccagatgcgaggctttcctgtggccttgttgatcgtggtgtctttcttcacgtacttagctttgtcagccggtgcagcggcagcgacgtcagtccatacggcaacgtagaagactccctcatcgacgaagatcttatctggcgcgacaagcttacgctgggtccttccggcgccatccgtatattccatgtcaagcagcaagctcttggagatcgcgctcttcacaatggagaaattacgcggttccatctcataaccggtcagactcagccaaggcatgtcccccggctcaacatgttgacgaagacggctgtacaacgattcagcctgttcacgcaacttgtccggcagcaacgacgaatgcgcaagatagctcaccgatgcggtaagcatgctcaaatactgctgggagatacctgccaagcgttccagcccaagcgaattcgtggcggaaacaatgccttcagcgtcaagcaacgaccagtcgatgtcaaagaactggcttcctgccatctcaccatcgtcggaaaccgtagtcagcgtgttgatgtctttatgaatgacattgacgaacttcttcagctcgtcatcggacttcggtttgccaatgaaacgttccgcaagttcctcaagcgaatattcttcgccgaggtgcgccgaaaggaacagcatcagacgcagacgacggtcgacttcactgcccgtctggaatgcggaattcttcttcggacgccccttgcactcctctgcatcgtcgtcagcgctgttgcggttgatttccatggctgtgacagtggagctatcgcctcctgtggattcgtcggcaggcacgaactgcgtggcggcattcaaacggcggttgaacgcgtcgacagcctcctgaggactgacgatggaagcacccggatgagaaagcacgaacatggccagatcatcggaatcggtgtaggcgacgttcaaatgctcgccgtcaacatctacagtcgccgcgaaacgacgctggtcaacgaccttgaccaattcgtcgggaatggattgcgttcccagacccggagcgatggaatcaagaccaagccctggagtcggagtctgagggacgcgaggcgcggtacgggacgtatgctgcgtctcatgtgcgggagctgaggaaatcgacatggaacgggccagatagttggccgcggcaagaatcggcaaatcctcgtcgccgaacagcagacgaacgcgaggctcatctccaagctgcagacgataggatgcgaaatcctggccttccgacttagatgaatactcaggctgcctcgattcgatggcgatgcccatggccgcaagcttggcacggtcacgctggaattgcttggcaaaagccgccttcgccgcctgatcagccagctccccataggaatcggcatacgccttcacacgctgggcaatctgacgggaagtgagccattgcgggaaagctgaggaaagcacagccaatacatcaagttcgtgcttgccccatttgtcggagaaacgacgccttccgttactgccctctgccattagtcctcacgtctcgttaacgtttcatcttaagtgcctagccggttcaggctctgcacacacctctctatgatagagggttttcgttcagattgtgtctattttacgaaaaaatacagtttttcgtgttgaggctacccctcgaatcagacccaatcatcaggctcaacaccttgcgggccaacgtattcgccattcggaacataactcggctcacttgtgtcggtcagccgcgcgtcaccgaacagtatcacgtccctgccgaaggtccagtcaccatcgatgtcgacggaattggccgcggcaagcgacggaacgccataagggaatctcgtatcgaaatcatggatgttcttgtaataccgcgcatccaagtgaacatccgggaagacgtaattgccatcttccatctcgtactggtccgtcagatggaatcgatcggatcgcatgataaacaaatcgtcggtggttttcaccggcaggaaacgcatacggtcaacgcatacgcaggtagccccgtcgaacaacgtcaccgccgctcccatggctgtttccagctggatgaccggctcgctcgtcggatcggtcggatcgacggtcttgttattgcgaatcaccggaagaggaagcacgccatcatatgcggacagcttggccttcagagcgtcgatacgcacccagatgctgttcgtgttaaaatacggatgcttttcgatgttctgcgcatcatccttatcgtccggatgcacctggctcatctcacgcaacatcaagcggccggtcgccttgtcccgcacgatatgcccgcccttgcgatcagctggagtacgttttgcgacctcgatcatgaatggcgcaccggtattttcgaagtgctgcgccagcgtgcgcgaaggacgtgcgccgagattgtcggaattcgagatgaacaggtatttgaagcccttctcctcgaggacgtccaataggccggattcccaaatggtggagaacaggtcgccatggcctggcgggcaccattcaagttccggatttgccgggaagctgacaggaagaccggtttccgcaccgattttcggttcctgatgctgcacgatttccagaggaatgtcctcttgatggaactttttgttggcacgcagcaccttcatggtgtcattcgacgtgcggaaggagttcatcaacgtcaatggcagttccacacccagacgagtgcgtgcagtcagcacctgaccgatgatgatgtcgatgaagcgcatctgacgtgccttatggcgacgcactggcagcaaggacttggcgcaatccaagcccatggacgtgccgaggccaccattaagtttgaggaacgcggttttggcaaaagcatcgacggctttgtcatggttgatggtctcgtagacatcatggaagctaggcactcccaccagaggctcaacatcatcctcacggatccatgtgcttgcttcctcactgcgccaaacctcgtacagtcgtttgaattgcgcaatggccatatcggtcatcccgttgtcccgcatctttgcggcggaatgttcaaatgcgtcctcagtcaatgtctttccctttcgtgcgggcgtcctgttctcatcgtacctaggcaatactacgacaaaattcccatgacgggggcttttggtggcaaaaagggaaaattcttgacaaaaatgacatcccaagaactcttttatcatgtttcgcgaatcgtgcgacacgatgaatttgaaaaatagagcaggttgtgctatgtttcatgttcggtgctttttgcatcgttcggaccatagcgcagtttggtagcgcacttgactgggggtcaaggggtcgcgggttcaaatcccgctggtccgaccagaaaaacccgaattcatgcgatttcgggttttctttttaggatgtcagtcttacgcatgcaggtaaggggtgattgtcttgaagtcgatggacgcccagccacagtttgacgacgttgacggctttgcccacgtgtttgactcatccgagcttgaggatgagtggaagatacgtctgtcccgggaacttggcgtagcggccagggagcgggcgaagcatgatggcatcacccttaccgaactgacgcgcaaggcgcttgaatgcgacgatctgaatgagaccacggacaccgtccgccctggacgaagaccgaagaacaccgacggtcgagaacagctcggagacgaatggaaaatcaaactcccctatgccatcggcaagatggcacgggagcgcgcgtccgaggaaggcatatccttgagttcgctcgcgcggcgtgcgatcagcggatatctacgtcaacgggatactgaggaacagccgctgttttaagcatgtgacaatgagtcacgcatgattggcgtgcactgatctagcaaatatggatggtggccgcacacccaaggaatggtgtgcggccaccatccatagaaacttacttgcgtttcttcttctctcgaatattcaccgaaatctgaatcggggaaccttcaaaaccgaattcctcgcgcaggcaacgttcgatgtatcggcggtaaccatgctcaaggaagccggtagcgaaaatcacgaaacgcggtggacgcgtcgaagcctgcgtcgcgaacaagatacgcggctgcttgcctccacgcagtggatgcggatgggcggcttggattttacccaagaacgcattgagcttaccggtcggaatacgcttgtcccatgattccagcgctccacgcatggctctggccagacggttcgtatgccatccggttttagccgacagattcacgcgctgagcccacgttacacggtcgaattctgtcttccacaagcgttccattcgctgacggtcgaaatcatccatcaaatcccacttgttgaacaccaaaacgatgcatcgaccggcgtccactgcttggctcatcaccttcaaatcctgatcggaaatcggttgggaagcatcaaacagcaccagcgcaagttccgaacgctcaatcgcggcctgggtacgcaaggatgagaaatattcggcaccagacagcttatgcaggcgacgcttgatgcctgcagtgtcgatgaacagccaatcctccccatcaaccgtcaccacttcatcgactggatcgcgagtggtacctgccaaatcattgaccacagtacgttcctcgtgagccagctgattcagcaaagacgacttgccgacgttcggtcgaccgaccaacgccacacggcgcaaatgggacggagtaaggaaaccggatgttttctcagccttcttcaacgaatccaaggcagcgtcaagcagttcgccaataccgcgaccgtgcatggcggaaatgccatacggctcccccaagcccatcttccagaattcagcggtcaaatattcgctctcacgatcatcaaccttgttcaccgccagcgtgaccggcttgccggaggcgcgcagcatcttgacaatgcgctcgtcggtgttggtaagaccaacctggccatccaccacaagcaccacagcgtctgcaagctgaacggcgatctgcgcctgggatgcgatggcggattcgataccttcgacgtcggcttcccagccaccggtatcaaccagcttgaaatcggtgccggcccattcggcatcgtagctcacacggtctcgagtcacgccgggagtgtcttccaccacagcagcgcgacggccgagaatacggttcaccagcgtggacttgccgacattagggcgcccaacgacggcaagcacgccaaccggcttcgggccggaccggcgttcgccgccaacgaacgacgatccatcgatcagtccttcatcgccctcatccaactcataatcgtcaagattggaagcgtactggcgatactgctgctcttcgatggcatcgtcgacaatgcgcacaagcacatcaagcgtttcgccgaaattcaaatcggaattatcgacggtcagcacgccttccgcggcagatgtgaaattcgtgaccttggaatcagctgcatctcgcgccgcaacattttctgatccgacaccatcagttgactgaccggaacgacgagcctgtcgcacctcttcacgggcggtgagcaacacacgcacttcagcatccggcgcaacaaccgtagtgatgtcacggccttcggcgaccactccggcaccctcagaaaaagagtcagacgcagcttcgcgtgcgatgtacgcgcgttgagcggcaatcagcacgtgacggacgggaatgatgttcgacaccttggacacatgggatgacacttcggaggaacgaataacgtcgctgatgtcttcgccgtcggcatataccttcgaatcgtctggatcgacgctgatgtcgaaatgaccttcggtaaagaactctcccacggtttcggtgaccagttgttcatcgatcgtctccgcgtcaaggtcaatgcccttgttcatgcaccaccatgcgcaggcacgatacatggcaccggtatcgaggtaagcgaaaccgtaatatttggccaacgccttggatgtggaagacttgccgacacccgcaggtccatcaatcgctacacgaatcacaggcccaccgccttggacagggaacgcacctcggtctgcgaaagcacacggtacgatccggatttcagatcgccaagcttaatcgggccgatctgggtgcgtaccagacgcttgaccgggaatccgatcgaaccgaaaatgcgacggacgatacggttcttgccggaatgcagcacaaccttgaccagcgtgctgtcgcggctggcatcaagaatcgcgcaacggtcgagcttgatccaaccatcgtcgagctgcacgcctgtagtgaccagtcggcggcacacctgaccgctgatgcgaccttccaacgtggcgatgtaggtcttctcaacctcgtacttggggtgcatgacgtgctggctgagctcgccatcgttcgtcatgagaatcaggccttcggaatcataatccagacggcccatgtggaaaatacggtcatacttgtcgccgacgatatcgctcagggtgtagcgtcccttcggatcctccatggcgctcagcacacgcttcggcttgttcaaagcgagcgtgacatgattgggattcacgcgaacacgggagccgtccacacggacttcctgatgtttcggatcgacgcgagtgcccaattcggtaacaagctcgccgtcgatttcgacacgtccttcagtaatgatctcttcacatttgcgacgggatccgaatcctgcctgagcaagaagcttctgcagacggataccttcattatcgtgtgtgtgcgccttcgcggcgcgggaatatgcgtttggcatcgttctcccaacgtggccggataatacttatagggactgctggtactatggcagtcgtttggcgatttcccaaaatcgcaacttgtccactatatgacagaggaaagactatgactgctgttgaagcaacgcccataaccaaggaagaacaaagcaagccgttgacacttcgtgtcggagcggaacttgtgggaagcttcatcatttgcttcgcgatttatgcgatctgctcgcttggttccgcggtgtatggcattaacatggcgttcatcgccctgttgacgggcatcgtatacgccgccgtcaccgtaatcttcggttccatttccggagcacagttcaatccggccgtatccgtcgccgccatgctcactggcaaaacccacgtgcttgatggcattctgtacatcattgcccaagtgctcggcggtatcggcgcgggtgccgctatccggttccttctgccgacttccgagcaggtgacattcaagatctggatgacaccaacggtcaacggtttcgataagaattccgtctcctactccaccctcggcaattatggagtgaccctcggcatcactctggccatcgccgttgaagtcgtcgcaggtatcattatcgttgcctccgcactgcgcaccacggacggacacggcgagtccaaaacaaaccacgccgttgccatgggccttgcctacggcatcggcaccgctatcacctatccggtgaccggagccgcactgaatccggcacgtgccacgggcattgccattttcgcacagaatcaaggactgaatgaagagccgctgcaacagctgtgggtcttctggatttgccctgttcttgccgctgcagttgttgctctcgtcgtcatcgtcgccggcatgattggtacgaagaagaacgtgccggatactgtcgagacaatcgataaggtcgaaggcaataccgttcttggcgaagcgtcagttgccgacgggaacgatggtgagcaggatgaacagtcctacgcccaagccaatgccgatgaaagcgtcgaaagcaactgaccgaaccttccatggactgcgctcacgcaatgccagtctgaccagtccagtcgctatggccgtcaccgcaatcgcagcggtggcggcttttgtatatcctgcgaccgcaagcaccgtcgcaacaatcactaccgcggcgacgatccattcgaaccacggtttgccctcatgatcttcggaaacgtaaggatggctcattccggggcctttcatcttgcttgctgtacaacaaccgtaatcataataaaacgtggcgtccgaaaccaatacggaatcggacgccacgttgaccaataccctcacatgagaggcggcgtatcagtggaagaagtgacgggtgccggtcacatacatggtgacgccggccttacgagccgcttcgaacacttcctcgtcgcgaatggaaccgcccggctgaacgatagccttaacgcctgcattgatgagaatttccgcaccatccgcgaatgggaagaacgcgtcggatgcagcgacagcgcccttggtgcggtttgcgccatcagccagcgtgttggcgcgttcgacggacaggttcgcggaatcgacacgattcacctgacccatgccaatgccaacagtggcctgatcgtgggcgatcaggatagcgttcgacttgacacagcggatggcccgccaagcgaaaaccagatccttgacggtctgctcatcagcaggctcgccggaaaccagtttccaagcgttcggatcgtcgcccggagcatcgataagatccgtggactgcaccaacagaccgccgtcgatctgacggaactgcgtcttggacttcggcggctcggaaaccttcagaatgcgtaggttctttttcttggtctgcagcagttcgagagcgtcggcatcatagtcgggagcaacaatcacctcggtgaaaatcgggcggacgctttccgccatttccatggtgaccttgctgttcgcggcgatcacaccgccataggcgctcatcggatcacaggcatgtgccttcttgtgcgcttccgcaacagtggcgccaacggcgaggccgcacggattgttgtgcttgaccacggcgacggcaatctggggagcaaaatcccatacggcacgccaagcagcatcagcatcaacatagttgttgtagctcatcggcttgccaccgagctgttcggcatgcgcgaaaccatcctggttcagcggatccagatacagcgcggcctgctggtggggattctcaccgtaacgcagcacgtgggcacggtcccaagtacgagtgaatgcggccgggaacttggtctcattcacttccggctcgtcttcggcggttggctgctcaacggtcaaaggcttcggccagtgctttgcagtccactcgttaatggtggcatcgtaggcggcagtatgggcgaacgccttgccggccagccaacgacgttcttcgagagagaagccctctccgttttcgatgcgcgcagctaccagtgcgtaatcgttcggatcggtgatgatggccacagtggcgctgttcttggccgcaccgcgaaccatggacggaccaccgatgtcgatcttctcgatggtggcagcctcatccgcgccagaacgaaccgtatcggcgaatggatacaggttgacgaccaccagatcgaacggcttgatgccgaacttttccagctgtgccgcgtggtcctcattggtcatgtcagcgagaatgcccgcgtggatatgcgggtcgagggttttgacgcgaccgtcaaggcactccggaaagccggttacttccgagacttccgtcaccttgacgccaagttccgcaagacgcttcgcagtggaaccagtggaaaccacttcagtgccggccttgatgaacgcttcggcaagaacctcgatgccttccttatggaagaccgataccagagctcgccgtatcggtcgattcgttgttgtcaccctgatcctccttgttattgatggttgaggtcactgtgcgggccgcatttgcgacctcacgattatctgattcaagagccgcagtggatgcaccactcctgctctcgcggacacgctttactatccagcgtattccaaaaaacatggatacggccaccaaagtcagcagccatgacgaaaacagtcccacggcagtaggctgtccaatcttacgggtcgatgaaatcacgtcgacgccgatgtgcgcaagatgttttgagcccaacgctccactggagatggcaaaaagcagactcgaacataccgatacaacggtgcaggaaatgcagaacgctcccgctggataggcaaagccaagcactaccctcttgacatcaatctgctgatcggagttgcctactctgatatgaaagcccttgttgaacagcatgaccaccatgcccgcggcacaagctaaagccaaaggaacgcacatcaacgcgatccgaatccaattcgtttcaatcgcttgaggaagcaaaccgaatatcggcagagacggcaatgccgacccctgaccgctccacatggtgaattccgctagatcgccaatcgaaaaaccagccccgaatacccaggaaatagcccaaatcgcgatatttggaatccaagcgatcatggcgatcgtggtgaggatgcgagaaccgttctgcattcccgatagctcatacaacttcaccatggccgactggttgctgaatgcccagtacaagaccacaatcagtccaatgaccagatagaccgtgatcaacagcacacccaaggcaacaccaatggtgacggttttacggaccggagacgaaacatgctcgctgatccaatccaaatctcgtttggtcagtggtgattcgggaatcgcggcaatggcatagccaagtacaaagacgatcgctgttttcacagcaaccacgcccgtcgtatcaacgagtttgatgtcaaggctattggcgaagaacacattgatcaacacccagcctatggttcctgccacgcatccggacagactcgttccgacgcgtttggcgagcgatgcgataagagcgatcagcaaaaccgtaagcagcaacggcataatcgtcaaagtgatggatccggttttgaaaccgttcccttggctgagaagcacaaccgcctcggtcaaggaaacagagaaggcggagagattgtcgccgccttcttccatggaaataaccagaagcatcagcgcaatgtagcagcctagggcaccggcatagacgaccatggacaatgccgccacggcaagccccttcaaccaatacttcaggttcgccatcatatcgacttggaagcgagcacctcgcgcatgatttcagcggtctgccccggagtgcgtccgacacgaatacccacggcttcgagcgcttccttcttatcttgcgcagttcccttgcctccggaaacgatggcaccagcgtggcccatctgcttgccttccggcgcggtgaagcctgcaatataggcgacaaccggcttggtcatatgctcggatgcccacttggccgcatcctgttcggcactaccgccgatttcaccgatcatcacgacagccttggtggcatcatcgttttcgaacgcctcaagcgcctcctgcaacgtagtgccgacgatagggtcgccgccagcacccaaacatgcggtaaaaccaatgtcagacaactctcccatcagttgataggtgagcgtaccggacttagacaccaaacccaaaggtccacgggagacgatgccgtccggaataatgccaagattgcaaccattcacaccttccgtagaaggcagggtaagcagaccagggcagttcggaccgacaatacgcacatccttgcgcaatgcgagttcaacaaagtacgcgctatcggcaacaggaatgccttcggtgatgacaacaatcagcttgatgccggcttcaatggcttcgaccacggcatccttggcgaaacgcggcggcacgaacacgacgctcgcttgggcgccggtgacttccacggcttcggcgcaattgccgaacacacgcaacgtaacatcctcgccgtctttggccgcggggaaattgacttcctggccggccttgcgggcgttgacgccgccgacgatattggtgccggccttcagcatgcgggcggtatgggtcatgccctgatgtccggtcataccctgcacgatgacaggtgcgccatcctcaatgaaaagcgtcatttcagcgaacctccttgccattggccgcaagacgcgcggcctgctgtgcggcttcttccatggtctgtgcaacatgcagattgacacgatcggcctgagccagaatatgtagaccttctgccgccgcgttgccgtcgaaacggactaccagaggcttggaactgccaagcttgtcaagggcttccagaatgcccttggcaacttgctcgcaggatgtgatgccaccgtacacgttgatcaacaccgattcgacttgcgggtcggacagcacgatctccaaactgccgcacatcacttcggcggacgcaccaccaccgatatcaaggaagtttgccggtttgacattggtgccctgatcttctccagctccggaaaccgcgtcaagtgagctcatcaccaaaccagcaccgttgccaatgacaccgacggaaccctgaaggtgcacatagtgcagaccatgctctcgcgccttctgctcaaacggatccacatgcactgggtcagcgaagcgcttccagccatcatgacggaacgcagcattgtcatctaaagaaatcttggcgtccagggcgcacaatgtcttggaagactcgtcatccggatcgccgatcttggcaagcggattgatttccacaagcgtggcgtcgttctctttgaagcactgccacatcttcagcagaatctgtgctgcctggttgacgtcggcatgatagaagccaatgctttccgccatcttggtcgcagcctcgatatcgaaatcctccagagcgtcgatatgcagacgcttcacagattccgggtgttccttggcgatctcctcgacctcggttccaccattcgcagtagcgagcacgtcaaaatcgcgagacgaacgatccacggaaatagagacataatactcgtgaagaatgttctttgcctcggccaccaacacgccgctgaccttgtgcttgtgaatggtcatcggcaggatgtcttcggatgcaagaatggcctcatcacgattcttcgccagcttgacgccaccagcctgaccgcggtggccaatcttcacctgagccttaatcacgttggggtagccaatctgctcggcagcctcagccacttcgtgagagttctgcgcgaacactgccttaggcgttggaataccctgctcttcaagcagttccctagcctggtactcatagagatccatggattcttttcccttgatgctattggttatttacgaagaatgtacttaactcacgcaggcatggtgatcagtgaacttgtcgggcagtctcccagcgatgccatgccaccaatgccgacaagctccatgacgaagctgaaacctgccaccgtgccgccacacttttcgatcaacgaagcagccgcacgcgctgttcctccagtggcaatcagatcatcaacgacaagcacacgagatccctcatgcacgatattcgtctcgatttcgacggtggcctgcccatattcaaggtcatagctttcgctaacggtttccggaggaagcttgccagccttgcgcactgcgatgaagcccttgcccaggcgcgctgccaacgcaggaccaaaaaggaatccgcgggcttccaaacctgcgatgatatcgaattcatcggcagcgaccggcaacgcggcttcgagtgcgtcaagtagcaatccgaaggcacgcgcatctgccagaacaggcatgaaatcacgaaaaagaataccttccttggggaatcccggaatggtgcgaatctttgaaacaaggtactcggcgttttcgtttccaatcttgctaagaccggaaacggtaatatccgacgatgccatgactgtattgtccttcttttgtagtgctacggcactttgcattataggtttccgtcaggaataaaatcggcgaaaacctcaaaaatgagattttcgccgatgccttaatgagcttgtcagctgttcttctgctcggtctcagtctgcgccgcttcgatttcgccttcaatcggctcctgagcagcctgatcttcgtctgtggaatcggtggaaagaggattaccgttttcatcgacctcatcgtcgtgtacgtacgcaggacgcacgtattcgcggctgatggcgttgaaaccgaaacgaatctgagagccttcggaatcgatgacgatctcctcgtattcggtatcgacggaaacaaccttgccgatcacaccaccaatggtgatgacctcagtgcccggctgcaggttggcacggaaatcctgacgctcggcctgctgctgcttagccttcttggactgccagaacatcatgccaaacatgacgacaatgatgacgataagaaacatgtaatccaaagcacaactccttgggatggacgctcgaacaggactctatgtccagaacaccgagtctaagctagcttgctgacatcaacctgagattcgtcagaagtcaagccgagatgatcccatgccttgcgcgtcgccacacgcccttttggggtgcgcacaaggaatccttctcggaccagatacggctcgcacaccgtttccacggtctccgattcctcaccgaccatggccgacaggttgttcagaccgaccggaccgccgttgaaattggtgacaatggctttcaataccgcaatatccaaacgatccaagccctcggtatcaatctggtacagtgccaacgcctccttgacatcgtccggatgcacagtttctaaatcgtgcacaatggcccaatcccttacgcggcgaagcaatcggttggcgatacgcggcgtgccccttgaacgcatggcaagctgatgggccgctccctcttcgagactgatgcccagcaccgaagaggatcgttcgatgagcttttcaagctcctcatgcggataaaagtcaagatgcgcggtaaaaccaaaacgagccctcaacggtgatggcagcatgccttcgcgagtggtggcgccaatcaccgtgaatctcggcaaagtaaggggaatggaggaagcacccggccccttgcccaccatcacatcaacacggaaatcctccatggcgatatacagcagctcctcggccgcccgtggaaggcggtggatctcgtcgatgaacagcacctcccctgcgtcaagggagcttagaatcgaggccaaatcaccagcatgctggatagcaggtccggaagtgactcgaatcggcactccaagctcgttggctacaatcatggccaacgtggttttccccaagcccggaggccccgccagcaggatgtggtcagggggaacgtcacgtttacgggcagcatccaaaaacagctgcaattgcgccttgagtcttggctgtccaataaaaccatcgaggacgtgaggacgcagttcctcatcgcttaccggctcgttgccgacaggcgacgcggaaaccatgcgaagcgattcctcattggcaccggtattcgactgttcgaatgcgacgtcgttcgtcatgatgatgcgtttcacctacctcggtcaagagaagccaatgcaagtttgagcacgcggggcacatcatcgtccctcaatggaacattgatatgattgctctcgcagactgtctgcacggcatgcaaggcatcctgctgacgccaccctagtgacatcagaccttccacgacctgttccgaaccagcatcttccgcagaacgaacctctttggaagccccctcgatctgactgagatcgatggaccccttgagttcgagaataatcttctgcgcacccttcttgcctagaccaggcgccttcgccagcgcggtggcatccccgtccgccacagctttcgccaaacgttccggaggcaacgtcgaaagcaaggaaagcgcgactttcggaccaattccgctgaccttctgtaattgcaaaaacatgcgtttcgaagcaagcgaggaaaacccatacaatgtaatcgcatcctgcgaaacattcaatgacgtgtataccttcaccgtctgcccagcgtgcatggacgccaaatccgccgaaggcatacgggtctcatatcccactcccccgacctcaataatcgccgaagcggcgtcaatgaaatcgacctggccatgcaacatgcctatcatgccgtcacctcccgcatacaactgtagaacatctgttcgatagtctacattcccctacggacgccgcgttgtcgcgccgccttctgtgaggccagagcccattgacgctgtgcatcggtcaagtgttgttcacgctctcccccctgtaacgcgcctgcggggcgaagcgcatgacaaatcgctatagccaacgcatcggcggcatcggcgggcttaggcaaggtattgagccccagaatacgggcgaccatgcgttccatctgaatcttttcggccttgccgttgccggtaatcgccatttttgattcagtgggcgtatgcaaggcgacgggaatgcccctctgggccgcagccagcatggccagtccggcggcctgtgcagtccccagtacggtgttgcgattctcctgtgcaaacacacgctcgatggacaccgtatccggtgcgaaccgttcgatcttttccaccaaaccgttatagatggctaacagacgtaagtcctgcgacattttcggatcggaacgtaccacgtccacatgaataaaagaaagccggcggtatgcgccggcttcgatcacgccgaccccgcagcgagtcagcccggggtcgacgccaagaataatcacgcttgattactcctcgtcaagctgagccatgacctcgtcagaggcggtccagttggagtagatgttctgcacgtcgtccagatcatcgaggttgtcgatcagcttggacaccttctgggcatcttcgagagtcaattcgacctcgttcttcggcatcatgaccagatcagcggaatcataatcgaatccagcgtcctgaagggccttacgaacgtcgatcatctcggacggaccggtgacgacagtgaacacgtcgccgtcgtccgtaacatcttcagcgccagcttctgcggccttctcaaacagatcatcaaaatcgacgccctcggccggaacgatgatctggcccttgcgctcgaagttgaagctcacggaaccggaggtagccaaagagccattgcccttggtcagggtggaacgcacttcggcggccgcacggttacggttatcggtaaggcattcaatgatcagaccgacgcctgcgggagcgtaaccctcatagacgatatcttcatagttggcaccgccggcttcttcaccagagccacgcttaactgcgcgcttgatgttatcggcaggcatggaagccttcttggccttgtagatggcgtcgtacagggacgggttgccgtcaggatcgccaccacccatacgtgctgcgatctcgatgttcttgatcagcttggcgaacagcttgccacgctttgcgtcgatggcggccttcttgtgcttggtggtcgcccacttggaatgacctgacataatgctcctaggcaggttgcggatgtttcaaacgaaacgattctaaagcggttctaagacaaagcgcccgacatacgtatgtcaggcgcgtcaacggccgtttcatgcagccggttcacaactgatacgtcttatgaccgacggccatctggcaacgagcctcaagaatgcgttggaatacggtaatgagtcccaaaaccgcaagcaataccatggcgatggccagccataacccttggtgcgtgagcccggtaatcgccatgcccaccagaatgatgaccaatctgtcggcacgcgttgcaatgccgtttttcacttcgaaaccgacggattcggcacgggcgcgcgcatacgacgtcacgaacgacgtcatcatcgacaccatggctgcggcgataccaatccaactaatgcaatccgggcttgaccggttgatgtcataccaccaatcggcatgcaggatgaagaagatgaccactccggcaagcaatgcccaatcagcgatacgatccaatgtggaatccaaaaaagcaccgaattgggtgcctcccgtggtcagtgccgcaattgagccatccagggaatcggcgagcaccagcaacgtcagcaccaccgctccggcgaacaaccatcccgtaatgccagtggcgaaagccaccacaatggttccaatagcgccaataaccgtcaccgcattcgctgtcaggccaagggataccagtgccttggcgaatggctcgataagtcttttgaatggtgcacggagatgttctaacatgcgaattcctgttcttcggaaagcaaaagggcgtgcaagcgtcagtatgtgatgcttgcacgcccccataattcataaccgtatgcgaccgaacgtgaacgaatcagatcagtctgcgatggcggtcttgaaatcgtcgacgttgttgacctgaacgcgcttcttcagcacggtcatgatctgcgccttggcctcatcgaccggcacaccgttgagctggctgccgtcacggaagcggaagctcaccgcgttgttgttcatgtcttcctcgccgacgatgaggatgaacggcaccttcgacttggaagcgttacggatcttcttgccgaaacgatcatcggacatgtcgatttcgcaacgaaccgtctcctcttccaagctggcaatgaactgctgcaggtgtggggcgaattcgtcggcaacgggcactccaagcacctggacaggagcgagccacgccgggaaagcaccggcataatgctccagcaacacggcgaagaaacgctcaatggagccgaacagtgcacggtgaatcatcaccggacgctggtgggtgccatcggcagcgatgtactccaagccgaaacgttccggaaggttgaagtcaagctggatggtggacacctgccacgtacggccgatggcatcgcgagcctgcacggagatcttcggaccatagaaggctgcgccgcatggatcgtcaaccagttcaagtccggattccttggcgacttcagccaacgtattggtggcctcttcccagatttcgtcggagccgacgtacttgtgcggatccttggtggacagctccagatagaagtcgtccaaaccaaagtccttcaacagaccaagcacgaaggtcagcaggttcttcagctcgtccttcatctgctcgcgggtgcagtagatgtgggaatcgtcttgagtcaagccgcgcacacgggtcagaccatgcacttcgccggacttttcgtagcggtacaccgtgccgaattcaaacagacgcaacggcaactcacggtaggaacgctgacgggatttgaagatcagattgtgcatcgggcagttcatcggcttcaggtagtagtcgaagccctgcttgacgacgttgccgttctcatccttttcctcgtccaaacgcattgccggatacatgccatccttgtaccaatgcaggtggccggaagtctcatacagaccgcccttggtgatgtgcggagtctgcacgaagctgtagtggtgcttgcgatgcatttcgcgggagtaatcctccatcgcgttgatcacagcggcgcccttcggatggaacacagccaagcccggaccgatctcgtccgggaaggagaacagatccatttccgcgccgagcttgcggtggtcacgcttggcggcctcctcaaggcgggtttgatatgccttgaggtcctccttagtggcgaaagccgcgccatagatgcgctgcagcatcggattggcttcgcttccgcgccagtatgcggctgcagaacgctcgatcttgaacgccttgatatagcgagtgttcggcaggtgcggtccgcggcacagatccttccacaccacattgccgtcacggtcgacgttgtcgtagaagctcagttccttgccgctgatttcggtggcggcttctggatcgaggtgggcttccttgtctttgatgagttcaatcttgtacggctgatcggactcttctgccagagcctcctcttcggtcaccacgcggcggcggaaggactgggaggacttgataatgcgctgcatgcgcttttcgatctctttaagatcgtcaggagtgaacggagtctcgacatcgaaatcgtaatagaaaccgtctttgatgaccgggccgacgccgagcttggcatcaggacggatctcctgcacggcctgtgccataacgtgggttgcggagtgacgcatgatggccaggccatcttcgctgtccaatgcaatcggttccacgacgtcgccgtcgtgcagttcggtatacaggtcgcggggttcgccgttaagacgcactgcgatgatattcttgtcttccgcgaagagctggacgccagtctgatctgctgccacctccttcgcttcgccgttgagtgtaatggagatggtctgttcagccatgagttgtcctttgctatcggggtccgcggtactaatgtgcaggcctggactgtatgtcaacgatgaacaagatagggttgagtgcagacatcggcacgctgaaagagtgaacagcatgctacagcgcgattatattttaacggatcgtatttgatgctattcgacgacatgcgcgtacgtgtattgtggcgcgcttcgtgtcgacgtgatctccaccttatcggatggcacgatcgacacggtggctccgtatttcactttcaaacgtgaaccgacgcctccagcgagattgaccgcgttctgcagattgtcgctgtctccaatcgccctgatgatgaacggcgccttgatattcgtaccgtcgcaatcgagaccatccgccgtatcgctgatgtatgtactggtaatcacgcgaatatcgttgatttcaatgacttccgcgccgctattgcgtagttcctcaagtagggtgaataaaatcgacgcgtcaatatctcgctttgatcctttggaaatacggatgaccacgccttcgccggatactggtaaacgcccggaaagaatgccattcgattcagcgttctgcctggcgatttccgctgccttctcgttcttgtcggcggtatccttcagagagtcaagctgattggatagttcgcttttacgctgttcgagcttttgcacctgcgtactcgtttcgctaataagcttggtcagctcgtcctcgctcatcgtctcatatgtggaggtcgtgttgttcagctggatagcgtagctgaagcccagcaacgcgcaaagcacggttacgagcacgcttgaatacaggcgcgcgcgagtggccttcgcattcagcgaaaccctcttcggtttgcgcctgaccacaggaaacgatccggtttgggtgctgtcgttgttttggtctttgacgatctgctcgtggatcttggagagtacatccttgttggcatcgttgcgtctgctcatacgccgtcatcccttgaagatgaaacgtcggatggatgacacattggtgaagattcgaatgccgagcacgacgatgaccgcagtctgcagctgggaaccgacgccaagctggttgcctaggaaaaccaacaatgttgccgtaataacattcgagaagaaggaaatcacgaagaccttatcggaaaagctacgctgaaaataggctcgggcggcaccgagcagcgcatcgagcgccgccagcaccataatcggcagatacggctgaagcgcaatgggaatgtccggccggacgaacacgccaatgaccacgcctatgataagtcccaagaccgctgccattacttgaccttccttgcatatgtcacttcgccggtcaccgccgcttccagcgtaatcgatttgcttctgctcacctgcggatagataccggcttctttgaaatcatcgtacaaacgtttttgcgttttcttgctcaccgcattggcaagcgcactggaattgccgatcgcctcgatgcgataggggctttgcacggaattgacgccgataaggatcgtcgtccctgccgttcgtatggaagtctgcacaccgagacgatacccgttaatggcgatcgcctccgcaccggactgccaaagcagcgagacaagcacctgcagatcggaatccgtgaccacacggacttggctgccgttttcccttggcagtgacgaatccgcgttgtctccgctcaccgatattggattggcgatggtgagcgtgatgccttcgccttgcacaggaagtacgccattgaccatttcgtcatcctgtatggtctggttcagagaccagttcgacacggatttcgattcctcctcaacctgggctcgcagcgcgttcacgtctttggtgagggtttcgacgtttttcgtttgatcagataactgacttgacagttgcttgcgtacttccttacgtggatcggtactcagctgtcggacgaacacgcttcccgccgtgcctacggcaatgcagataaggaataccaaaacccgggtgaaccagaccgaaaacaatgacggagttttggtggccaacctcgagtccgtgtacatcacgtccatcggacgattggtcaaatcgtcaataagccgcaatgagtcatcatccagattccgccttctgcgcgaagtggatgtcacgatatcaggctgcacatgatgcgaagtcagcccggcgaaggacgccgagaaaacggcgcgccgcttcgtaggcgtattctccggagacaccgggaacgacgcacgttccggagcatcatgcatcatgtgagtcaatccttatcgttcttcagaagctggattccctgacgtatgtaaatatagccggcaagccagtacaatcccacaccccatatgccggtggcgagaccacacaaatgcaaagtatccgtagccgaattagaccagatatctgcgaaaatcaaggcgacaatggcaatcatcagcatggcggtgcctgcttttccaacgaaatgcaccggcagcggaccgtaatcacgctgcgccaaaaccagtacaagaatcgccatgatcaaatctcgcaatccgacgacgatcagcatccaccatggaatgatgtcagcgactccaagcgcgagaatactgcagaaaatcaataatctgtctgcaataggatcgaggatctgcccgattttgctcacctgattgaacgagcgtgcaatcagaccatccaagccatcggacaccgccgacagcgcaagcacaatcaatgcaagcaccatctcatggcgagagaccaataccgagatgaagggaatcgaaatgattcgcaacaggctgataaggttcggaaccgtgaaatagatatcccgcggttccggactgtactgttttttgataatcagtttgctcatacttcgagcaatattacattctcgaggcctgcaaagcggtgacgattatgccacgagcaccaacttcatacaactggtccatgagttggttgaccttggccttcggcacaacgacacgcacggccgcccactgcttgtcatgaagcggggaaaccgtcgggctttcgaatccaggcgtgatgtccacagccgcggaaaccttctcgactggaatatcgtaatccatgagcacgtaacgctgagcagtgagcacgccctgcagacgacggctaagaatcgtcaaacgatcatcatcttcagcaagacgcggggaacgaatgagcacagcttcagaatgcaacagcggctccgcgaaaatacgcaggccggcgttacggagcgtggtgcccgtggataccacgtcggcgatcaaatcagccacaccgagttgcactgacgattcgacggcaccatcaaggtgtacggtttcagcgttgatgccatgctcagccagataatcatgcacaagcttgtcgaaactggtggcgacgcgcttgccttcgatatcttcgagcttgctaatcggagaatcattgggggctgcaaaacggaacgttgaagcgccaaagccaagctccatatgctccttggcatccgtaccggagttgagcagcagatcatgaccggtaatgccgacgtcgatggtgcctcggccaacgtagacagcgatatcgagcggacgcaggtagaacagctccacgtcattgtcgggatcctccacaaccagctgacgcggattgctcctcaggcgatagccggcctcggccagcatgttccatgcaggttcggacagcatgcccttgttgggcacggcgattctcagcattttccctcccaaaaaggccacgcctcctatggcacggccaaaaactcacagattcttgtagatgtcttcgagtgtgatgcctcggtcgatcatcatgacctgcagatggtagatgagctggctcatctcttccgcagtacgatcggcgccttcgtactcagctgcgatccaggtttcgcccgcctcttcgacaatcttcttgccgatgaaatgcgtgcccttgcccagttcgtcgacagtcagcgagccagcctgcttggctgcggccttctcgctcaattcagcaaagagggattcaaaagtcttcattattcgtatctatcctcgaaatattggtaggttcaggccttgaatgcggcttcagccttctcacggatggaatcaatggcttccgcaggatcctcggcaccatacacggcggaacctgcgaccagtacgtcggcaccggcctcggctacaatgtgcgcggtcttcgggctgacaccgccatcgacctgaatcttggtggcgaggccgcgacgggtaatctcgtcacgcagacgacgtaccttggccatctggttgtcaaggaacttctggccaccgaagccgggctcgacggtcatgataagaatcatgtcgaattcgtcgagaatatcgaaaatcggctcgacaggttcggccggacgcaccgcgaagcaagccttgcaacccatctcgcgcagctggcgcgccagacgcaccggagcgtgggttgcccccatgtggaagcttacggatgcagcgcccaacttggcatattcgggtgcccaacgatccgggtcctcgatcatcagatgcacgtcgaccggaagatcggtgacttcgcagatacgagccacaatcggctcgcccaaggtcagattcggaacgaaatgatgatccatcacgtcgacgtgaacgagatctgcattggagatggccttgaggtcgcgctcaaggttgcagaaatcagcggacaggatgcttggtgcgatttgaatagtcatggctcttattctatgaaaggtaatcgacttgctgttatttgatgccgggctgcttgtcggtattcgagacagtttcggcatcgttggttttgatttcatcaaccgtttgctcggggaaagacaccacggaatccgaagaatcctccgattcaccgttttcaagacgctgctcgatttcggtgacggtacgaagcttctccgccaacaggtcagtgtctttgcccatttgctgcacgacgatgaatgacaccgcgccgagcacgaacaccgccatggagacccacacattgatgcgcacgcccaagaattcgtgcgcataatcgatacgcagggattcaatccaagtgcgtcccagggtgtaccacatgatgtacacggcaaacagggaacctgccttgagtttcttcatggctttggaaccgatgtatacgataatcgcggcgccgatgaggttccagatcatctcgtacaagaacgtcggatggaacagcgtgccactcgggcatgtggctccgtcatagcactgttcgctatgcccgatggcagtgccttccatgttgagtttcaaaccccatggaagcgttgtcggagcgccatacagttcctggttgaaccagttgcccaaacgcccaacagcctgcgctaccaacaggcccggagcgatggcgtcagccagcaaggccattggatagtgcttatgacggcaccatgcccatgcggccagcgctccgaacagcacgccgccccagatgccaagtccgccattccaaatgcggaacatttccgcccagtcgccatccggtccgaagaaacgttcaggcgtggtgatgatgtgataaagtcgtgcgccgataatgcccgcaggcacgctgaccagagtgatatcaagcacttggtcgaaattgccacccaactttttccaacgtgtggtggttatccatactgcaaggacgattcccatcaaaatgcacaacgcatagatatgaatcgttgctggaccgatggaaaactgcgaaatcgttggcgatggaatgtatgcaagtgtcatggtttcctgatggtagtccacgcatccgatatggtgcgtggaccaccgaaatcgtcagaatggtttactttgcgacacgcgcgttatggacgccgtccgcaagctcttcggctttggcggccaacgccttgagacccgtggcctcatcgactgcgtttttcccggattcgtcaagcatggtgtgcaccaatgcggatccgacgatgacgccatcagcgtatgagccgactcgcgcgccttgttcggcggtggaaacgccgatgccaacgcagacgttcttcgcgccggcattgcgcgtgcgtgccaccaactcttccggagaagcatcgatggtggaacgttcgccagtgacgcccatacgggctgccgcatagacgaagccgcgagcgttgcctgccacgaccttcaaacggctgtcggtggagtccggggacacgaggaagattcggtcaagtccatgacggtccgaagcttcgatccattcacctgcctcgtctggaatgagatccggagtaatcaggccggcgccaccggcattttcaaaatcgcgtgcgaaacgttccacgccgtaatggtagatgaggttccaatagctcatcaccagagggactcccccggcgttggccacggtttcgacggctttgaacacgttcgcgattttctcgccgttgtcaatggcgatctgcgaagccgcttggatgacgggaccatccataaccggatcggaatacggcagaccaatctcgacggcatcgacaccatgctcaaccatggtgcggaatgctttcaacgaatagtcagaatcagggaatccatatggaagataaccgatgaatgcaggcttgttcgccgctttgaattcatcgaacatggcttccgtcggactcggcttatggctgatgccgagaggctgcccggacggcgtggttactgttgcgttcgtcataatggatactccttctttcactcgccgtccgcgttattgccctgggctccattggcttcgagcgccttggcctgttcatcggtcaaataaccgaaccatttgccagcggtgttcatgtccttatctccacgaccggaaatgttgatgatcatgactgggtgctcgtatcccttggccttgagatcctcagctgccttgtatgcgccagcaactgcatgagagctttcaattgccggaatgatgccttcggtttcgcacagatccttgaaagcgctcatcgcttcctcatcggttgcccaggaatagttgacgcgtccgatttctttgagccatgcgtgttccgggccgacggatgcgtaatccaaaccggcggagatggaatacgtgtcgagggtctggccttcgaaattctcgagaagatagctcttggcaccttggaacatgcccagttcgccggttcccggagcgaaacgaatggcatgacgcccggattcggggccattgccgcccgcctcgtagccgtacagattcacgcgttcgtcatcaaggaaagcgttcatgatgccgatggcgttggaaccgccgccgacgcatgcgcaaaccgcatccggatggtcgatgccgtaccaatcctgaagctgctgcttggcttcctcaccgatgatcttctggaagtcacgcaccattgccgggaacggatgtggacctgcgaccgtgccaagcaggtagtgcgtgtctttgacgttggtgacccagtctcgcaaagcctcattgatggcgtccttgagaatgcgatctcccaaagtgacttccaccacctcggcaccgagcatgcgcatgcgagcgacgttaagcgcctgacgacgcgcatcgatctgacccatgtagatgcggcatttcaagccgagcatggcgcacaccgtagcggtggccacgccatgctgtcccgcgccggtttcagcgatgacacgggtcttccccatgcgcttgaccagcagagcctgcccaagcgcattgttgatcttgtgcgcgccggtatggttgagatcctcacgcttgaggaacacacgcgcgtcgagaccggttttttctttgagacgctcggcgaaacgcggagcgtcagtcaacggtgatggacgtccaacatactgctggttcagtcgtgccagctccttatggaactccggatcggccttggcttcctcatagacgcgttcaagctcgtcaagcgccgtgatcagcgcttccggcacgtaacgtccgccgaattggccgaaatatggtccttcgtggcttgccaatggggtttgttcggatgctttcactcttgctcctgcctttaccagtcgctccacagcctgctcatggttggctgcggttgcgacaccttcgccaaccagcaccgcgtcggctccggcgcgggcataatcctccagctcaaccgaaccgaacactccggattccgctacacggatcacatcgttcggcaaatcagcggccagctcgttgtatttgttcacatcgaccttgaggtccttgagattccgcgcgttgatgccgatgactcgcgctcccgcatcaatggcacgctggatttcctcacgggtatgcgtttcgaccagcaccgtcatattgagactatgtgcaagctcaagcaaggacttgagcttgccgtcgtccaacgcggcgacgatcaatagcaccagatcggcaccgtgcgcacgcgcttcccaaatctgatattccgtgacgatgaaatccttacgcaataccgggattttcacagctgcacgaactttatcgaaatcatctagcgatcccaaaaagcgacgtccctcggtaagcacggaaatcgcgctggcacctcctttttcgtattccctggccaatgcggcaggatcaggaatgtcgctaaggtgccctttcgatggcgaagcccttttaatctccgcgatcaccggaatgccatccgcttttttcagccactgtcgcgcatcaataggggccggcgcttcgaatgtctgacgcttcacctcatcaagggaaatgttctgttcacgtgctcgttggtcttcgacagctcccgccaccagttcatcgagtacagacatggtgttcctttcagcattttactcgattggttagcttgatttgactcacaactggcgaagctgcgaggcgatctgcaccgcttcgacgctggcctcggccttgttgcgagtctcctgccactcactggccggcacggaatcaagtacgattccggctccggcctgcacgctcgcttcatggtcgcggatgaatgccgttcgaatggcgattgccatatcgaggttgcctgaaaaatcgaaatagccgacagtgccgccataaatgccacgatctgcgggctcaagctcgtcgatgatttcaatggcacgtggttttggcgcaccggaaagcgttccggctgggaatgccgacgtgaacacatcgaacgacgtcatgtcggggttaactcgcccggtaacggtcgaacagatgtgcataatgtggctgaatcgtttgatatccatcaaggatacgacttccacgctttccggaagacatacacggctcagatcattgcgggaaagatcaacgagcatgatgtgttcgctacgttcttttggatcggcaagcagatccttggcaagttgctcgtcttcctcaatagtggtgccacgaggcctcgaaccggcaatcgggaaggtcatggcatggccattgtccactttgatcagcgtttccgggctggatccaataacgttgaagtcacgcccctgcgcatcggtcaacgacatgaaatacatgtatgggctggggttgagcgtacgaagcacgcggtacacgtcgaatggatcggctggcgaatcaatgtcaagacgctgggaaatgaccacctggaacacgtcaccatcgatgatgtgctgcttggcgatttcaacggaacgctcataatcgctcttctccgtacggaaacgaagctcgggctggctaatggtctcatccaacacattgacgcgagcttcaccttcgacaggcgtggcggccttacgctgcatatcatccaatcgcgccaccgcctcgtcgtatgccgcatcggcacgggtggatcgatcgtctacgttcaccgcattggcgatcatccataccgatccggacacatggtcgaccacagcaatatccgtggccaatgccagaactgtttccggctgcccggtctcgttcggcgcctcggcacgcaaggtcggttcccaatggcgaatcgcatcccaaccgacggtaccgaccagaccactggtcaggttcggcagtccttcgacatgcggcgctttcagtgttttcagcgcagcatgcgcgacttccatcacatcgccttcggtaggcacgcctgcgggaacctgacccaaccaatcggccttgccgttgttggaacgcaactgagccatggaattcacaccgatgaagctgtatctgttccacgtgccgccaaattccgcggattcaagaatgaatgtgccggaacgtcctgcagcaaggcgttcatagaatccgacaggagtcaacgaatcagccagaagtcggcgcacaatcggaatcacacgatatccctgatcagccaattcgtggaattgttcgcgactcggccaggtggcgccccacttgagtgcttgtacgctgcattcactcatcgctggccctcctgttccttggtacggtatcctacgaccacgggcagttgcccgccttcttcgaagcaggatcgtttgccggtatggcaggccgctcccacttgatcgacttcaaccagaatggcatccccatcgcaatccagtgcgaaggacttcacatactgggcatgtccggaagtgtctcccttgcgccagtactcctgcctggacctcgaccagaacgtgacgcgaccagtcatcagggtgcgtcgtatggcttcgtcgttcatgtagccgaccatcagcacttctttggtgtcgaattgctggatgacggctgccaccagtcctttatcgtccctcttgagacgttctgcgattcgtgggtcaagaatagtgctgttgtcgtatgcttcgttggtcatgatggtgttattgatttgtttcttcgattattgattacgttattcgcctgttttgcggttttcggctttcatcgcacggtatagccggcggccttgatggcatccttgacttcgccgatggtgactttgccgtaatggaagatcgacgcggccaacacggcatccgctccggcttcgatcgccggggggaaatcggcagccttgcccgcacctccggaagcgatgatcggaatcttcacttccttacgcacggctttaatcatttccaagtcaaaaccctgttgggtaccatccgcgtccatggaattcagcaggatctcccccgcgcccaactcctgagcacgcttgacccaccagatagcgtcaatgccggtggatttgcggcctcccatggtggttacttcaaagcccgactgagtgtgtcgctcgccctgctcacggcgtgcatcgacggataatacgagcacttggttgccgaatcgttctgcgacacggccaatcagcgtcggatcattgatggccgcagtgttgactcctaccttgtcagctccgcaacgcagcagagaatccacatcttcaggggcacgtacgcctccacccacggtcaatgggatgaaaatctgttcggcagttcgactcaccacatcgaccatggtctgccgatgcgagctcgaagcggtcacatcgaggaaagtcagttcgtcggcaccctgacggtagtattccgcggcaagttcaaccggatcgccggcatcgcgaagattctcgaaatgcacgcccttgactactcgtcccgcatcaacatcaagacatggaatgactcggactgccagtgacatgctgttttactccttcgcgcataatcatgtgtgcaacgaatgcaagagtaaccgttttacgttacgcatgttcgtcggaagtccgagtagcggacagaacaagcatctttccttgaaatctaatcttgttccttagctgcgagctgcccgcatgcaccatcgatatcctgcccgcgtgtgtctcgcaacgtcgcagtaatgcctgctttatgaaggatatcaaggaactgctgttcatcctcaggcttcgaagcggtccatttcgatccttcgatgggattgagcggaatcggattgacatgagcccaattgtcaccgtaatggttcaatcgcttagcaagtaatttggcatgctcggcttgatcattgataccgcgcatcagagcatattcgatgcttacgcgacgtttcgaagccaagtaatagtcatgtgccgcatcaagcacctgcgtagtattgaaacgcttgttcattggaacgagctcgtctcgcaactcatcgctcggagcgtgcaaggacacggccaaacgcaccggaatgccttctgccgtgagtttcttgatacctggtaccacaccgaccgtggagacggtgatgttgcgtgccgaaatgccgaaaccttcaggtggcatggcgctgatttgacgtacagcgctcaatacggacttgtaattgcccataggttcgcccatgcccatgaacacgatgttgctcaggcgcccgagaccaccagcgacttcgccgtcgtgcatggctttcgcggccacacgaacctgttccagaatctcgcctgccgacatgtttctcgtcagacccaattgacctgtggcacagaacgggcagcccattccacagcctacctggctggaaatgcataaggtggtgcgggtgggataccgcatgagcacggactcaataagagaaccgtcgaacagacgccatagcgttttgatagtagtgccctcatcggccacttgacgggtcacttcggtaatgagcgttgggaaaaacgcctctgcggcttcggctcgtttcgctgcaggaaagtcagagaactcttcggcagcgacgtcgaaatgcccatagtaatgattggcaagctgcttgactctgaatttcggaagtccaagatccttggctttcgcgatacgttcgtcttcagtcatatcagcaaaatgcagcggcggcttgcctcgacgcgcatgatctttggaaagcacgtcgcggaaggcaccggtagtgcctcctggagtaataccggtttccggcaaatccttcgtggaattcacggagtcgctcatgcttgtgtttgcctttctcacattccagttgcccacagcagcacgcacacgaacggcgcgcacagcagaatggaatccacacgatccatcacgccaccgtgtcccttaagcaggtgtcccatgtccttgatgccgatatctcgcttcaacatggatgcgcacaaatcgccaaacgttccggcgatgccgatcatgaaaccggccacgacagggacccaccagcgggaaatccacacatccgacccgtacgtgcagaacatcacggcaaaagatccgatcatggagaacagaatggaacctgcaagaccctcccacgatttcttcggcgaaatgcgggggcttagcttgtgcttgcccagccatgccccggcgaacaaaccaccggtatcgctcaacgcgggcatgaataccatcataatagcatgcgcgacgggatgatcattgaatgtcaacggcatgatgaggcaggaagccagaagcggaatgtacagcacggtgaacatggagaccgcgacatggctcagcctgctatggcttacctctccctgctcatggttgaaggaggattcaagtcttgcgcctgcatcggtgtgggaaagcttatccgccacggccagagagatgcggctgccgaacgtcactttagcgctggcggcaatcgctacgaccaccaaagacaccagcacgcataccgtcatggcgacgatatgacgttcgctgtaataggtggacagcaacgtcgccgccgaacatacccacaacaccgccacgggaatatgaagtcccgcagtggcgaaatcgacgcgcagctcccaaagggcaagcaccatgaacagcacaaccagatagacgaacaagtcaatgctgatcagcagacacgccaagatgaggatgacgagcaccgcccctgtggcgatggcctgcggcatattacgccccgtcttcttgttgatggcgttgatggcctcttcggtttctttttcgagctgttcctgatgttccatcatgttccctgtctggctgtgcgtcgattcttttcaggagatgaaggtctctcagacctccatgatctccttctgcttggcttcgagcagggtatcaagttcatcagtggtctgcttggtgatcttgtcgagctccttgagcagacgatcgccctcgtcctcacccatctcgccgtccttgatggccttgtcaagggattccttggccttgcgtcggatgttgcgcactgcgaccttgccatcttccgccttgcccttggcgagtttgacatattccttgcgacgttcctcggtcagctccggcatggtcaggcgaatgacgttgccgtcgcgacgcgggctggcgcccagatcggaatcacgcaacgccttctcgacggcattggcctgggacgcgtcaaacggagtgacggacagggtacgcggttccggcacgccgatggtggcgacggccttcagcggggtcggagctccataataatcaacggtgataccgttgagcagcgccggattcgcgcggccggtacgaatgccggagaagttctccttggtggattccacggacttggccatctgtgccttggcctgttcgacaatagttgccatttgtactccttgttgttggttgtttgatcgatattcgacgttgaatgtcgttattcagcgagtgtggactccgcggtggaaaccatagttccgatttcctcaccgagaagggcgcgggtcacattgccattgccttcgagcccgaaaacacggatgcgctgcttgttgtcgcgggccatggaaagcgcggatgcatccataacggcgagattgtcaacgagggcacgattatagctcaatgtggcgaaacgcttggcgttctcgtccttacgaggatcggcggtataaacgccgtccacgccgttcttgcccatcagcacctcatcgcaatggatttccaaagaacgctgaatggacacagtgtcagtggagaaatacggcataccggcaccagcgccgaaaatcacgacacggcccttctccagatgacgaatggccttgagcggaatgtacggctcggcgacctgacccatggtgatggcggtctgcacgcgcgtggcctgtccctcctgctccaagaagtcctgcagagcgaggcaattcatcaccgtgcccagcatgcccatataatcgccgcgggagcggtcgattccagcctgttgaagttccgcgccgcggaagaagttgccgcctccgacgacgatggcgacctgaacgccctgctgcaccgcgggaacgatttcctcagcgatacggcggatgacggacgtgtcaatgccgactttgccgccgccaaacgcctctccggatagtttgagcagcactctgcgtggattatcaccagtgttttcgccagtcatgaaaagcctttcttgcccgagaactcacgaaatttaccgctctcaagagtatcggcaaacacagacaccacaccgcaacgacacagcgtcgagaagaaaacaaagttggccatcaccctgtggatgatggccaacctcatggaatctctagcgtctaacgcacggattcaccattgaagccgaattcactcagcctcgcccttgccgacctcgacacgagcgaaagccacggctgcgccgccgacttccttgaacaggtcgccaacggtcttggacggatccttgacataggactgctcgagcaggacgttctccttgtagaaggcattgagacggccttccacgatcttcggaacgatcttctccggcttgccttcggccaaggacttctcggtggccacgcggcgctcggactcgaccacatcggccggaacgtcctcgcgggtcagccactgggcacccattgcggaaatctgcagagcggcttcgtgagccacagcagcgccggcctcatcggtggcgatcatggccacgatgctcggcggcatctcagcggacttcttgtgggcgtagatctcaacgtgtggaccctcgaccttggcgaactggccgaccttgacgtgctcaccgaacagagcggccgcctcttcgacggcttccttcacggtggcttcgccggaagcggctgccagcacttcgtccacagaagcggcctcggctttgacggcgtcttcgagcacgctgtcagcgaactccacgaacttcggagtcttggccacgaagtcggtctcggaattcagttcgacggcgtaaccggtctggccattggcggattccacgacctgggaggcgatggtgccttcctgagccttgcgaccttcgcgcttgccagcggcctggatgcccttggcgcggatgatttccttggcgcgagccacgtcaccctcagcctcggtcagagccttcttaacgtccatcatgccggcgccagtttcctcgcgcacctgcttgatcagagctgcagtgattgctgccattgatttgtctcctctgaaaaatagtgatgccccatatgatgggaggcacaacacctcccatcatagtggatattttcactcagccttggcttcgccttcagcttcggcttcggcttcagccggtgcatcggcggccggagcgccctcagtgaggagctccttctcccaagcggccatcggctgctcggtctcgccctcagccttagcggccttgccggaacgctccagcaggccttcggccactgcgtcagccatgaggctggtcagcagttcgatgccgcggatggcgtcatcgttggctgcgatcgggtactcgacggactccggatcagcgttggtgtcgacgatggcaacgaccggaatgcccagcttgtgagcttcctcaacggccaaagcttccttgttaacgtcaaccacgaacatggcggacggagtacggttcatgttgcggataccgcccagctgcttagccagcttgtccttctcgcgctcgagaagcagcagttccttcttggtcagaccggaaccacgcacgtcggtgaagtccatctcttcgagttccttgagacgggagacgcgcttggacacggtctggaagttggtcagcataccgccgagccaacgctcggaaacgtacggcatgttcacgcggacagcctgattggaaacggcttcctgagcctgcttcttggtgccgacgaacagcacggtgccgttgtgagcgacggtagccttgatgaagtcgtaggccttgtcgatcatgtcgagcgacttgaacaggttgatgatgtggatgccgttgcgctgggtgaggatgaactgcttcatcttcggattccaacgacgggtctggtggccgaagtgcaggcctgccttcagcatgtcgctcatattgatctgagccatggtattactacctctttctgtcggttcttgcctggtcatgcgttcctgcgtgcagccaaagccttgcggcgtcggccgaccgacacaggtcgtcgcgaacatgacgcgaattggttgtatgccggttgacaatattgggtggctcaggactttcacgacaaagcccttcgccggatggcacacaaggcataaaataccatggggtcacgtcttttcgcaaagacgtgaccccaagtcgtcatatcggtgagatgcgaacaatcacttgtggtgattgcgcatgtagcgcatcgcctctcggcgttcctctttctccaaacgatcaagatagacatgaccgttcaagtgatcggtttcatgctgcaacatgcggcccataatgccacgaccttccagcacgaccgtcttgccttccaaatcgatgccacgcacacgagcgtaatcggcgcgacgggtcttgtaccacaatcccggcacagacaggcatccctcatctccgtattgttcaccgctggtctcttcgaggacagggttgagcacatacccgatcttgccgttgatgttataggaaaatgccctcagattcacgccaatctgattagctgacaagccagcccttcctggatcgtcaacggtatcaagcagatcctgtaccagatgacgcacggccggcgtaatttccttgataggatcacagggggtacgtagcaccggatcaggtacgactcgaatctcacgaattgccaagattatcgctcctcgttcatggttgtttcctcagtttccgatgagtcttccggcgtttggaactcgccggcgtcttcggtctgcttcttaattttctcctgcatggtatcaaatgcctgccgaaccttcggacttacggattcggaagcctgacgcatggattcggaagcctgcttgaccgtttcggtggttcggtcaagaatctgcaccgtctttggcagcggtttgttggatggcttcggcgcatacagcacattgtcgatgacattttcgtaccgcttaagcaccttcggcctgacaactttcaggctcgccgtcagagtgcccttctcttggctgaactcctcgtcgaggatttcgaacttgcgaacggattcagcacgagagacattcgcattcgccttttcgacatactgctgaatgaatgcgcgcacggcatcgttcttcgcgatctgctccatgggcatgttgctatcaagttcctgctgtgcaagccaggaacgaaccatctcctgatcaagctcaatcaaagctccgatgaacggcttgccatcaccgaccaccacaccatgcgacacgatcgggcaagtgttgatgacatcttccataggtgccggactgacgttcttaccgccggccgtaatgatgatatccttcttgcgacccgtaatgtacacgaatccgtcgtcgtcgatggttcccaaatcgccggtcttcagccagccatcagccatcttgacatcgtctgtcagctccggcttcttgtagtagccaaggaacacgttggggcccatcacctgcagttcgccgtcgtcatcggtgcgcacgcccatgcccggcccgggcttgcctacggaaccgacgcggttggcgtcctgccagttgacaatcatgggagcggcggtttccgtcatgccatagccctgaatgaaggtaatgccatccataccgttgaagaaatgggcgagatcgacgttcaaaggagcgccgccacaagccagatatctcatgttcggacccaaagcagaacgaatggatttgcctacgacagacataaagaacgaatgttcggcacgagccacaatggaatggcgtccggtttcctgctcgtccttcgaccattgcacaaaatgatcgaaagccttggcgaacactcttccacgaatacccgctccagccttttgcgaagccgcgttatacactttctcgaacacacggggaactcccagcagataggtcggcttaaagctacgcagatcggcaagcagatgcttggctccgggcagatagccgaccaccccctgcccgccaatcgcaacatactgaatatagcgagcgaagcagtgcgccaacggcaggaacaacatcagacgattcggctgatatagcatttcatcgagaatgatgtagccgttcagcacgatatgcgtgaaattccggtgagacagcatcgctcccttgggcttgccagtggaaccagacgtgtacacaatggtgagcatgtcatcggccttgaccctggaaatcacctgatcgagcgtgtcctcgccgacaccttctccaaaatcagcaacggcatcaagaccatccgccttgaagttgaagacgtagcgcaggctgctgtgctcatcgcgaatctgttcaagcgtttgtgtatgcgcgaaatcaccggcaaaggcgatgatcggatccacctcttcgatgatggacgcggcctgcctggcggaatcggtttcatacacgggcacgcttaccgcgccgattgcggcgcaggcaaaatcgatgactccccattcgtagcaggtaggcgaatagatgactaccatgcttccggccttgacccctaggccaagaagacctttcgcaaccgcgcgcacacgctcaagcatctcccccgccgtaacgtcatgccatcgacgagtctcgtcgtcctgccattgggcgatgagatcatcaggatcacgtttagcgcgtctggagagcagtgcgaaaacggtatcctcatccgtagtgctatacgcaggttccggtacaaattctctcaacatgagtccctatagtagttgcagtatgctcaaggcacgctgaaaacccttgaaaacggctgaattcagccaattccaagggttttgaatggttacttgttatacgtcacacgccgaaatcagcgacttcgcacttccaagcagatcccttgaggacgcacttcaaattgctgcacagccttcgtcctccaatgcccatcagcacggtgctttcgaagcatgtcggagagaccaaccagctgtcaacgtaatatacggtgatcggaagcagacccaactgcgcgtatatcctcacatccttcttcatctgtgctgcgatctgagcggaggcatttctcagctttctcatgcaggcctcgctcaataccctttccacgcgtgcttctttctgcctgccacggaagatatcgacaacattgcagatcaactgcgccgcgaacatgttcatggagtaggcaaattcagcatcgcacggcccaggcattatctggatgtaatggaatggtattttcctgccgaaaagatctgaattaagaaacccatcatacgagggaagcgttttatcgtaatcgaaaaccggctttctgccaagctcaagagatatcctttcccactctgtcaggttttctccctcgcgtttcttcccacttttatcagcgcgcttcgcattggccgctgatccctggtcagaaggtggaacctccgagaagggctcgttagcctccggcggcggaacatcattttcacatgaatcatccatgatgaatccctttcttattcgcccgactcatcgttgagagggggtgtaagaaccattaaggcacaaaagccatcccccgtcaagttgacatttgattcttgtggataagtggataacttcagatgtttcaaacactttagaacaccctaaagataaattttatacccctaaaacattacaaaaaaggtggcatatcgttgaaaaagcaaagagaatccttctttggcgaaaaaccctaagttcgtctcaaaaacgcttagtaaaaatgaacggcattagccttcactgaaagataatgatcatgtttgttcgtatatgctcacataaagttatgttaccgggcatacactcctctaagtgcgctcaagaaaaataaaaaaaaattggctctgcggcattcgccgcagagccgtctgagaatgggctcccccacctggactcgaaccaagacaaagggttccaaagacccgtgtgctgccattacaccatgggggaatggcggaaaaccttgcggttaccgccaagtgtctattatgccacatgtcgccaacaccgcgtgtctcgacgtgtcgcactaataaaaaacgctgtttaaggtgcacaaaaagtgttatgcgcaccttaaacaacggtactcgcttcacttatatgggagttaccccacaaacatgcggaacgtacgctaagcatgcccgcgcaacgcgtcatcaggcgaacaagaagccctgtccgtgatgctccggatatgtgtcgaacaactcagccacagagccgtcttcgaacacagcacggatggcgctggccagcagcggcgcgatcgacagcacggtcaaaccgtcccaacgcttctcttcaggaatcggcacggtgtcggtaagcacgacttcgcgggctccgctgttcttcaaacgttcgacggcgggaccagacagcacgccatgtgtggcgacgacagtcaccgacttggcaccggcatccttaagcacgctgcatgcaccggcaatggttccggcggtatcgatgagatcgtcgacgagcacgcagtccttaccttcgacatcgcccacgactcggttggcgaccgcttggttcggacgggtgatgtcacgcgtcttgtggacgaatgcgagcggaccaccgccaagacgctgcgcccactgctccgcaacacgaatgcggcccgcatccggagagacgacggcaacattgtcaagctggttggagaaacggtcgcgaatgtagtcgaccagcaccggcatagcgataaggtggtcgacaggaccgtcgaagaagccttgggactgcgccgcatgcaggtcgacactcatgatgcggtcggcacctgcggtcttcagcaggtcgaacatgagacggcaggaaatgggctcgcggccgcgatgcttcttgtcttggcgcgagtagccaagcagtgggcagaccgcggtgatggaacgcgcggatgcacgcttgagcgcatcaatcatgatgagctgttccataatcgattggttgatcggggctgcgtggctttgcagtacgaacacgtccgcgccacgcacggattcggtgtagcgcacgtacatttcgccgttggcgaagtcgtatgctgtggtttccagaacatcaatgccaagttgttcggcgacttccgccgccagtttcggatgtgttctgcctgtgacaaggataaggtttttatccggctttccttcaaggattgcgctcaccatgtctccaaacgtctgttttcgcgtcaagtggacgtgacccatattaaccatctgcgcagaccgtctcacccgcgcgtgttcacctgaaatttaccggtacagtccgtgcttgccaatatattgcaccacgccgtccggtacgaggtaccaaacaggctccccatgctccgcacgtcgccgcacatcggtcgaggaaatcgccagtgccggtatttccaacgtatcgaccttgccttccggcagtttcaccccttccggcgatgagtacccggggcgggtcacggccacgaagtgggccagatcccacattttgtcggcgtctttccattgcatgatttccgcgaccgcgtcagctccggtgatgaagaagagttccgcgtcgggatgttgcgcacggatgtctcgcaacgtgtcgatggtataggtgactcccggacggtcgatgtccacgcgtgatacggtgaatttcggattggacgcggtggcgatgaccgtcatgagataccggtcttccgcgttggtgacgttcttgtcgagtttgaatacggggcgtcccgtcggcacgaagatcacttcgtcgaggtcgtacacccacgacacttctgaggccgccaccaagtggccgttgtggatggggtcgaacgtgccgcccatgatgccgatgcgaggcctgctatgccagttgccgcgtgctgaacgtcggcctgtggccaccgcggaacctgctgattccacggaaaggtcggacatgcgccgttccggttccaccacatagctgatggcaagttcggaatcggcttcggcggattcgggccgcatgcgtttcgggccggtcatgaggcatcctcgtttttttgttcctgatcggcgtccgcggtctcacggccgatgctgtctgccgttggcgatgcgttgtccgggtcgattttgcccatatcctcatcccactcgtcctgcacgacgcgcctgatctccgcgaaagtcggcagagggaagtccggctgataggcgcgacgcacttccgccacacgttcggtgacgcgaatcagcgtatcggtcatgccgtcaatatcctgttcgcgctccatggcgctgaatttggcgatgtactgttccatgagccgcatctgctcatcgacgcttttaagcttctcttcgtcgagttccaccacgtcttcggcatcgacttccggccaaccgatcagcaccgcgtcggcgtattcgagtgaagcacgctgtgccgccgatgcgatgccgtcctcgatctgcacgagaaacacgtatcgtacgatgcttaatcgttcggatgcgagcttcaatcccagataggggtcattgagatccgcattccatgggttcttagcgtcagtcattgtttcctccatctggccgtcattattgttgtgttcgttcatgcccgtacctggcctgttccgtagccgatccacttggtcgtggtcatttcgcgtagtcccatgggcccgcgtgcatgcattttttgcgtggagataccaagttccgcgccgaagccgaacactcccccatctgtgaaacgcgtggacgcgttgaccatcaccaccgccgagtcgatgcgtgaagtgaattcctcaatggccgaatagtcttcggcgataatggattcggtatgccctgtggagtggcggttaatgtggctgatggcctcgtcgagtgagtcgaccactttgacgccgatcttcaacgcgagatactcggtatcccagtcttcctcagtggcatgtatcagtttcaccccgtcaataccggttttgtcgatgatctcgtaggcctgttcgtcggcatgcacttcgacgtcggctgcggcaagcgctgtggcgatttgcggaaggaacgcttcggcgatgtcactgtgcacgaggagtttttcagtggcgttgcagacgccgacgcgttgcgttttggcgttgagaatgatggggatggctttgttttggtcgccggttcggtcgacgtagatgtgtacgttgcccgctccggtttcgatgacgggtactttggagttttgcacgacggcttggatgaggcccgctccccctcgtggaataagcaggtcgatgtggccttgggcctgcatcatggcgttggcgccttgacgcccgtattcgtcgacggaagcgatgagtgcggcatcatatccgtgttcgtgcaatacgtcggcgatgatgttgagggtggctgcgttggtgcgttcggccgcgtgtcctcctctgaggagtgccgcgttgcctgatttgatgcagagtgacgcgacgtcgacggtgacgttgggtcgtgcttcgtagatcatgccgagcacgccgatgggcacgcgggtttgttcgagtcgcagaccgttgccgaggtggtatccgcgcacgatttcaccgatcggatcctgtagggtggctacgtggcgcacaccttgtgcggctgcgttgacgcggggtacgtcaaatttgagccggtcgagtttgcctgcgtccatgccatgttcggcggatttctgcatgtcgatggcgttggcttccgcgatttcattggcgcgcgcgtcgagtgcgtcagcgatggcgttgagaagttcgtttttacgctgcgtgttggtttgggcaagttgcgcttgcgcgattcgggcggcgtcggctttggcgcacacctcgttgagcacatcgggctccatggcgttggattgggtctgtgggttcgtcatagtttcctagattagcgcgaaatcgcgccttgttccgtagcttcgaccattatttcgtcgtagcatcggaaacagggcgcgatttcgcacgtcacgtgtcctcagagatttatatccgaaaccgttctcgatcaaccgttattcgacatggaatcagtggatctgatcgagacccggatacagcgggaagtcttcggcgagcttgtcgacgcgagccctgagggcttccacgtcggcatccttgcctgctgcgagtgcggttccgatgatgtcggcgacctcttcgtattccttgttgccgaagccgcgggtggcgagggcgctggtgccgatgcgcagaccggaagccacgcttgccggacgcggatcgaacggaacggtgttgcggttgatggtgatgccgcactgggcgaggaggtcttcgccctgctggccgtccatttcgctgttgcgcagatcaaccatgacgaggtggacgtcggtgccgccggtgaggacgctgatgccgttgttcttgacatcgtcggacatgaggcgttcggcgaggatcttggcaccgtcgagggtgcgctgcatgcggtccttgaactccggagaggctgcgaccttgaacgcgacggccttgcctgcgatgacgtgcatgagcggaccgccctgctgacccgggaagaccgcggagttgagcttcttggcatagtcctgcttggcgagaatgaaaccggaacgcggaccgccaagagtcttgtgagccgtggaggatacgacatcggcgtacgggaccgggctcgggtgcagtccggctgcgacaaggcccgcgaagtgtgccatatcaacccagaacttggctccgacttcgtcggcgatttccttcatggccttgaagtcttcgatacgcgggtaggcgctccagccgccgatgatcatggccgggtgggtttcaagcgcgcgctggcggatgatttcaggatcgatgcggaaggtttcaggattgactccgtaggcttcggcatggtagaaacgtccggagaagttgattttcatgccgtgggtgagatgtccgccatggtcgagggcaagaccgagcacggtgtcgcccggcttgacgagcgcctggtagacggctgcattggcctgtgcgccggagtgaggctgcacgttgacgtattcggcaccaaacaggctcttggcacgctcacgggcaatggtttcgatcctgtcaacctgctcgcagccaccatagtagcggcgtcccggatagccttcggcatacttgttggtcagcacggaaccctgagcctgaagcacggcacgcggcacgaagttttcggaggcgatcatctccaagccgttctgctgtcgagacaactcagcgttgagtacctcggcgatttcggggtctgcttcggcgataggcgcgttgaacatgtcgttcggagtttgcgcgagaggcgatgcggtcattgagctctccttggcttggaggataaatacgttgcccgtacgaacgtgcaggcttaacgatgaagtgtacgtgcacaaatcgcatgagggaatagggcgtttcgaaacatggaagcaatcacgaaacaagcaggaaacaatcaccacccataaacacgcatcgtcccattccacggacgccaaacacgcttcttcccgcccataacgctacactcaatattgtttgacgttcattgtccgttctattgctaaggaaatccagtgaccacgttccacagcactcgcagcaccaccgattcactcacctccaagcaagccatacgcaaaggcatcgccgatgacggcggcctgttcgtaaccgactcactgggcgaaacccacgtagacgtcgcatctctcgcaggcaagtcctaccagcagatcgcattcgacgtgctgagcgtgctgctgcccgacttctccgaaaccgaactcaaggcatgcatcgatgaagcgtacggcgcgcaatggtccgacgaaaagatcaccccggtcaagccgctcggcgatgactacgtgatggaactgtttaacggcccgacctccgcattcaaagatgtcgcattgcagatcctgccgcgtttcatggcacgcaccaccccggccggcggcgacggcaacgagaaaatcatgatcgtgacagccacctccggagacaccggcaaggcggcgctcgctggtttcgcggatgccgagggcacaggcatcaccgtgttctatccggaaggcaaggttagccaggtacaggaactgcagatgagcacgcaggctggttcgaatgtgaatgtctgcgcggtgaagggcaatttcgatgacgctcagtccgctgtcaaacgcattttcggtgatcgtgagcttgccaatcgtttggcttccgactcgcatgtggtactgtcttccgcaaattcgatcaatgtgggacgtttggtgccgcaggtcgtctattatttctccgcttacgcgcagctgctcgaacagcaggtcatcaatgtcggtgatgaggtcgagtttgtggtgccgaccggtaatttcggcgatattctcgccggatattatgcgaagctgttaggcttgccggtcaagcatctggttgttgcgtccgataagaacaatgtgctgttcgatttcctgacttccggcacgtataaccgtcagcgtccgttctatcagacgatttccccgtcgatggacattcttatctcctcgaatctggaacgcatgctgtattacatgtccgacaaggacactcgtctgatcgccatgctgatgaacgatttgaaccagtggggcgcctatgaggttcccgaaccgatgctggccaagattcgttccctgttcagcaccggctgggccgatgaggatcaggtgcgtgagatgatcgcggattgctggaacaagaaccattatgtgatcgacccgcataccgcgtgcggttattacgtgatgcagcagatgcctcgcgatccgctgacgccgcgcgtgctgctgagcaccgccagcccgtacaagttcccgcgcgtggtcaacgagtccttgggtttggatgcttccggcacggatttcgaatgcatggacgtgcttgccgaggcgaccggcactaccgctccggccgcgttgcgcggtttggagaccgccgacgtgcgtttcgaccatgtcgttgacatcgacggtatggaaggttttgtcgagcaggccgccaaagctctgtaaaaactctgtaagcgaagcatactttcacatcgttaaagccatctccatcggccgtccgcgatatgtggacggccgtttttcgtcaaggctgctacagttgcatgctcggaggcgaacgagcatgacagcaccaacgatacccgcatctgaatcggtacgacagaagcaaccggcacaacaatcgaaccagcccgaacagccccggcgtaagcatgatcgtctcatcacccgtgatatggcgttggtcatgcttgcgacgttctgtttcatgtcgagcaatatgcttgccaatccgatcgttgccggatatgcggaatcgttgggcgcggacggcatgctgatgggtgcggtggccgggtcgatgagtttcatctcactgttctgccgccctatcgcaggcaatctttccgacaaaaccagcaagcgcacacttgtggcggttggcacggtgctctatttcgccgccggactgctgtactatttcgcaaactcccccatcatgctcatcatggctcgcgtgatcaacggcgttggtttcgcatgctgctcggtctgcctggccacgtggatgtcgcttttgctgccgatccggcatatgggtgccggcatgggagtgtatggcacgatgaacgcgctggctatggcggtcggaccggcattgggtattcgcgcgcaaaaatacatcggttatcgtctgacgtttttgagttcgctggtgctggcggtgatcatgctgctcgccacactgatggtgaagaatggcggacagccggtacgcaaaaagcagacttctataacggagaatccctccactgccgtagacattgacggttctgctagcgcaaccaaaaagcatcgtttttcgatccgttcgattctggaaccgcgtgtggtgccgttgtcgctgacgttcatgatgtttgcgatagcgtatttcgcaaatcagtccttcatcgtgagttatgttcagtctcgtcatctgccggtatcatccgacctgtttttcatgttttacgcggtcgcgttattggtgttgcgactgggcttgcgcgacctgttcgacagcaagggcttccgtttctggctgacggtctgctcgtcatgcatgctggcgatgctcgcatgcatgacgttcctgttcaatgattggatgctgttgttggctgcgattttcaccgctgtcggctacggtctgatgagttcagtcacgcaggcgcaggccgtggtaatcgcaggccgcgagcgcagtggtattgcgaatagtacgtattatgcgggtattgatttgggtatgtcggttggtccgtttgtgggtggtttggtgtatgggcatttgcctgctgtgtggttttatccggtgtttatgttggcgatgcctgttgcttggttgatttatttgttgtgtgtgaagcgtgtttcgcggtagttgttggcatcgtgtgcgaggtttctgccgtaaaccagtccaagcgcgtgtcgttctaactgtttttgcggtcggtcgtattttccatatacggcaatatgaccgaccgacgcccatcctggctcgtgcaaggcgtccatgccgaaggggagatgtcaggatcggtccttgccgccgtattccgttccagcctttccggctatttggcttggtggattttgttgcctttgaccatgtaggcacgtcgggtcatgtcgatcatgggctggtcgaatcggctgtctgtgtagaattcgtccactcgaacgttgtctccgtagagttcgcggaatcgtttgggcttgttggtgttgaagttgaggtagtttacgttcaacgtgttgccgtcgatggtggacgagaccaaatgttgcacgccaagcctgcggcaggcctcgcccacggtgatgtcgaacgaggcggtgaggatcgcatcgtcttcgcgtggcttataccagggtttgatgcgcttcatgttctgatcccagaaggcgttgaccaattcttcgaattccaacgattcggcaagttcgcttaaatatccgtggcatagcttgcccacaccgtattccatttgatcgaacgtggctcgtccgagcttgtatttgatggcatagcgcagtaccggggcgatgtaccgcaatactttcggattgtatttggccgaaaacaggtacaggtcgaacaggctttctccgtcatagatggttccatcgaagtcgaatacacgcatgtatgcagctctcacttcctcgtatgcgcgcattcaatacgcgccattgcacctcatgctaaagtccgaaggctgattccttcttacaccaaggtgaacggccggcgaccgcaatgtgcacaaattgcacatctcaatgcacattcggttcatgtcacgtttggaaggaggaaccaccacaacaacacagtcggaccgctattcgccccataggagccgttcgcgctgctgatactcctcatcgaacaacggctgggccttcgtgtcgatgagcttggcgaattccagatcctcatctcgttccacccgatgctcagccatattccattggtcatggtacgtgtaacgcaatgcctcggcatccgttttcagaacatgcgaccggtaaaggtcccgttcgaatagaagcgtatcaaccagccatcctggctcgtccggaaacttactgatgccattgacgtactccgcacgatacgcgtcatggacaaggacaggcaacgcatcgatacgcaaaagctccttgaacatgataagccgtccgattcgaccgttgccgtccgaaaatgggtgaatcttctcaaacgtccaatggacacgggcgatctgatatggctcgtcctcaagtttcgtgcacatatcaaacagcctgtccataaattcgggaacatcctgcggcagcgcggtccttgtcggagtgacaggattgccgataaagttcggccgagtcttgtagccgcccacgttgaaaagcgagtcggagacctgtctggtgccctgcttgagaatggcatgcaggtgacagaccatatcccggtccaccggctcatcagcatggtcgagaatccaacggaacgcagcaaaatgattacgggtttccaacgcatcatcaggattgacctgttcgctgccatccgtggtataggtaccggtggcaaatagctgcgcggtctgttttgcagtaagggtggaaccttccatatgattggaattccatgcgaactggatttgcgtggtcgtgtaaatgccgtcaccatatcgagtatcacgctctcggataagacgctccacgatacgttccgccataaccccatccttccttcattccgctcgactatcctcccatggtaattcatttaggctagaaaccgcggtggatgtcgtatatcctgcaggttggttccatgtcgaacgtgaccgtgtcgaactgttcgggatggtgtacgaacgtatcgatcagtttccattggcgacggctgatgccgatacgatagtccgggcggaccataagcaccggcgctttcggctggagttcctccaagagctgcgcgcgctgttcgaagcattcatcatcgtcgatccatacgatcggcgcgggttcattctcttcgcattcgatgcgtacgcgtcgttggatggtctgccatttgcctgtctcacgtccccatttggtgacaggatcgtaccaggtgatgacatcgaccagcatgggatcccatccgagcatcgggtcgagaatctgactgcagtatggctgccaggtggacagccaccacaattccacaatgccgtcaactgccaacgcgtacatggcgtcggatagttcgctggaccagtggatgcgccatgagcctacgggcgtgtgggctttttcgttgccgtccaagtggaacgctttttcaggattgtacattttcgcgtagggactgtcgggcttcgcccaggtcataactttgttcacgccgcccctgcgcaaaagcttgtcatccggaaaggcgttgagcaccccatcgaaatccgtgaacaccacaggcttggaaaacattttcaaatccgtcatcaccactcccctttcaatcatcaactatcttcttatattgaccttacggtttcctcattacgttttacctgacaaatactgacagcaccgccatcgttttatttgctatactcggattggttcggcacggacgccgaacgaccgcaggcacgaacataggcaaccgcaaacatggtccatagatgcgcaaaacatgatgcgcggacgcatccaaaaaagcggtcaccatcacgcaaaggagcgaaacatggcagacgaatcatcgaagattccagagaaaaccgtcgaacaaatcttcgacgaacgttatcccctcgacaaatgggaggattcaaactactcgatactcgacaaattctcaatgcgcggccgcaaaggcttcgtcaccggagccgcaggcggtctaggacgcaacgcggcggccgcgctcgcccaagccggagcagacgtcgcactagtcgacctgcccagccaagaagacaagctcaccgaactggcgaaagacatgagcgaacgtttcggcaccaacgtcatcgcgctcacctgcgatgtcaccaacgtcgaacaagtagccgaactcaaaacacaattggtggaacagctgggcaccgtcgacttcgcgttcctcaacgccggagtcaacgtaccgggcgacgatcaagacgccaccgaagaagtatggacgcgcaccatcaacatcaacctcaacggcacctaccgtaccggccgcatcgcgcatgaaatcatgcgcgaacacggtcatggcggctcactgatcttcacagcctccctgtccggacacaacgcgaactacatgatgggaagtccgacgccggtgaacgcgtatggcgccaccaaagcggccatcatggaacactcacgttaccttgctgccgcgctcgccaaggatggtatccgttccaacaccatctcccccggatacgtgtggtctggaattttcaatggccgtatcgacatgcctggccacgacgccatgctcgaggtcgtgccgatgcatcgtttcggcacgaatgacgagattgccagcacggtgctcttcctcgccagcgacgcgtcctcgtacgttactggcactgacattcgcgtagacggcggctacagcgtcttctaatcaccgtaccccatctgataaatggccggtcgcagctaatgtgcttcgaccggccatttatctggtaatggtttctagaacataccgctacacatgcttgcggcgtatcaacgtaccggcagtggttccggctcctgcaaggagaagcatgaccgcgataatgggaacgatgtcggagcccgtgcgaggcaagtccgcagtcggttttccatcggccttgctggcattcttgtctttcgagggctgcttgtcattcggcttggcctcgccaccgcccggctggtcatcaggcttcgtttcccgaagcttcagaccgtccaatgccgtgttaaggagcgtggcggcattggagacaagaccgttctgttcgctgctgaacgtggtgttgttccacagcgagagggcctgctcgtacgcttccgcgagagatgcgaccgtatcgtccgtgtatttgccgaattcggcaagcttggcctgtgccgccgcgatcggagcttcgagcgcgctcttgtcgagttcggtcggatcatcatacatggcctgatatcctgggatggtcagtttggcgagctgatcgtacatcttggagcagaggcgagcgttgaagttcatgacactgaaccctgcgcgggacaagttcatctgtcggatttccagattgtctggatcgtaggcgccttcggcgaacgtcatgtcggccgattcgctgtcggacgcgcccttgcctgttccgctggtgtcgagcgcgctgcccgtggagtagtcgaacggggtgccatccttgccgctccatgcgttgatgatgaggctcgacgtgcggaacgggtcagatccaactcctgcgtagttgtagaccgcaatgtccttgccggaggaaacggtgtcgccgttctcatcgacgaagtagatcgggttgccgtcgacgtcgagcggatacccgtcgggaccccacacgttgtcggtgatcactgcgagaccgtcacggtcggtatagctgcccatgcgggattcgcgatgccatgcgttgccggtcgtggccgtcggatgcagaaacagttcggctccggacgcggcataataacgaccgagttccggatagaagtggccgtctcaacaaatgtcgataccggccttgagtggcttgccgtccgagccggtccactcgggcatctcgaacatgaccggcgtgctgccaggcaacgaccatgcggtttcctcggatccggcgcgatgcatcttctggtaggagtcggtgtgcccgtcagggaacgctatggcggcagaattgtagaccttccgcacgccgtcgctgtcggtgatgagactctcggtgatttcagcttgggaggccgccatcttgtatgctgcggagtctaggtcgcttgaggaaacgtagccggtgagtgccgcgacgaaggccatggtggcgcacaatgcgacgctgactaccgccgcaaccgccatgttgagctgtcgtttgaaccatatggatttcgcggtgacgttcgctgccgcgtctttgttctccgttgtcgtacggtgcgacgtggatgtccctctcttcaacgcgccatgcttccccgaaatttccccgttctggaaaacatcataggagataaacggaattgtatgacagttcgttttccacttggcttctgaattccgaagagtagctaaagagtactcatgcccgattctgcgagcgcgatcatttgacgtttcctttgttgttgaacaccgttttgctcatatctcgcttatgtatggcagatttgcgaacttgtccggagatatcttgcttatatatggcaggtcagtccgtcaaagcagtaggtagggggcatgaaaaacctcattttcgcgaaaccgactgccatatataagcgagatgcctcatgtcacatcccgaaatctgccatacataggcgagatacagcctgctttgctcagcacaaggccgacagatccagaaaatgcgcacgatgacacgtttcaaaccatacttcgcgcaggatctttttccgatttgttcccttgacaggtctgacgcctactgtttggagttcgcggcggcgcgcaacgagtcaacgaactgtgcacacgcaaaggcgggtatgatgacgtttattctcgcttggtatcggcacttgaaatccgaagaacagtaaggagataatcatgtccgacatcaatccgtcagtagcctcggcagcacagaaccctcctgcatccgcacgactcgaagcaggactaacggccccggactttacacttcccagcgacaacggcggtagtgtcacgctctccgcattgcgcggccagaatatcatcctgtacttctaccctgccgcgatgactcccggctgcactaccgaagcctgcgacttccgggacaacctcgcacgcctctcttcacgcggattcaccgtactcggcatatcgaaggatccgctggacaggctcgtccgattccgcgagcgcgatcatttgacgtttcctctgctatcggatgctgatttgactgtgcatcgtttgtatggcgcgtatggtgagaagaagttgtatggcaaggtttatgagggtgtgattcgttcgacttttgtgattgatggcgatggggtgattcgtgttgcccgatacaacgtgcgtgcgaagggtcatgttgattctttgctgcgtgcgcttgacaagctcgatgattcagttttctagtctggaatgcgatgccgctttgtttataaatcagctttttcatgcgaatgacgcaagcagtgtcagtagcgggtagatgccgaattcctgatagtggtcgtgcagtgtgccgatgtcttcgaacatgggctcttcggcgagcctttcgaaggtctcgtaacggcacggggcacggcctcgtaagagaagagaaaaagcgcgatgagactcagacttccgacaataaatcatcgtcttccgacatgtcagcccacggcttgcgtgtgcggtttgcttgatcgtgttggcgatgcgttggctgaggagcgtgaacgtttggagttgaaggcgattgaaatgctgaagggaccgaaacgtcttgtgcagccggagccagtggatcatgcttggtgggatgatggttccggcgtgtacagcatcggctgagggagccggtaggctgggtgtgtaaatccagcagagaggaacgtgccatggtgacgcgtcgtaatgatgagcggacggttgcgggaaggcatcgcatgatgaggcgtgccgaccgtgaggtaaccgaaccacagcagatcgatgcgattatcgcaacgtgcaagatcgtgagtcttgcatacaccgatgcggaaggcatcaccatcgtgccgttgaatttcggatacgtgttcgatgcggaatccaatcatctcaccttgtatttccatggttctgcgaccggacgtaagatggacgcggtcaaggccgcgaacaacgcgcttcccatggcgttcgagatggcgaccgactgcgaggtggtcgaaggacgtacgttgtgcaattggggcgaggcgttcaagtcgatcgtcggcaatggcaccgcatccatcatcgacgatcttgacgaggcacgccaggggctcgcactgctgatgaagcagcaggccggcatggaacatgcggaattcaccgaccagcaggtacgcgccgtcaccgtatggaaggtggaagcggactatctcaccgccaaagtacgcgaaaagccccagctgcatacgcactgacctcataccgcaccttgacgcaatgatgcgctgcttccaagcccgaggatgggaattgggaacagcgcatcagatgtaaaacgctagaccgaagtccggctgcggccaagttgcaagtcaggccgtaacctggtcgagataaggtttcaaatcaagccttccggcgggaacgccgcgcgtagcttcctccaaaaatcgcggaggacaccatcacgacggtcgccacgatggcgggcgtcacgtttgaaccggttttggcgagcttgaccgcatcgccgccgttcgcggacgatttcaccggatgcttccgctggccgttcgcatcattcgcacccggagccttctgcgaatcatctggtgtcgattcatggcccggcgtttcaggctgaccttcctcatccgtcagtcgggcatcaaccgtggttcccttaccattcaggcagcttttcagctcgctttccttataccaggtcgaaccatccgcaattggcgtgcaggaatcgttgaatccgatttccttctcgttgtacagcattctgaccaacggctgatacggctgccccgagacgtccgtaccatcacgcacaaccacatcccactgcacattcgcagccatcggcgtcacactttcgccacgccacggattattctcatacgtgtacagttcactcgcctgctgctgcgatccaggcagcttcagcaatgccgcaaacggaataatggtttcggcatgtgcgaatcggaacgtcgcggcggtgccggcccgctccctcgtgtcgatcgcattgaagaaatcgtcgagcaacggctgggcaatgcggtaggtctcatcctgacctgcgcgccccggtcccttctcatagaagtcctcggcatcaagcgaccaagcaaacgtcttagcctcctgggcgtgctgaccttggaagtactggtcgaaattgaacgtgtgggatccggtgttctcctgttccatatcggccgcgatgatgtacagattgtacaaatccattgccgcatcctgttccgacgcgatcttcttcttggcgtcaccgcacgcgttcgcatccttggcagggtcggcgccagcagcgcaattggccgcaccttttttcgtgccgtcagccgtgttgtaccagatgcgctggccttcctccttgccgatggacgcgaggaaatcgtcagtgaagatttgagagagcagattatgcgaagcggtggtcatggacggatcgttcgtcacgttttcctcagcttcggcgatgcccccatcattcgcgacgaactgctggtaacgttccgcgcgctccttggcctcgcccgttttctgcgtaccatccggattatcagtcttatggaaatacaacgtggtggtgttcttgtcgaaattcttgccggaattgttatccgcaggattattcggtgctacaaccgcattcgccagcaaaccgttggaagcctgatcgaatcctagtttgaaattctctccggattcggttgcacgaggctcacccgagctctggtatgagacgcgcagtccctgctttgcggcattggcgaacagatcagcatcacgctggtatattctctcaccaatgccctgatgctgtatggcgccctgaccagagagcatgccatacccgttgcccacgttgaccgcagtaatggcattgacattgttgatgaattccttgccaacctctgggctaacgaatccagcataattgttttccgcagcagactgggccatcagtgccagcaaagcgtcatacttgtagctcgacaggccacgcgagccatgccttgccacagactcggtgtatgcaagatggtatctgctcggaattgctgaatatgatgtgctcgccggtgcaacatacggctgcttgctgctgtaataccgggcggttccttccccagccaaagccgctggcgttgcgagcatggccgctgccactacagcgcttgtcaacgcgagcatgccaccgcccaccgatttggtaccgcgtttgcgccaggctcctgcctgccgctgttcctttgttgccgtatggtttttcgccattatcctcattcttctacctcttctgctttgccacattgaagctgtcagacaagccagcccgggcgacaaaataggctcggaaggcgaacacgcaacgccttaaacgtgaacgatcgacaaataatccgcgaaccgtcgcttagaactcaagtaagttgcacagccgcaactcccccaccccatggattcacgatgctcgacgtatcacagaacctgctggacaagttccaccgatttcgctgcggacacccccaatcaacgcacatcattatgggctggccgattgtcgacttgacacgtggaaacgtccccgcctttcacgtcaggaccgaaaacccaaagtatgcaagaatccggacgttacaggatgcggacgttttcttggagactgaatgaaaggattatcgtatgttcggtcccgaggaacgacggcgcggaggggtccttcggatgcatgaagatggagtccgtccatcccgggcattgggaggaacgtacccgcgacgaggtgctcgtcccggtcgacgactgcatccgctggtacgaccacgagcgcatcaaacggtcgctcggttggatgagtccggtacaataccgtcagagccagggaatggctgcgtgatcatctccaagaaaacgtccgcagcccctctgccatttgcgatcagtcatggcacgctgattccaatgggtttcagcagtacgctggatgacgcattatcgcaaagcgtcgaacacgccatcgatatgattgccgccatgttcgagatgccacgtcaacaggtgtacctgctgttgtcagccgccgccgacttcgacgtgacgcaagccgttgacatcaccaaaggcgttcacggtctgattgatctgtcgatgtttcaacaactacccgactatgaacggacgatacgcgatattggaaacagcagatggactgccatgcggcgcatgccttattggcccagcaggctcagacaagtcactgattggtctagccaaagaactctataagggatggaataacagatggtttccccaacaaacaatcatgcagcaagatagcaacaccacccaggcgacggatcgcgccgaaacggacgctctctccttcggcgcgaagaaaatcgcaatcatgattggcgtgggactcatcgccggttccctacactgcctatgttgatgaccatgccgttggcgtagctgatctacctgtgtttccgccgtatcatccatccgactcgcgcataaccgtccatacgggaatcctcgaacgcaagtaaatgtcgcttccgtcaatcgtcgaccgcaagaggcgttcatggagcggcggatttccttatattccaacaaaacccgtactgttatgcgacacgtaataacagtacgggttttctgtgttactgttatatataacagctaaacagtttgcatctaactgttcggccgggagatatatcacctacgaaacatacagaaaaagaggcacagattgaagctgatcatctcatccgtgtccggagaaccgatttacgaacagatcaagaaccagatcaggtccgcgatcatgtcgggtgagcttacagcaggcgaggcgcttccctcactgcgcaagctcgccaaggaactgcgcgtcagcgtgctcaccgtgaccagagcgtataacgaactggccgacgaggggctcgtggagaatgtgcagggcaaaggcacattcgtgatggaacgaggcaacgaactcatgaaggaacgtgcgcgtgaacgcatcatggacaagctccgtgaagtttccatcgaggccaaagccgccgacatcagcctacttgatctgcttggcatgttcgagaaagcgtacagggaacaatcatgaacgattcctcactcccccaaggaacgcggccaaccttggccttgagcgtaaccggattgacgaagcattatgattccggcttcacattggatgacgcgaccttcgacctgccgtccggctacatcatgggtctggtcggtccgaacggagccggcaaatccacgttgatcaaactgatcctcaatatgaccgcgcgagacgcgggacgaatcgaagtgctcggccttgacgcgatggccgatgaggagcgggccaaagagcagctgggcgtagtgctcgacagcagctatttcatcgaatacatgacggtcgacgcggtggaacggacaagcagcccaatgtacccgctgtgggaccacaatctgttcgacgcatatctcagacggttcggactcggacggaacaagaagatcaaggatctgtcgcgcggcatgcagatgaagctcatgctcgccgtggcgttgagccacgatgcgaaactgctgattctcgacgagccgaccagcggtctggacgtactgtcccgcgacgagctcatggacatcctgtccgattatgttgcggatggcggacacagcgtaatcttctccacgcatatcaccgccgatttggagcgttgcgcggatttcctcgcgtatataacgaacggcatgctgtattacagcgggccgaaagacgagttcgaagacgcgttccgcctggtcaagggcggtccggatgagcttacggatggtctacagcgggcaatggtcggcatccgcacatacgcaaccggcttcgacgcgttggtccgcacgcaggacatcccacacatcggcggcaccgacggtctcctgacacagcatgcttcgattgaggatgtgatcagactgaccaacgccgcggcacatacggcaatcggcaataccaacgaaggagacgtacgatgaacacgacagcgaacgcggacgccatgaccgccatccttaggcagatttccttggactggaaccgtaccatcagctacgggcggtcgtacatagccatcttcttcgcgtacgttccaggtttcacatgcctgatggcggccacagggtccactctcgacagcgttgcgggagccgccatcggcggggcggcctccggcttcctgatgcttaatatcaccctgttctcctatgaacaaatgaacaaccatcattggatgaacggcatcgtgcccatcaaccgcaaccaccagatcctcggacgattcgcattccttatcgcctgcgatctggtggcgggattggaagtggccgtcagcatcgcctgcgccggcaccatcatgcacgagccagttaaagtgacggatgcgatcggcttcgccgcgatgaccgtgctgaccctcgtgctgctcaacgccatcgtgcagccgttcctgtaccggttctccccttatcgcgccatggccgccattattctgagcatcggcgtgatcgtgggcacggtcatcggactgcgcaaggcattgccggaattcgaaaagaccgtcgaacagctggccgaggcgatcagccggcaccaagccattgcgttagcggcattcttgatcatcgacgtactcgccttggcgttctcccgcaagatatcgctgcatatttacggcagcaaggacatctgaaccaagccagccggtagactcttatggaacgtatttggggtcttccgaatcaacggaaagccccaaatgcatatatccccgcacgacgccggttcctacaatacggcaggcgcgtcatggaagtcgaacatgacaccatccgccagaccgcaaatagccggccaatcggcatcggacgaatcgtcgtgcatggcccataccttcatgccaaccgacttggcggaacgcatgccgatcagcaaatcctcgaacacggtgcactcccccggctcgactccgaggcgagatgcagccaacagatacacgtccggctggtctttgccgacgtcgccggcatcatcgacactgaccacttcatcgaagtagtcgaaaatgccaacatgcttcatcgccggctctctcagcatcggcggcagcgatgtggcaacggcaagtttcgctccactctctttcaattgagcgagatattcacgtgcatacggtttggcttcgaccactgtggcatacatgacgcgggccatatgatcccactcatccatcagctcttcgggagtgtcggtaaggctgaaacgcgcaatcgtatattcggcgatctggcggaattgcatggccgcgactttcgtcatgtaatcgtccggcacgtcaatgcctcgttttgaaagaaaatcgatgtcaacctgatcccaaacgcccatggaatcaagcagcgtgccgtcaagatcgaaaatggcgcccttgccttgattgcctgccatcgatatcctcctttattattgtgcatcttacgttaatcgagaaccgatgatttgagcagttcttcggcatgttccagcgacgcttcgctttcactgccggagagcatacgggcgatttcgtgcacacgcgcctccccacgcacttgattgatggtggtggcgattgatccgtcatccatttcacctttggcgaccacgtactgttcgtccgcccaggatgcgacctgtggcagatgggtgacgacaatgacctgcgcggattgagcgagtttcgccaatcgcgcgccaagctccaccgcggttttgccaccgacgcctgcgtcgacctcgtcgaaaatgaacgtcatgggaggtacggaaccgcccgccaccacatgtttttccgccgcaacgagttcaagcgcgagcatgagccggctcagctcgccgccggacgcgcttttgcccatcggcatttgcggcgaacccgggaacggcgtgaacagaaaatcgatgccgtcagcgccggaagcgtccaaatgttcacgttccgatacacggatctctagtttcgatccgctcatggcaagagattcgagttccgcagtgactttggcggcaagttccttcgcggcggcggcacgtcttttgcttaccgcacgcgccgccttcaacgcctcaccgaacagtttttcacgttccgcctgcaattgactaactttttccggagacgcgtccagatcctccaagtcgaacaccgcttgatctcgccacgcgatcacgtccgacaattccgggccccaacgacgaaccaattcgtcaagctcatggatccgcccgttgatggcgtccaagtcttccatgccgagatcattgtcgacttcgcccgacaaggtgaacaccacatcagacaaatcagtgctgatggaatcaagccgatcggccagttccgaaaacacgccgtccacatgaatggcgcgaagcgcttgcgacgcgcgatcaatcagatcggtggcgctggatgattcaacatcgtcaacaacctgcgaagcatccaacgcgctcaacgcacggttcaccccttcggcgatctcggccgcgttctcaatgcgatcacggcgagcacgcaactcggccatctcccccggctgcggatcgatgcggttgattcgttcgatggactcgcgcaggtaatccgcctgctggcgcatggacgactcctggctcgacaatcgctccaaccgctcatccatggcacgaagcgcattccaagccttgccgtatgcgaccaacgccacatcatcgccggcatagcggtccaaaaactcacgttgccgcgccgaagacgcgatacgcaactggtccgcctgaccatgaatcgtcaccaactccgctgcgatcgaccccagtacggaacgaggcacgctacgaccagacagcatgctgcgggaacgaccggaggcaggaaccttgcgagacaggaacagttctccgtcttcaggttcgaaacccgcctcgtgcgcggctgcgaccgcggccggtgacgaagcgacctcgaacacgccctgcgcccacgcctcgctcgctccgaccgacacgcgcccaccgtcggaaggaccgccggaaatcagccgaatcgcactgagcagcatcgacttgcctgcacccgtctcaccggtgatcgccgtcataccgccggcaggcgcgatcagcgcggaacggatcggcccaagattatgaatctcaagttcttcaagcatcagtgtttttactcgttcgtttctttatcttccggaaacacatgcccatgatgcactcccccggttttacgcgcctgctcgcgccaaccgacaacaggaagatcgaatttcgtgaccagacgattcgtgaacggcacgccggaaagacgggccaggcgcaatgtgctcttcgattcgcgcacctcaaccctagtgccccgcggcaacgcgcattggcgacggccatcgcagcagatccaaccatccgacgtggaatcctcaaggatatcaatggcgaatgtggaaccggagccaataatcaaagggcgcgcgaacagggcatgagcggccaacggcaccaactgcaacgccttcacgttcggccacatgatcggtcctccggcggagaacgcgtatgcggttgagccggtcggagtcgacacgatcacgccatcgcagccgaaggagctcatttccacatcatccacacgaatcgacagttcgaccattttgccacggtctgcacgctccaacgtgatgtcattcaacgcccaatcctcaatcggctcgcttgctcccggcagccacacatcgacatgcgcaatcatgcgttcgtcaatggaataatcatgctcggcaaccctgcggatcgcctcactcatctggaagctttcaaactccgccaaaaagccgacatgccccaagttcacgccaagaatcggcacactggtgcagtgcaccagttcagccgctcgaagaatggtgccatccccgccgagcaccaccacgatctcagtacgttcagaaaccaccggcggctgcttgccgaaatccggcgcctcgatattgtcaatgatcgacacttcgaaaccggcctgggtcagctgcccgacagcctcctcaaccaccgtgccactctccctcagacgactatgcgtcaccaccaccgcatgacgggtaccgaacatcgttaatccctttccagcaaaaggaaacgccctatggaaaacgcccatgaagacgtcaccgacctccagtgtaatcgaacaaatgaacgaaaaccggcaatgcgcgtcgaaaacatgccaaaacccgcgaacacgcctcaaatccgtctccgatgcaagccacgaatcaggaatgtcagccgtcaaatagcctgttagtcgcacatatgcttacaatagctcacaggaacgaagaccgaacatcgtaagaaaaggagagaggaacggcatgtcaaacctcgtctttgacgagtcctcctccaatcgtgaggcctcacatggctacgcatggtggttctcgggagatactttcgagaaggccatggcggaagaccgcaagccacgcaagcgcggcctcacgcgccgactcgtcaaccatccaggccgtctgaccatcttctactttctgacgctcgcggcgttgtccactacgttgctgatgacgcccattgccacgccgaaagacgaaaccaccacgttcaccaccgcgttcttcaccgcagtatccgccatttccacatgcggaatctccatcgtcaactccaccacgcattggaccaccttcggccaaggcgtgctcatcttcgccgtgcagatgggtggccttggcgtcatgacgttcgcctccttgatcgcattggccgtgaaccaccatctcaaggccacgcagcgcatgctgaccgccaacgaactcggcactacgaagctcggtgaaatcaaaggcgtgctcaccgtagtcatcaccaccacattcgtcatcgaaggcatcacattcgtcgcattgttccccggcctctacaaggtcaaccacggtaatgtgcgccacacattgtgggaatcgctgttcttcgcggtcatggcgtacaacaatgccggcttcacccccgacggagccgggctgcatgtcaacaactgggcggtcggcctgccgatcctggccagtgctttctgcggaaccctcggcttcccggtgttgttgaacctgatgcgctcctggcgcatgcgccgtcctccgaagcgctggagcctgcacaccaagctcacactgaccaccacgttctgcattgtgatcgcctcgttcacgtggttcctgctgatggaatggaacaacaagctgctgttcgccggagacggcatcgagccgcgcctctggcacgccatggtcgcggccgtcatgccacgaagctccggttttgacctgtcgtggatgccaggcgtcagcgacgcaaccaaagtgttcctgtccatcgtcatgttcatcggcggtggcagcacctcgaccgcaggtggcatccgcgtcaccacgttcgcggtgattctgctgacttgtcgtgccgcattcaccggacgccacgacatcaacgcgttccaccgccgcatccacacgcaggcggttatgaccgccgtggccgtaagtacggcatgcctcatgctggtcaccgtggtgtcgatggcgctgatgatcatcaccgactgctcgctgtgcgacgcactgttcgatacctgctccgcgttcggcctaggcggctactcggtgggcgtggccagtgaaagcagtcccacggtgctatacattctcgccgcaaccatgttcatcgggcgtctcggaccgctcaccatcgcctacgcgatttcgcgtccacacaatctcgaggccgtccgctaccccaccgagcagattgtggtcggctgacgatacggcttcatatacttgcagttgcctgcaatcacacatgaatatagatttttgaagacggaatttcgaaaggtgcataacatcatggccaacaacaccagaagcgttctcgtagttggtttggggcgttttggcagctctgtggccaccacgctcgacatgatgggccaggatgtgctcgccgtcgacaaagacggcgaactggtgaaccgttggtcttcgcagattcccaccgtgcaggccgacatgaccgatgtgatggcgttggagcagatcaacgcatccgatttcgacacggccgtcgtggctatcggcgacagcgtcgaagcttccgtcattaccgccggcaatctgctcgacgccggcatctccgacatttgggccaagtccgtgtcgaaggaacacgcccgcattctgcaacgcatcggcgcacgccacatcatcaacgcggaaaccgacgccggcaaacgcgtcggacatcttgtgtccggcaactatcttgactacatcgagcttgaaggcgcatacaacgtcgtcaaaatccatacccccgcgcatgtggtcggctacaccatcgaagacgctcgcgtgcatgaacgcttcggcattaccgtggtcggcatcaaatcgccgggcaaggaattcgaatacggttcgaaagagctcatcatgcaccgcaacgacgaactcatcatcatgggcaagcagaatcaaatcgaccggttcctacgcagctgacacgctctttccatatggaaaaatccggaatttcataatcatgatttccggtttttcttttacttatcttatttgccttgattacactgcagacacggttctctcaaccggtcgctgtttcactgcatgaccgcgtacagcagatattcgatattgccatgcgtgccttcaatgggagatactgttgtggcgcgcacgtcaagcccgttgcgttccgcgcatgccacgacggaggacagcgcctgttcgcgtaattcctggctttcgacaatcccgtttttcccaaggttgcctttgccgacctcgaactgtggtttgaccagcagcacgatctgcgcctgcggtgcggcgattcttgcgatcaccggaatcacatatgtcagcgaaataaacgatacgtcggaaacaatcatttccggacgatacggcaaatcctccgcatacacgtcgcgaatattgacgccgctcatttcgataatacggtcgtcatgcgcgattttcggatccaattgcccatggccgacatccaaagcgatgacctgcgcggcatcattgcgcaatagcacgtcgcagaaaccgccggtggacgcgccgatatccaagcaacgtaatccttgcgcggaacgcaatccgacgtcggcgaaccgttcgaacgcgccgacaagcttgtatgcgccacgggaaacgtagccgtctcccctatcggcggcgatgacgtcatcaccaccgactttcgccgatgctttggtgacggtgacaccgttcacactgactttgccatccgcgatcagacgttgcgccttggaacgactgtcggtcagaccacgttccaacaacgcaacgtcaagacgaacaacctgagtggaatcactgtttcgcaatggttttccaataatcggtacgaattgttcgttaggaaatacggaattccggaacgatcacgccactcacatctcgcccgctgtcggccgcggcccacatggcgcagcatgcggcacgcaacccgtcgacgctggtgatgtcggtgacatacaggcggtcgccgtcaacgcgggccttcgcatcgcggcacagccatgcgccctcatcatgcaccacttcaggagcgggctcgttcaagccccgcagatctttggcgatgtaggtcgggcgaagatacgccggagcgaacatgagttcgcgcggatcggtgacgccggtcaacaccgcaagggaatcgtacccgccccgattgcccgcctcgatatcggtatcgagacggtcgccgatggcgaggcactgttccttgtccaccggctcgtcatcatcatgggctgcgagaatgcgtgcctcgtcatacatggcggattccggcttgcctgcggacgaaaccggttccacaccggtggcattgatcaccgccatgatcatggaaccgcatcccggcgcgatgccaagctcacgaggaatggtcagatcacgattggtcacgaaataggtcgcgccatgctcaacggcataggcgatttgggccatttcgttccaagacatgtcgggataccatccttggatggcggcgaccggctgcgcttctgcggaatcgacgacttcaagaccttgcttggccacttcctcacgcagatgctgggcgccaagcacgaaaaccttcgaaccttcaggcacggcacgtgccaccatgcgcgcggcgacaaccgacgaggtgatgacctgccaggattcgacatccaaatcgaaccccttcagctggtctgccaccacggcctgaagtcgggacgaattgttggtggtgtattccaccgtcatgcccaaggattcggccttgcggatattcttggcagcatgttccaccgggttcttaccacggtagaccacgccgtcaagatcaagcagtgccagcgagtatgcttcgctgagcggctgattcgtggacttcagcatgcgggccacgtcacctcacttgttatcttcggaggattcggaagaagcatccgaagactcttcggcctcttcagcctcaccgtcatcatcggcgtcatcttccgcagcatcgtcagcttctgccggctcgtcatcggattccgcgcctgcttccgtctcttcggcctcaagctgggtttcgtcgttggtttcgccgttctcgtcgatggcttcggattcgtcttcctcattctcagggtcttccggagcgtactgcgcgtcatcttcggaaatgccaagcacgtccatgagttcgtcgttcagctcctgcatgtcgtattcgacaaccagatcgtcggaagtctcatcatcctcaacatcggcgtactgcagttcgagcttgtcgagcagacgatccaatgcgatggcctcatcggtacggccggcctcttcaaggaaatactgttcggcctgcaccgcacgcatgcggtattcgccggccaatcccttggaacggcccagcgtgtgcacgatctcgatggccttgtcccacatcttcagatcgcccagagcgccagcgtacaccaagaacatttcagccttggcttcaccgcgcagatacttggcgtcgtcgctcacagccacttcgatggccttcttcggctcgcccacgccacgctcgcagtcggcgatgaacggcagataatccaggaaaccgttcatacggaacgcggtgcggaactcacgcaaggcaagcttgtaatcaccctgacggtatgtcacgaaggcgagtgtctcgcgggcgaaatcgatgcgggaagcctggcgggccacccacttggcatgttcgagggccagctccgggttgctctcctcaagcgtgtacgcggcaagaatgtgcagaccaatgttttccgcatgttccttcgacaggccacgcaggcgttcgcgatcgtcggtggtgagcatacgccattcgatgcccttcggcatcttcggctcatcaggacgacgatgcgtgtacgggttctgcgaggggaagctcaccgtgccatcggaattgcggcgcggcttggccatgtactcgccacgcttctcctcacggtaggccatcttctcttcgcgggtgaactcacgacgctcctcgccctgctgctggtcgcgatccttgtggaagtcacggcgctgatcgtcacgacggaaatccttacgatcgccatcacggaaattacggcgtccgccatcacgacgatcattgccacggtggtcgtcacgacggaagttacgacgatcaccatcacgatggaaatcacggcgatcattatcgcggtggaagttacgacggtcgccatcttcacgacggaagttacgacggtcgccgtcacggtggaagtccttacgatcaccgtcacgacggaaatcgcggtcgcggtggaaattgccgccattgcctttgcgatatccgcccttgtggtcgtcgctatggaagcctccagccttgtggccgtaggacttgccgccattgccacgcggcttgaatcccttgccgccgcgattgcccggcttgcccgagccgtaggacttgtggttgccataggacttgccgcgcgatccgcgctgttcttctgccatgctgttccttatattccttgtattccttgaaaatggtcttcgtttgttcttcgcttacgtttgcttgcgccgctcgcgattgcctcacgcgttttcgacgacgccaagggccttcttgccacgacggatcaatgcgaaacggccatgcaggaagtcgttttcgttcaaaatctgctcttcgtcttcaacacgggcgttgttcagatacacgccgccggccttgatcgtcttgcgcgcttcggaaatcgacttgaacagtccggccttcatgccggcttccgccacacggtcgcccaccgcggccttggcgaactcgccgtcgatcttcacaccgtcaagagcagcttcaagcgtagcctcgtcaacacctgcaagatcgccgccacggccgaacagcgcaccagccgcctcaatggcctgtcgggtagcttcctcaccatgaaccaggctggtgacctcccaagccaaggtacgttgcgcctcacgcgcgcccggattggtcttgctttcctccacaagacgttcgatctccaccttcggcaggaacgtgaacaccttcagcaggttttccatctcgctgtcgggacggttgaaccagaactggtagaacttgtacgggctcagcatagtgccgtcaagccagacggcgttgccctcggacttgccgaacttcttgccctgagcgtcggtgatgatcgggctggtgaacacgttcacatccacgccacgtaccttgtggatcaggtcaagaccggacgtgaggttgccccactggtcggatccgccaagctcaagcacgcaatggtattcgtcgaacaggtgcaagaagtcgttgccttgcagcacctggtagctgaactcggtgaaggaaatgccatcttcggaattcagtcgacgggcaacggtgtctttggcgagcatggtgcccaaacggaagttcttgccaacgtcacgcaggaagtcgatgacgttcatggaggcagtccaatcgtaattggacacaaaacgaaccgggttgctgccttccacctcgagaatgccgccgatctgcgccttcagacgctcggcccaaccagccacgacgtctttcggattgagcgtacgttcgcccgactggcgaggatcgccgatcaagccggtggcgccgcctaccagagcgatcggatgatggcccgctgcctgaaggtgacgcatgttgatgagctgcaccagattgccgatatgcagagaggcagcagtcggatcgaaaccgcaataataggaaatgggatctccgttcaacgcttcggcgagtcgatccctgtcagtggactgggaaatcaacccgcgccattccagttcatcgaggacggactcgaaaccggcctccttgaaatcgatgacgtgagccatagctgtgttttctccctattgaattgcggatgatactgcgttttacgcatcctacagtttcgcagaagatgaagacaggcacacgcggtgtttttccatcatccatcaaccatcgtgcatacaagtaaagttagaaggagcatccccataccaagaagggagatacgtgcatggaccgcaaaggcatgaaggttgcggccaagaaagcccagagacaacattattggatgatagtcgtcatttgtctgttctcttcggtgttcggtgttgcgtacgcatcatcgacgctttcggtcaatatcaacatttcggttagtaccccgcaaacagaggattccacgcaatccaacgatatgtatggcgtattgcgggatcttgccataggcaatgaagacaatgcccgtgaaaaagtcaagcaaaaccaagagcagatcgtcaacaacgataccgatgccatgttcggccgccgtcgcggcgtaatcgcgtccctgctcaactcgtttgcatcaggatcgctggtggttgccattgtcgatgccgtcaattccgtcatccataacggcggaatctccattgcggttccaatcattctttcttttgccatctatattttcatctggctgttcattcaggaaacgtatcgcgtcgtcatgatgcgcatgctgttggaaggacgatcctacgacaaactgccggcatcgcgcttcctttaccccatccacacgcacgcatggcctcggatagcctggaccatgttcgtggaaaacgtgttcctgttcctttggagcctcaccatcatcggtttcttcatcaaacagtattcctaccgtatggtgccgtatatcattgcggagaatccaaacatcaaagccttggacgctattcgcctgtcccgacatatgatgaaagggcataaatgggaatgcttcgtggcggactgctcgtttcttggctggtatctgctcaacctcgtcacttttggtctgatcggtatcttttactccaatggatacaacgccgcatttttcgccgagtattacgtgtatctgcgcgcgttggccaaggacaacggcattgaagacgccaagatgctcaacgacaaatacctgtatgccaaggccgatccgcaaacgcttcataccgcatatgccgacgtcgcccagtccgtggcacagctcgaacagggactctcccccgcccccaagccgcgtggattcaccggaatcctgtccgaatggttcggcatccgtattctgcatgccgatgcggtgaaccgttatgaggaatatcgcgaggatcttcatcaaatgcagaccggcaaggatattttggaaggtaacatctatccgggacgtctcgcacctgctcccatatcattcaaattccgcgaatcacgtacgatcagtgccgaccgtagctattcgctggtcaatctagtcatgatgttcttcatgttctgcttcgtcggctgggtgtgggaggtaagtctcgcatttatttccgaaggcatgttcgtgaatcgtggaaccttgcatggcccttggctgccgatctatggcaccggcggagtgatcattctggttctgctcaaaaagctgcgcgagaagccagcacttgaattcatcgcgtccatggtgctgtgtggatgcttggaatacttctcgtcgtggtatctggagatgacgcatgacggccagcgttggtgggattacaccggatactttctaaatgtcaacggccgtatctgcgccgaaggattattgacgttcggccttggcggattggccatcgtctatttgctggctccggccctcgacaatctgctcagccgaatcgatacgcgaaagcttggcattgtggctgtcatgctgctcgtgctgtattgtgccgatcaagtgtattccgcacagcatccgaatatcggcgcgggcatcaccgattacaagggatcagatacgtcgcgggaagcgcccattccgtacgaaatcagtaaacgatccaatggactgccatagcgtgattgtcatgcaaatcgcatattgcaaacaataatggaaatcgcctgtcgttctttcgagcgacaggcgacttcatgtcgttgcttattgcgcgattatttgcgacgcagcatttcgtgcagagtttcgatgatcttgctgtatttgatggaatccgtgaaatgcaggcgtgggaatgcgttgatcatacgacgctgctgcttgttcaggatagatgcggcagtggcctgcatattggcaagaatctcctgcgaagagtccgaccaatcctgaactttgtcttgtaccttgtcacggaatttgtctcggaaaacgtctttgccccattgcagagaatcgccggccttctccgcatatgtctgcacggtttcactgaacttcgcaagattatcggccaaatcgatgatgccaagcactgtgataatggtatccacgacgataagcgccataaaaatcgtacacatccaatgcaccgcaggcaaaggaatcatctgtgtgacacgattcacttcaggctgtatcacatcggtgatgagcacacccagcaaaccgaacaccaccgctccaagcaaacaaatgcgcccttgaatgttgaatcgacgatcactgtaatcccaccaccgcgcgcggaatagcttctccatgccccatgacgtgacatattcaagcatgcatgcgccaatcgaggagatgagaaaaacagcgaagggattatgcagatcatgcagcagcacaatcgcaagaacggctccacaaccgtagatcggacagacgggaccattcaggaaaccacgattcaccaagcgacgttccgaaacggacacaagaatcgactcatatacccatccggcaaatgaatagaacagaaaccataagaacaggtattccaacaggagcatgcctttgagccgtcactttccacttgtgcacgtattggttttagtcttatagaaacggtcaaggctgaacgtctcccgtgtggcgctgatcttatctgcgatagtcaccaaatacccttcaagataccgaggtggtatcggtgtcaaaggaaacatatggttctcaatgctgtcacgttccactctgttgagatggaaatcgcgcatggcattgcgcatggcggtgccaccatgggtgaaaccatgcatacgatgacggccaccatcatgagcatgccagtcgtatagaaaataatcatgcagcaaagcggcacgaatcaacgaatgcaaatccaccctatgccataagtgcagcctgtctgcgatccatacggtcagacaggccacacgaatagaatgcgcaaacgtggtgaccacgccatgctggtaacagactcgttcgatctgcatatgctcatggcatagtatttcctggccgtgaagtcgaacaagctgctgtatctgcgttcgtgtcagtggcaccgctttgcctttgctatgtactgttgctgtaattatttgagcaatgattccggcgtcttgtatgccgggccgtcgctgacggagttggcgaaggcacgcagctgttcgatggcggttttcgcggaaacgatttgctcgcgcacacgcagcggagacgtgcctcccttgccattgcgtgcggaaaccgaaccttcggtggacagcacttcgcgcacttcgggagccttgtcggccggaaggaattccttgaagacctcgatgaagtcatcgtcggccaggtcccacagttcctggccgcggtcttcggcgatcttcacgcatgcaccggaaagctcgtgcgcgtggcggaacggcacaccgttcttcaccagccattcggcgatgtcggtggcgagggcgaaaccggtcggcgcttccgcttcgaggcgttccttgttgaagaccatggtgccgaccatgccggtgaacgcgggaaggagcacttccagcgtgtcgacctggtcgaacacggcttccttgtcttcctgaagatcacgtgcataagcggtgggcaggcccttcagcgtggtgagaagaccagccagatcgccgatgagacggccggacttgcctcgtgcaagttccgcaatatccgggttcttcttctgcggcatgatggacgagccggtggaataggcgtcgtcaaggcgcacgaacgcgaactcctgggtgttccagatgatgatttcttcagacagtcggctgatgtcgacgcctgccatggctgcgatgaaagcgaattcggcgaccagatcacgactggcggtgccgtcgatggagttcgcggttaccttggagaagccgagttcgcgggccacggccaccggctccaagccgagggtgttgccggcgagggcgccggaaccatacgggcttgcatcgatgcgcttgtcccaatcggcaagacgttccacatcgcgcagcagcggccacacgtgggccatgagctggtgtgcgagcagcaccggctgggcgtgctgcatgtgggtacgccccggcatgacggtgcgtccggccttttcggcctgttcggtcagtgttgcggcaaggccgagcagcattttggcgatgacgcggctgtggcgacggagccacatgcggatcagcgcggcgatctggtcgttgcgggagcggccggcgcggagcttgcctccaagctcgtctccggcgatctgcagcagtccacgttccaatgcggtggcttcgtcctcatcgtcttcgatcggagcgaacgcaccggaatcgacacggcgctgcagctcgtcgagagcgtcttccattcgctgcagctcgtcggcggtcaatagtcccgcacgtccgagcgcacgggcgtgggctcgtgagcctgcgatgtcgtcgtcggcaagacgccaatcgaattgggtggacttgctcagtcgcgcgagttccggagacgggccggacttgaaccggccgccccacagggcgaggtgttcaccattggttgtgctctcggtcattgttacttcattctccttgcagatatgactgagggagaggataccagtcaggatggtcctaacggtacgctctcccccattatcaagacgattcggcgtaaaaaactcgcttactcgacgctgttttccggaacctcgatgccattgccgaacttgacgtcgcgggctgcggccacacggctcggcagaccgtagatgtcgatgaagccgttggacgacttctgatcgaagctgtcgccggaatcgtaggtggccagattgtagtcatacagcgaggtgtcggaacgacgaccggtcacgacggcgcgtccgccatgcaggatcatgcggatttcgccggaaacgtacttctgggtgtcttcgatgaaggcgttcagggactgcgttgccggggagaaccactgcgcatcgtagacgagttcggcccagcgcttgtcgatatcgcgcttgatgcggtgctgctcgcgttcgaggcagcagttctcgagttcctggtgggcggtgatcagtgcgatagcaccaggagcctcgtacagctcacgggacttgatgccgaccagacggtcctcgatcagatcgatacggccgatgccctgtgcgcctgcgcgacggttcatctcttcgatggcctgcagcggggtgacgtcgtgaccgtcgatcttgacaggaatgccctgcttgaattcgatgacgacctcatcttcgactggcgggaatgccggatcgtcggtataggagtagcagtccttggtcgggccattccacggatcctcaaggaagccggtttcaatggcgcggccccacacgttctggtcgatggagaacgggctcttctcggtctgcacgatcggaagcttgtgctccttggcgaatgcgatctcgacgtcgcgggtcagcgacaggtcgcggatcgggctgatggccttcagtgtcggatcaatggaggagatggacacctcgaaacggacctggtcgttgcccttgccggtgcagccatgggagatggtgtcggcaccgaactggtgggcggcgcgcacgagatgcttggagatgagcgggcgggaaatggcggaaaccagcggatacacaccctcatacagggcgttggccttcagcgccttcatgcagtattcattggcgaattcgtcgcgggcgtctaccacatacgcttcaacggcaccgcaggcaagcgcgcgctgcttgatggtttcgaggctttcgccaccctggccgacgtcgagggacacggccacgacatccttgccggtgcgttcctttaggtatgagatggcgacggaggtatccagaccaccggaatatgccaagacgagacgattctgatcgctcatggtttccctttctaacatcaaacgttattcatcagtatatgcaatgctctgtatatttatgcatatacggtgcgtcgtgtccactatacggctattcagcctttggacacgacgtccaacagccattgcgcacgctgtttcgcataatcgtcatcggcgcaaatcaccatgacggtatcatccccggcaatggtgccgagcactccatcgatgggctgcttgtcgatcacacttgccacatactgggccgcgccagacggcgtgtggaccaccaccagattcctagccgccgcgaccgaagtgaccagtcccgaaagcacacgattcatctgctgttccgtttttgcatcaggattggccgacgcgctttcctccggctgtctgcccagcgcataggccacggttccgtcagccaaacgggttttggtggcatggatctcgtcaagatcgcggctcagggtggcctgggtcacttcgatgccctgatccgcgagaatctgggacagctgcgactgcgaggtgacgatgcgcgtcagcaacgcctgctcgatggcgctcaatcgagcggcccgtgtggcaggacgttgcagcgcaggtgtttggtccgtcatcaggccagcaggctttcatctccgcgggccttgccggcaagccaagtcagcagtgccttctgcgcatgcaggcggttaccggcctcatcccaaaccacggactgtggcccgtcgatgacttcggaggtgacttccttgccacggtatgccggcaggcaatgctggaagatggcgtcttccttggcataagacatgagttcggcgttcacctgataatcccagaacggcttggaacggatggcgtattccgattcttcgcccatggaaacccatgtgtcagtgaacacgcagtcggcgccggcgaccgcttccttcggatcggtggtcaccaacacggaaccgccggtttcggatgcgatggcttcggcatcggcaacgatctgcggatccggcagatagccgttcggccctgcgacacgcacgttcatgccggccacggcgccaccaagcagataggagttcgacatgttgttggccgcgtcgccgaggtaggcgatggtctggtttttcagattgtcgacgccaccacgatgttctgcgatagtctggaagtcggcaagaatctggcagggatggaattcatccgtcagagcgttcaccaccggatgggtggaatacttggccatttcctccacacgatcctggccaaaggtgcgccacaccacgccgtaggccatgcggtcaagcacacgtgcggtgtctgccaccggttcgccacggcccagctgggatccggacttgtcgatgaccagcggatagccgcccagttcggcaacgccaatggagaagctggaacgggttcgggtgctcggcttgtcaaagatcaccgcgatgccttgcggtccggcgaacggctgatggtagaaacggtcgttgtggaatttgatggcgagttcgagcacttgcttctgctcttcatggttgagatcgtcatcgcgcaacatgtggcgcagttcaggagttgccattgttggctcctttcaaaatatccagtctgctttgattgccggctatgttcagtcgttgggaagatcagttggaatcttcgcgaggatggagatggcctgatcgatgtcctgttcggtcaccaccagcggaggggcaagacgaagcgcatccggcgccaccgcgttgacgatcaaaccgtgttccaacgcccaattcatcgccgcatgcgcgcatggatgggcaagttcgaccgcgtcaagcaatccacgtccacgcacggagacgaagagcggattgacgcaagccatgatgccgtcacgcaattgctggccacgcgcctcagcgttggccacgagaccgtcttcctcaatggtctccaacgtggccatcgcggcagccgctccgagaggattgcccgcaaaggtggagccgtgggatcctggggtgaacagcgcggaaagcttggcgccgaaggagatcatgccacccatcgggaaaccgcctgcaacgcccttggcgaaggtcacaatatccggaaccactccgcccgcaagatcctcacgctggaatgcgaaccaggatccggtgcgtccgatgcctgtctggacctcatcgatgatgagcaacgcgttgttgtcgtcgcacatctgacgggccttcttcacgtagtcggcgccgagcggacgcacgccggcctcaccttggatcagctccatgatgacggctgcgacaggacctttgccatatttgccgggaccggtttcggcaaacgcgtcatgcaatgcggtctcgtcaccggcttcgacgaattcgatattgggaaccagcggttcgaacgcttctcggatggtgggcttccacgttgcggacaacgcgcccatggtacgtccatggaagccatgggtcatggcgatgatacgcgccggtttgcctccaatggcaggcgatgcgcccggcaaggtgcggccatacagtttggcgagtttcagtgctgcctcgttgccttccgctccggagttgccgaaatacacatgagatccctcgggggcgccggcaagctcaatgagcttcgacgccagttcaatctgcggttccgtggcgaagtagttgctcacatgggcggctttggctgcctgctcgctgacggccttcacccatttcgggtgggcgtatccgagcgcgttcaccgcgatgcccgcaaggaaatcgaggtattcattgccatcgatgtcccagatgtgcgcgccttcgccatgatccataacacgcagcggagtaccgaacacgttcatgtgcacccgggagtactcccccagccacttggcgtcctcgctgccgaggttttccaactgctcagttgccatacgaactcctcatttcaataccgtcttcgggaacgaccatggttccaatgccgtctgtggtgaaaatctcattcaggatggaatgcggtttgcgtccgtcgatgatgtgggcgcgtggcacgcctccatcgatggctctgacgcaggcttccatcttggggcgcatgccgctctccagatccggcaacatgtcgcgtaggttctccacgccgatgcgaccaatcagagaatccctgtccggccaatcggcgtacaggccatccacatcggtcagcacgaccagcttgctggctccaagagcggccgcaagcgccgcagccgcggaatcggcattcacattcaacacttcggtagcatcatcctcatttggagccaccgaggaaacaacaggaatgcgtccggcattgatcaggtcctcaaccgcggatgcgtcgacgctcaccacgtcgccgaccaaaccaatatcggttggcgatccatcgatgatcggcttgcgctgcatggcggaaaacagcgcaccatcctcgccggaaagaccgaccgcgaacggaccatgggcgttgatcaacccgacaagttcacgggaaaccttgcccgtcaaaaccatacgcaccacatccatggcctccggcgtggtgaccctcagacctcccttgaattccgacttaatgcccaaagccttaagcatgtgcgagatctgcggccctccgccatgcaccacaaccggatgcaagccgacctgtcgcagaaacaccatatcttcagcgaaacaggctttgagatgatcgtcgatcatcgcattgccgccatatttgatgacgatgcgctgtccggcgaattcctcaagccatggcagtgcctcaatcagcacttccgccttttggtcggcgcgcaaatcggtatgcacgtcaaaatggaatccaggtcctttgagttccttggtcattaccgttcaatcagctttcgtaatctgcattaatgtgtacgtattcgtgggtcaaatcgtcggtccagacagttgcttccgcatttcccgcatgcagatcgatgtcgatgtgcacctcgcgcggagtcatgtcgacttcggatcggtcgcgtccggctccgccgttctcacagatacgcacgccattgacgtcgaccgtgactttattggaatcgtagggagcgacttccggcggcacggtacccagcgagctgacgatacgaccccagttcggatcattgccgaagatggcgcatttcagcaaattggatgccgctaccgcacgaccgcaagcaagcgccgcatcttccgtggtggcgccggtcaccttgacacggatgtcatggctcgcgccttcaccgtctccgacaatctgacgcgccaaggaggcagtcgcctgcgccacaagctcgttgaactcgtcgggatccggttcgataccggatgctccagacgcaagcaaaagcacggtgtcgttagtggacatgcaaccgtcaacgtcaatgcggttgaacgacatttccactccagtgttcagagctgcctgaagctgtcccgcgcttaccacggcatccgtggtgatcacgcacagcatggtggccagctgaggcgcgatcatgcctgaccctttgaccatgccgccgacacggaacccattggacccttcaagttcaacggttttcggcttggtgtcggtggtcatgatggcatgggacgcatccgcaccggcctgagcggtatcggcaagggccgcgaacgctttgtctgcgccagaaagcacatggtcaagaggcagaagctcaccgatcaggcccgtggagcagaccgcgatatcgctgtctttggcacctacaagcgccgcgaccttttgggccgtggccttggactgctcatatcccggctggccggtgcacgcgttggcgcctccggaattaaggatgacggctttcacatgaccgtcggccacgatcttgcgcgtccactgcacgggagctgcgcagaaacggtttgcagtgaacacgcctgcggctgcgtcaagcggaccgtcattgaccacgagagccagatccttcttgcccttgatcgaggaaatgccagcttccacaccggccgcggaaaaaccttgtgcaaacgttacgctcatggcgccactccaatctttgtcaggcctgcatcttcaggaagtcccagtgctacgttcaacgactgcaccgcctgtccggccgtgccgcggttgagattgtcaattgccgcgaaggccagcaaacgccccgccttacggtcgatggccacctgaatatgggccgcgttcgatccgatgatattggcggtggccggcatgacgccttccggtaaaacaatcatgaaatcctgatccgcatatgcgtcagtccaaacctgcctgatttcagcatctgacatattcaatgctgtatcggttagtttggcggaaaccgaagcgagaatgccacgggccattggcacaagaatcggggtgaatcccagcgtgaactcgtttgccgcggatgcgttctttcctgcagcatgggcgaagttctgcaaaatctcaggaatatgacgatgagtaccgccgacagaatacggtaatgcggaaccgaatgcctcagctgcaagcaaattgacgcgcttcagattcttccctgcgccggagtagccgaccaccagatcggcaacaatatccgccggttcaacaagcccttgggcaatgcccggctgcagcgccaatgtggttgcggtcacattgcatcctggaccggcaatacgcttggttcctggaatcacctcacgctggtgctggtaagaaccatcttcggatatgccggtaatgagctcaggcatgccgtaagtccagtgctcatagaagtcgccgccgtagaactcatcccatgcggttttttcctcaagcctatggtcggctcccaaatccaccaccacggcattcggatcaagctgggaagccaatgcaccggatgccccatgaggcagcgcaaggatgatcacgtcatgcccgttcagtacctccggagtggtgtcttccaccacaaggtcggcaagctgcggaatatgtggcatatgcttgccaagcttgtccccaacggatgaatgcccggccacgcacgtcacttcgaaatttggatgggccgcgaggatacggagggcctcgcctcccgcataccctgtcgcgccggccacggctactgtgtatttggccatgtcacgtctctttccattgactcactgaaaacacattcagcatacactttatgcactacattgcataattatgcattcatttcgtgtcgcatagtggtcattgcgagactatgacaattattaaaagactagaaaacacgccgaatcaggcagcgatcgactcgtctccctgccccgatcccgcgccgccaagcatattctgcaacgtctcgttatacaggtcggcaacggaaagaccatgcatcgccaaccaaatcacggccaaggtgtacaacacattgatgatcaccgcggcgagagccaagccataccctttcatatggagcttcttggtacgccacatcgaaatcgcgccgaccaacgcgggaaggaccggcaccggcatcagcacggcaagcacgagagacatgatcgcataggcatcccaatggccgtatgcgggattctgccgaggatcgttgagatccagattcggcagatagggcatattgccctgctgcggatattggttcggatcatacggattcggcccatacgggttggcgccgtatggattccgttgtccgttcgcattgtacggaggcatcggttgctgcccatttgaagggtattgccccgtttggtattgcatattctgctgctgtacagcatccgcaggttgcggttcaggttcaggcgcaccatacacgtatggatcgtaaccggccggcagctggctactcatcgcaccatattcaggttgattgatctgaccatactccggctgtgaagacgcagcggcatcggaagatgacgaaaccggagcagcatcagccgtctcctgacgttcgtcggtgttggtcggctgatactgctccggttcgttcataatcatcctctgttcttgggaaggtcgggatcaggcgcgcagctgcgcacccagcttggacgcttcatccacaatacgcttgcggatggcttcgctgtcttcggaagcgagagtcttatccggagcgcggaatgtgaccgcgtaggccaaagacttttcgtcctcgcccagctggtcgccggtgtacacgtcgaacagctcgatgctttcgaggctgcttccagcggcatcgacaataacctgcttgagctcggcggccgtgacatcggtagacaccgtaaaggccagatcctgcttgaccggcgggaaggtggaaatcggcttggcctgcaccggcttgccgctcaacgtggcgaacagcgcggtcaaatccaactcgaaggccgcggaatgggccgggaagcccaacgcctcgttgacatgcgggtgaagctcgccgaccataccgacgaatacgtcaccagccatcacgcgagccgcacgacccggatgccattgtgccggcacatcttcagccttcggctgatccagcgtgagagctgcaccaatacggtcggagatgcgctgcaccgcctcgacggcgtcagaccaatccactgcgcggcgctcgcccagccaaccggagtcaacggcgttgccggtcagaatgccagcaacatgcatcggctggtccggaagaccggcatcaagcgcggcaagctgctcgtccgtcggcttgactgcacccggcagtgccggaatcgccggagcgttcggatcccacagatacacgtggccgatctcatacagcgacacattctccacgccgcgacgcagattgcgctgaacggtctgtgccaacgtcggaataatgtcacgacgcaggaacggacgatcaccggcgagcgggttggcgatctccacgctgacgttcttcgtctcagcgacgtccagcgcgaagttcttgtaatcctcatcgccgacgaacgggtagctcaacgtttccaccatgccgtattcggcaagttcatcggcaacctggcgcttgcgcagctgctcagcagtcagaccgacctgaccttcgaccggtgccggcggcacggtgacgggaatctcgtcatatccgacaagacgcgccacttcctcaaccagatcgcacggctcgttcaagtcggggcgccaacttggaggcgccacggaaaactcgccgttgccgcctcctgcgacggagcaaccgatgtcggtaagaatgtcgctgatggtgttcacgtccgtgtcaagtccggccacacgagccacttccgaagccttgaacaggatcggacggcggttagagacggtattgaagtcggtcgggtgctcgctcggctcgccattgccgtacctaaccatcagttcggcggccatttgggcggctgccggctgcagctggtcgtccacaccgcgttcgaaacgacgggaggcttcggacggaatcttgtgacggcgtgcggaacgcgcgatcgacacctgatcgaagtgcgcggattccagcaggatgttcttggtttcggcagtgacctcgccatacatgccgcccatcacgcctgcgatgccaagcacacgggagccgcgttcgccattcggggaatcggtgatcagcagatcctcgacgctcaaatcgtgatccttgccatccaacgtggtgagcttctcaccttcgttggcgcgacgcaccacgatcggtccttcgatcttatccagatcgtaggcatgcatcggctgtcccaagtcgagcatcacgtagttggtgacatccactgccaaggagatggaacgcatgcctgcgcgggtcaggcggcgacgcatccaattcggcgtatggctggccggatcgaagcccttgaccgcgcgagcgtaatagcgatcgcatccaaccacaccgtgaatcggattattgtcgtcgacgatcacttcgatgtcggtcttggtgccttccggcaggcccttggtgatcggcgccttctcgttcagggcgacagccggatcggtgtaggccgcaccggtggaatgatggtattcgcgagacacgccacggtatgagaacgcgtagccgcgatccggagtgatgttgatctccagcagcggctcgtccaagtgcagcaggtgcatggcgtcgtcgcccggctggagcttctcatactcttccggggtgaagccgtacttgcgaagcaggatgatgccgtcatggttatcacccaatccaagctcgcgttcggaagcgcacatgccgttggagatatggccgtaggtcttgcgcggttcgatcttgaaatcgcccggcagcacagcgccaggaagcgttacgacgaccttttcgccggcagccatgttcggcgcgccgcagatgatgccgcgcggcaccttgttgccgttctcatcggtctcgttgtattcgtcgccgacgtcaacgtggcaccagttgatgatcttgccgttcttctgcggttccggagtggcgtcgaccacgtagccgacgacgatcggaccgaccagctgggaggtgtggatctcttcctcttcgagaccgaccttcaccagatctttggcaagctgttcgtacgtaaggccttccggaacctcgacatggtccttgagccaatcaatgtcaaccattggcatgggtcaatcactcccccatcacaaactgttcgctgaatcgcacgtcgccttcgaccaggtcgtgcatgtcgttgatgtcgtggcgcagcagcagggtacgttccacgcccacgccgaaggcgaagccggtgtagacctcaggatcgaggccagcggacttcagcacattcgggttgaccataccgcagccgccccattcgagccagcctgcgccgcccttcttgtcagggaaccacaggtcgagttcggcgctcggctcggtgaacgggaagtagctcggacgcagacgggtcttggcttccgggccgaacatggccacggcaagcttatcgagcacgcccttcaggtcggccatggtcagatgcttgtcgaccgcaagagcctccacctggtggaacaccggcgtatgggtggcgtcgagctcatcggtgcggaacacgcggcccgggcatgcgatgtacagcggcacgccacgggtgagcagaccacgcacctgatcggaggaggtctgggtgcgcagcaccatgttggatccgacgaagcccgcggcgtccttggcctgattgcccttgacgtagaaggtatcctgcatctgacgtgccggatggtcggggccgaagttcagcgcgtcgaagtcgtaccattcggtttccacttcaggaccgtcggaaatctgccagcccatggagatgaaaaagtcttcgacatcctccatcagcttcgacaacgggtggcgcgcgccaagcggcttgcggttgaccggaagggtcatatccacggtttcggcggcaagcgcacgggcctcttcctcggccttgacctgctgttccttggtgccatacgcacgaccgaagtcggcgcgcagcttgcccataatcttgccggcgtctttcttctggtccttcggcaacgcgccgatggccttgctggcctgcgtcatcgcggattccgctccggcgtactgcgtcttgatggctttcaattcctccatgctggaggcgttttcgattttcgcgatgccctcggcaaccgcattggttaccgcttgggcgtcgaataccgcaccttctgccacgagatacctttctcatttcccgtttgttttacgcgaaaaacgcgcaatttcaacgttttccgactttacattctttcaacatgactcgacatagccaagctcagcaacattaccgccgaactggtgccgaggttcaaggattccgctttgccatagagcggtatggacacgatcctatcggttcgttccaaaacttccttggtcaatccacgcgcctcattgccgaacaacaccgctttggccccggcaagcgtttccggcgcggcaattacatccgtcagggattccggttgtcgggaatccgtgccgtatacatcggccgcatacactgccagctcgtgagtatcgcaccatgcgaagaagtcgtccgttcccatggtcagaatcggaaggtggaacagtgatcccgcggtggagcggaccactttcggattgaacatgtccacgcagtcgtcgaccaataccacggcggagcagccggccgcatcggcggaacgaatcacggttccggcgttaccgggatcgcgaacctgccaaaacgcggcgaccatcgcatgcccgtcgaaatcgtccggaacggcggacgaatcaaggaaagcctgcatatccgcgacggcaagcacgccttgcgcgtcgacgctcatacggtgcatcaccgcatgagtgaccttgtgcacatacacgccggattgcatggccttgcccgccatctgcgcgacggcaggtgtcgcaaacgaggcatcgggctgtgccgactcgacctcaacgtagaggtcctcgacaagtcctggatgccatgtcagcagctcgcgcaccgattgcgggccttccaccatgaaacggccagaccgtttccgcccttttcgatcggcgagttcggacacgcggcgaacgcgctccgacttgggattcgcaatgacttcggattttataggcatacgcgttagcctaacaccattgccacaacgaatgccccatccatgtcacgtttttaattcagaaaactttccagattcattccagcagcagtcgcagcagaccagccagagggcgcagttcggtcgcgatatgcagggtccgacaaatgattccagcgactctgccggctcgcaggattccaataccgataacaattctccggattcgcagcagtccggcaacgcacagagcgatgccccagcgctggcaaaaccactatgctgttactgatttccgggcttgcgaatcccacagagggaaaagtgttgtgcaacggcagcgatttgtcacagcaggatcgtcacccttcgccttgccccgtattcgacatgtcatgaatttggcaggtcgggtacggggcttttgcgcatccatgaaagacatgcacggcttgcgagtgtttcttgccactttcgattggtttgcgagcatcagttcgttacactgattatctgattattgtctgattgcggttgggagtgcgacatcatcccatgaatgttggaggtacaagcatggatgtcacggtgtatttaggagctcacgaaggcgacaaccccgtatataagcaggccgtggtggaactggccacatggatcgcccaaaacaggcaccgcttggtatatggcggttccgacgaaggactgatggcggtgattgccgacaccgtgcttgagcagggtggcgaggtgaccggcatcgaggcgcagatgttcgtggacaagggtgtcgcgcacaagaatctgacccagctcaccatcgtgccgaatatcaccgaacggcgtactcgcatgatcgagcttggcgacgtgttcatcgccttccccggcggcacgggaacgttggaggagatcagtgaggttgtgtcgaaggtttgccttgaccagttgacgcagccttgcattttctacaatctcaacggtttctacgatgacatgaaggcgttgctgcaacgcatgatcgatgatggtttttccacacgggaacgtcagcatggcatctatttcgcttcggatcttgccgagatagagcatattatcgccatgcacaaggcataggcggctcagtaaggtcgtttttattcgacaggtttttcaagaaaacggggacgcccaaacgaccctcataatcggccggaatatcctccaaccggcccatcacaaccaacatgcatccacatgccccgcagcgcatccggtcaactccgggatgcttcgtttgccgaacttactgatcggatggaacccgtatccgtcggccacgcgaagaatggatttgcgttttattgtctgcatgatttacagtttcgttaccatgaacatcccgtttgtcctgctgtacattttcctcggcgacgtgctcctgttctccgcctattcgctctgggagaaagacaaaaacaatcggaggtaatgcagaatggacagcaaggcacttctttccttgaaccatttaagcgtctggtacaccgcagatcaccccttactttctgatttgcactggatctaggggcagcggaagatcagtcatttcagtatttcacattccgggaatatctaacgtatgtggcggcgtcctatggtgtcccgctgccagatgtgtctgacctcataaggggatttcactttgaggactatgccaatgttcttctatcggtcgcggatcttcttccactgcctgccatagcgcttgcccgcggagtagccgcgcgtgaaatgcttgtactgccgctccgcttccttgcgatgcttctcacagtattgctcgccgtcctcgcaaaggttcgggcagccggggtggcggcaggggcgtcttggttttctcggcatgcgtgccgcctcctttcggacaatagaaaagccccgaaaggattgctcctttagaggcttgaaataggtcgtccggaccgcgttctccttctttcggcttgttatctacgatgggcgccatgggtgcttatagagagtggttcgcggtaatgctacgctagcaagacggttgaaacctgagtatttatttaatccagttaggcgtagtgctttgtgatgcacattggcaataaaaatcttgaaagacgataagcggctatgcgggaattactacatgaggatgatttcctacgatataccctgcagagcaaaggcaaggtatatttgtgggaaacgagtaatcaatatgcatgaacggcgcatgtcaccaaggagatggtttcgacatggacaagggtttccttgcgatttttaatgccataaaggctgatggggcgaatgcagactacaccaagcgcggcatcgatccgctctactccgtcggggctggcgctcgcatcgtggtcatcgggcaggcaccaggcgcggtggcggaagagacgcgcatcccctggaacgacaagtcaggagagcgtctgcgcgattggctgggtgtttctcgcgagacgttttatgatcctgagcgggtggcgcttctccccatggacttttattttccgggacatggcaggtcgggcgatctaccgccgcgcaagggattcgccgagcagtggcatcctgcactcttggcgctcatgcccaatgttcggctcactgtgcttgtgggcgcatatgccgtccgcaggtacctgcatctcaagaattcggacagccttacaaccgtggtgcgcgattatgatgcctatatcggccggggattcttccctttggtgcatccgtcgccgcgcaaccagctatggatgagcaggaatccttggttcgaggccgagaccttgcctgcactcaaggcacaggtcaacgcggcgcttgaacagaggtaagtggttacgaaatcatctgtgacgataacttccagccatacaaggaggttcattcatgcagagaaggacgttggggactcgtgaggcgcctgaaggcatcctcgaagatgccgcgacgccaaggtggcgagagcgttcgcgagtgactatggttatgacctcgtcagtcttctgctgcccggtgatgaatgctcgtatgtgatgggcaacccgccgttcatcggccatcagcagcacacgcagcagatcaaggatgatatggaactggtgtgcggcaaggccggaggctcgctggattatgtggctggatggtattttaaagctattgatttccttgacgggaatccctccgcgcaattcgcgttcgtatccacgaatagcatcacacaaggccagcacaagtcgccccgctattcaagcatgtggtcgaacgagggtggcgtatccggttcgctcaccgtacgttctgctgggacgctcagactacggacaatgcgaacgtgcatgtcgtcattgtcggattcgacagaggcacaaacgctcctgcgttgtatgaatacgacgacattaacggtgaacctgtggaagcacgtccggctcatatcaacggttatttattggatgcgtctgatgtgttcgtggaggcgaggagtcagaagaccggtccgtaaggtctttgccgtcccggatggaagaaattctgtaggaataaggagagcctccccaatttggagaggctctccttataaccaatctggctaccttctgattacccttggagtccaaaacagcttgatttcaagggaaactgggtataggcctcagatgtggaagtacagctcgtactccagcggggtcggagccaggcgggcctggtcgatttcgccacgcttgatgccgatccaggtttcgatcaggtcgtcggtgaagacgtcgcctgcggtgaggaagtcatgatcttcctcaagggcatccatggcctctgccagggagctcggaacctgcttgatgcctgcgtgctcttccggcggcagctcgtacagatccttgtcgaccggctccggaggctcgatgtggttcaggatgccgtccagacctgccatcagctgtgcggagaaggcgaggaacgggttgcaggacggatccggagcacggaactcgatgcgctttgcagccggggaggtgccggccagcgggatacggatggcggcggagcggttgcgtgcggagtacaccaagttgaccggagcttcgaagcccgggaccagacggtggtaggagttcagggacgggttggtgaaggccagcacggaggaggagtgcttgatcaggccgccgatgtaccagcgggcaaggtcggacagaccaccgtagttcttctcatcgtagaacagcggcttgccgtccttccacagggactggtggcaatgcatgccggtgccgttgtcgcctgcgatcggcttcggcatgaaggttgcggccttgcctgccagagcggcggtctcgtgaacgacgtacttgtacttcatcaggtcatcgcctgcgtgctgcagagagttgaagcggtagttgatctcctgctggccagcgccggcgacctcgtgatgggaacgctcgaggatcagaccgaccttctgcaggttggcgaccatgtcgtcacgcagatcctgggtgtggtcgatcggcggaaccgggaagtagccgcgcttgacgcggttcttgaatgcgatgttcggggtgccgtcgtcttcggtgtcgacgccggagttccacggagcttcgatggagtcgacctcgtagaaggagcgctgcatgctgttctcgaagcgcaccttgtcgaagatgaagaactcggcttccggagcgaaggaagcggtgtcggcgatgccggtggacttcaggtaggcctcggccttgcctgcaacctgacgcggatcgcgggagtacggctcgtcggtcagcgggtcgacgatggagaaggccacgtcgagggtcttgtgcttgcggaacggatcgacgaatgcggtggaaacgtccggcaccagcttcatatcggattcattgatggcctggaagccttccacggaggagccatcgaacggcatgccgtcggtgaaggcgtccttcaggaattcgcttgccggcacggtgaagtgctgctgaacaccgatcagatcagtgaagcgaacggagacatactcgatgccttccttgttgataagggcctcagcatcagccttggtttcaagtgcagtcacgggaccgctcctttcgaataagtaacttacaggctcttagtctaggaacgcgcgtttcgctcactcgccaattgggttacgagaatgtttcgtaatgacatattcgaaggatgatttcgcgaaaaactggggttcaattgttacgaacgctcgtatttgcctctgcaaaaccgttcaatttgtggacattcgtgtcgtcatgtcgcttgcgacgtccatttcttttctcaaaaaccttaccgcatgcgcgcaggccagcggaaggtaacggagatatgaaaaaaggaacctcgataacgtgttcatcgaggttcccatatgtaagccggctttacgattccaggaaaatcagcggccacgcatagcacgacggctgatgcgctgcgggtgcatcgggtcgacgcccttcggaatgcccatgccgttcttcatctgcagagtgcgcagacgctcgttgaggatgttcagctcggtcttggtaagcatgaagcggctcttcggatggatggctgccatcagcttgttcttgtggctggtcggctggtagctcttgcacttgagcacggtcttgcgcagattcttcaggctcgtctgattcttgccctggccgacgtagatacggtagacgggaatatcggaaccggcggtcacacccttgatattctgctcctgacggtccatggcacgcttgacgcgattgtaatcgccctcgccgagcagataaatgccgttgtaaccggtgccgcgccaaatggcgtctttggtcttcggatcaacccacaccggctcctgcggaaagttgaagccagccttgttaatgttgccgagcacgctgatggcagcaccctgacgcccttcaagcttggcgtatccgactttgtcggcacggttggtgagcatcatggtggcgaacagcaggccaagcatgatggcgaggatcatggacgtgatccatccgatcaccgaccacttgaacacgatgccaagcaccacgaacacaacgatcggcgccacgaacacgccgccgcacaaccacggaagagccttatcttcggcgtgggtgtacttgaagatctgaatgatctgcttgatggtgctttgcttcttctttggctcttctttgtctgccatcgacttcctcacttggttatgcggttactcacactggaacggtagtttatcaggaaccatgccatatcgcacggtttccgccgtttttccttgattgacggggattatcgggtatgtagaggcctgccatccgccttaagcagcgcctcgccgaacgattcactgaaggtgggatgcgggtgaatgagcctcgccgcggcggcgagcggcacccggttgccgaccaattgttcggcttccgcgatcagatcgctggcgagcgggcttacgatatgcacgccaagcacgaggggaacatccggagcgcctgccatcgcaccgctgacgatggtcatggatccgccttccccactcatgagcatacgcgagttggacaacatgggatatgcggtttcctgcggattgatgatggtttcacacgatttcgcatcgtcgagtgcaagaccgacgcttgccgcttcagggaaagagaacacgacttgcggcacggtttcgtcggataccggcttggggtcaagtcctgcgatggtttcggcgatggtgatgccctgttcaaacgcgcgatgagccaaagcatgccccggagtgatgtcgcccaaggcccatacgccctccacattcgtacgcccatacgcgtcggtcgaaacataaccgcgttcctccaattcgatgccgttggatgcgaaccagccggcatcggtgttcggcatacgtccgatagcagcaagcaccacttcaccatatgcggtgcgctcctcctcgccgccgccttgcctgtaatgcacggtggcgcccaaattcgcaccggtatccacgtaatccaccgacgcacgcgtcaccacgctgatgccgcgacgtttgagctcgcgggtcaacgtcatcgaagcccgcttctcccaagacgacagcacgcggtccttgcggatcagcaacgtcacttcgcatcccgcggcattccacaacgaagcgaattccaacgccaccgcacccgctccgacaatcaccgcactggacgggaacgtatccaattccaaagcctgcgtcgaatcgatcaacgcacctgaaaacgggttgcccggcaatggtaacggtcgcgatccggtcgccagcacaatatcttcgcctttgatggtaagctccgacccgacgggttcctccactcccgccttgaaggaacgcatgacctgcgcttctcccccggccggcgcgacatgcacatcatgaacgtccctcaactcagcctcgccgcggaacaccgtgacgccgcgatgcgacagcaatcccgccaaccccttcgtcatcgtctccaccgtggacgtacggaagtcacgtaatttgccgaaatcaatgctctgtaaggtggcactgatgcccatacgttccgcctggcgtatgttctgcgcactgtgtgcggccgtcagcaacgccttcgacggaatgcaaccacgattgaggcaggtgcctcccaacgttttgtcgcgttcgatgagcgccaccgttttgccgagctgcgcggcacgcaatgccgtggaatatcctcctggtcccgctccgatgatgacaatgtcgaaatgctgttcagtcatgcctgccctcgttgattcgtgcgttacaactggttacatggtaatggaaaagccgtcggttttcgccgacggcttgaaaaagcaactgcgattctcacagaatggatcactcgggccagtatccacgcttctgatagcgcggcttcggcagacgccagcgacgcatctggatggcacggctccacgcgtaggaaccggaacgcatgcccttggccacggactgctcgccgaacttttcaatgagcttcttcttgagcttgcgccacatgatcacgatgtcgatgatcaccgcaaacagatagatgtacataagcagcatcaacggcaatgccaacgccggccacttgtaggtcacgaaaatcgaaccgatcaaaatgacgaaggcgaccggaatgaagaactcacccaagttgaagcgggcatcgacgtagtcgcggatgtatatacgccacggcagacgctcggacttcggcatatggttgatgtcgcccttctgcatggcatcgtattcggcgttttcacgctcgcgcatacgcgccttggcggccttgcggctcgcttcacgatccttgggaaccagcggacggagattctgcgcctgggcatccttgcgcttcggcgtcggacgccccttgccggcagtaggctccgcagccttcttcccgacaggctcctggtccgcatcttccttcttattaaacacactcatgcctatagagcgtaaattgacgtatcgacgccttgcctcattcatgtcaacgattggacatgattggttcgacggatacaatggtcattcgatagcatgcggcggcacgtttccaagatgcgtatatgccgcatatataaggaggagcagtatggcagttttacatgccgatgagattcgcgcgcgcgtcgaagcggattttgaccgcattgtcgacgtgctgaacaagaaaatcgcgttgcagtccatttccgcaaaaggcattaccgcggatcatatgaaacagtccgcgcaattcgtggccgaagagctgaacaaggtaggtgtcgatgcgcatgtggtgcagtcgcacaatcccgatggcacgccgggcgcttgggaggtcatcggttcgaaaatcgtcgatatcgacgctccaaccgtgctgttgtacgcgcatcacgacgtgcagccggtgcccgatgccagcgtatggaacaccgacccattcgtcggcacggtaatcgacacacgcctgtacggacgcggcgcggccgatgatggcggcggaatcgccattcattccggcgcattgcaggcgctcggcgacgatttgaaggtcaatatcaaggtcttcatcgaaggcgaagaggaaatgggatcgccaagcttcattcccttcatcgaggagcataaggacgaattcgattccgatgtgatcatcgtcgccgactcgggcaattggtccgctgaaatcccctcgctcaccacgtcgctgcgaggcaataccgatattgacgtgcacgtcaaggcgctgcatcatccggtgcactccggccagtacggcggaccgatcctcgatgcgaacacgcttgcctccatgctgatcgcttccatgtatgacgagcatggcgatttggtggtgccgggcatcgcctcagaagatccaatcggcggactgcagcgagatatggatgaggcaaccgtgcgtacggacgccggcatcgtcgattcctaccgtctggccggcaccggttctttggccgcacgtctgtggaccaagccgagcgtgaccgtcatcggcttcgatgctcatccagtggagggatcgttcaacgtgatctcccctgaaacgacgttccgtctcagcctgcgcaccgctccaaaccagcgtccggaagaggctcaggaagcacttgccaggttcatggtcgagcatgctccgtttggcgccgaagtgtgggtcgacaagcttgataatggcatgggttgggccatggatccaaatgccgaggctaccaaagacgccatggacgccatggaagaggcgtttggcgtggctccggtcaataagggcgaaggtggctcgattccgttcattccggaattgcagcgtattttcccggacgcgcaggtactggtcaccggtcccgaggatccgaaggccaacgcgcacagcccgaacgaatccatcagtcttcccagcctgaaaaacaatgtgatcaccgaagcgctgctgcttgacaagcttgccaagtagcggatatcacatatctttttgagaaaaacaacgggcaaatgcgaagggcgttccattccatacaacgaatgaaacgcctttcgcaaatccgccgcgcattcaacaaacctcgtactgcgcagccctgctccgattaattgccagtgccggtaaaagcccaatgccagtaaccggtgaaataagcgcaagacaacgcaatcaccggcacggccacgcaaatcacgtaaaacagccaatcgacggcatgtaagctcgatttcctagcctggcttcgcggagcgtccgcgccgaaaccacgagcttccatggcggtggcgagtttcgtgccgcgtcgaatcgacacgaccagcagactgaacgcctgcgagaacacacgtttgacggcgctgccgtcgcccaatccacgagaacgacgggactgcccaagcgcacgccaatcatcctgcagcaaagtaaacatgcgcatgccagccaaaccgccatacacgaaacgcgacggcaaatgcagaatctgcaccagaccatcggccaaatcagtcggatcaagaccaagcgcaagaatcacgccgggaacggcaatggccgccacacgcaggaacgtggccaacgccaagtacaacgatccctgcgaaatcacaacgacatcaccgagattgaccagcacggccccggaggtcttgccatacaacgacacggaaatgaaacttcccgaagcggcaatccacaccggccaggttttacgaagcaccgtccacggagcgacgccgccaatccagagcaacaacacctccaatgcgagtgccacggacgcggagaccacgtccagcgtcacgaacatgggaatacatagtatcagcgcgccgatgaaacggctgaccggattgatttttgccacgaaccatgacggcgatgccggcttggcatcgtcatgacgttccttgtgcggtaccacgctgatagtttccaactgttccatctcactccccctcgcttacgagaacgcgacgcgctcccaacgtttcgatcaatggttcgtcatgggtgaccatgatgacggaacagccggcgtcacgcgcaccggcgatcagtttcaccatttccgtccatgtggtgaagtcttggccgaacgtcggctcgtccatcaccaagactttcggcgcggcggccagcatggaggcaacggaaagccttcttttttcgccgcccgataatgtgaacggattagcttgagcgaatctagcaagattcatacgctcaagcatgttgtcggctatagcgtaagactcttcttcgctcttgcccatggatttggggccgaccgccgcttcgtcacgcacgctggatgcgacgaactggtgttccggctcctggaacaccatgccgatccgtccgagcagatcccgacttttccaagtgaagacgtcgttctccctacgtgcgggaaccatggtctcatccatgctcacacggccggaaatcggcttgagcaagccggccaaagtcaacgcgagcgtggattttcccacgccgtttttgccggtcagtgcggtgatctcgccagcatggaacacgaggttcacatgctcgccaagcgcgaagtcacgcccgaagctgagatcctccgttcgcagaacaacatctcccgacgattggctggattcgggagtatgactttcgatggtgcgtcctggaacccatgcgccgccctttgcgagcaccgatgccatgctgccgaacacttcttccggagtgccgtctgcgatgacgccgctgacatgcgagtcggcctccggcttgccgagtacgataacccgatccaccagatcaagccatacgtcaatatggtgttccaccaccaccaaggtttcacgggtctgttccagcacatggcgtaccgcatcatgcacttccttgacgccctccggatcgaggttggccgtcggttcgtcgagcagcagcagtccgggatgcatggcgagcacgccggccaaggccagacgctggcgctggccgccggacagtctgcgtgtggagcggtcaagtttcatgtagccgagtccaacaatgtcgagcgaggaacggaccctgctccaaatctcatctttcggcagattcagattttcacaaccgaaagcggtgtcatcgcccacacgttccagaatcgtctgcgcgtcaggatcctgcaacaccaatccggaacgtccgcgtgcctgacgggcgtccactccgtcaatcagcagctctccttcaagctcgccttcgtcatcgccgccgagcacgccggcaagaccggacatcaacgtcgattttccagcgccggaagcgcccaacaacaacacgcgctcccctggctgtatggtgaaatccacatgccttaacgcgaaatccttacgtgaggcgtgtcgccatccccaatcgcgtgcgaccaccccggctgcggaaaacgatttttctgcatcagtacccatgaatcgttctttcatccctcttgcattccgcgtttgcagaacgaacacgcatcaaagaagtcccgtatccaccactgtgaatgcgatacgggacttcattaacgaatcgtcataccaaggccttcgcacggccggattcgaaacggtcaagcacgcctgttttagcgatggcctgctgcagcagatacatcaggactccagccaccagagcgccggaaataacggaagtgacgcagctgacgacaatacgcaaacctgcccaagcaggattcacggtccagttatacaggaagcatcccaagccggcgagggttccagcgatggtggtcgacagcaaatcccaacgtttgtatgcaaaaatcgcaaaaccgatttcggcagtgaggccttggcagataccgataatcaaagaaccgccgatgccccacggattgcccatggcaagctccagagcggcggcaagggtttcagcgaacaacgcagcaccaggctttcgcacgatgatggcggccagcggacccgcaaacagccagatgccgttcaacaagccttcgaagcccggcgtcaccgcttcgaaaagcgtaatcggagcggcgcagatgacatcccagccccagaaaatcacgccagccgcaaccgcgatgatagcggccacgacgatgtcaacaactcgccatttattgttatgcttcttcaccacggaagattcatttacggtcatgaatgtgcctttctctatgtcaaggcacgggaaaagagagacgtccgtgcgccggcattacccggtatacgttcatacggttgaagcgcttgcttcctctcagccatacggcccccgtgtctgcgcttgatactacacaaggcacaagattttcacaagggtcatttcatttcgcttcgttttccacccagacgttccccggatgagctgtgaatccgcagccgcattaggccactgtccataccgcaggtcatgacggcctggatacgtgccccgcacatcacataggtctgtgcatcaacgattcggccagattcctgaacgtctcgccaatgccatcggcgcgcaacgcgccatcctcgttcaacacggcggggcggccggcctcaccggtctcacgcaattccggctccaacggtagctgtgcgagcaaaggaacatcatagccaaggctttcggtcaactgctccgacacacgcgcacccccaccttcgccgaaaatccgcaggcgttcgccctgatgctcgtaatagctcatgttctccacaacgccgcgtaccttcatcggtacctgcaatgccaccaggccggagcggaccgcaatgtccgaggcggatggctgcggcgtggtgaccaccaccagttccgcgttcggcagagcctgcgccacggaaatcgccatgtcgccggtacctggtgccaagtcgagcagcagcacgtcaggctcgccccaccatacgtctgaaaggaattgttcaagagaacgctgcaatcgcgggcctcgccaaaggatcgcacgatcggcgccggcaaacatgccgatggaaatcaatttcacaccccatgcggtgactggcatgagcatgccgttcagattggttggttgagcatgcacgccgaacagtcgcggcagtgagaaaccatagatgtcggcgtcgatggcggccgtgtcgtaccccaatgcggcaaatgtggcagcaagattcgcagtgacggaagacttgccgacgcctcctttgccggatgctatggcgaaaatacgggttttgatgcccggcttgttgaacggattctgtttgcgttcggccttgaggcctgccacaagttgggtgagcttgtcttgactcatggacccgacttcgatgcgcggcagcaatgtcgcttccggatatgacgacaccgctccgttgatctggttggtgatagtctgcgacagtggacagccttccaccgtcagttcgacctccacacgaacctcgtaggtgttcgccttaccttccaccggtatcgcgtctatggctgcgatcatgcccaaatcggtcacggatcggcccagttccgggtcgattactttgctgagtcgctcatagatgcgcgcttcgatggtgcgctcgtcggtcatggttcctcctttagccgcgtaccagactaacgtctggaagcgcggcatgccagagccttcttgtgattacgttgccaatttgacgtgccggtgtcataccgttccgttttccagcagtattttgaactggtcctcgtttagcatgggaacgcctaattcctcggctttggcggctttggcaccagcgttttcgccgacgaccacccaatcggttttcttgctgaccgatcctgcggcctttccaccgcgggagataatcgcctctttggcggaatcccgcgagaaatcaaccaacgaaccagtgacgaccactgtcttgccttccagtgtctgcggcagagcactggtctgtgcctgtccgactcccactccggctgccttccatgcttccagcaccatgccacgccaatcgcctggattcttggccgaagcaaaccaggtgaccacggattcggcaatttccggaccgatgccgtctatctgtgacagttcatccacgctggcttgttcgatggcgtcgagcgaaccgaatgtgttggcgatggtacgcgccgtgggaggaccgagccgtcgaatggacagggccacaagcacacgccataggtcggcatggcgcgccttgtccatttcgtcaagcattttcctcgtgttttccgcggggcgtatatatatcggctgcacactggatgttccggaacgcgacaccttggtttcctcgcgaacgaccacggcatcttcaggcacgtcatattcgggatattccgcggattcgtcgacggagtccttacgttttcttgcaactgtaggagctgtccagaacgccggaacctgatgccacagtcccgatccgccaatgcgtttgcgtatctttttcggtttgccgttcttgccgatggtttcgtggatttcgatgatcggcgcttcacgccatacgcgaacatcctgcagatcggcggacgtcaacgaaaacagaccggcttcgctggacagcaccggtgtttggcgggccggcagctccagaccttccacaggctcgtacggttcgggctccgcgcccggctccaccacgatttccgtgatgttcggcgcgtaggtggccgtcgaatcgggacggtcctcttccggattcgtcaaagcgatggcggattggtcgcctaaatgctcgatatcgaacgctttcctggatgccagattgatgatacgttcggtcaactgtgccgggcaggattccacgttcgggcagcggatgtccttgtccccctctttggccggagcgagttccgccccgcagctcgggcagtgcgaaggcatcacgaaacggcgcagctggccttcgtgtccttccctgcgttccagcacaggacctacgagttcgggaatcacatcgcccgccttacgcaccacaacggtgtctccgatgagcacacccttgcgttccacttcgaatggattgtgcaaggtggttctcgacaccgtcgaacccgcaacatatacgggcttcaatatggccactggggtcacacggccggtgcgccccacctgcacggtgatgtcaagcagttccgtattgacttcctccggcgggtacttgtaggcgatggaccaacgcggagcacgcgaggtcgcgcccaacgatcgttgcaatcccaaatcatccacttttacgacaatgccgtcgagcgcgtgttcgatgtctccacgatgctcgccgtagtaatcgatcatgtcgagaatctggctgaatgtggtgacctcacggttatgtggcgaaacgggtatgccccacttcttatacaacccatacgcttcggattggttgttgaccgcatcatggtcggcaccacgtttggcgccccactggagcgttccaatgccatgcgcatagaagctcagccttctggtggcggtgatgcgcggatccttctgccgcaggcttccggcagccgcgttacgtggattggcgaaaggcgcgcgcccagcatcctcgttttctttgttgagcgtgttgaaatcgtcccatcgcatgaagacctcaccgcggatctccacgaattcgggaatgtcttcttccggtcccgcaagattctgcggaatggtggagatggtgcgcacattgagcgtgatatcctcgccgatcacgccgtcacctctggtcagaccttgctcgagcacgccgttacggtagatgaggttaagcgcaagaccgtcgattttcacttcgcatgtcatcggcaaaggcttcgtctcaggccaatcaagtccccgaataacaccgtcgtaccattcatgcagttcctcaagcgaaaagacatcgtcaagactcatcatgcgagacgggtggcgtaccgatgcgaaatcattggagaaggtgcctccgacacgatgcgtcggcgattgcgcggaatcgagggatgggaactgggcttccaacgcctgtagacaacgtattctcgcatcataggcggcgtcggacgagaccggcgcgtcatcgatgtagtatgcgatctggtcggattccacccacgccgccacacgcgcccacaatcgagccgcggcttcagcactgatggacgagacatcaagtcgggtcaaccgcatagcgtcggcatcggttggctgcaatgcggcgatccagcgttcactgcccggcgcatatgagctgactcccccgtcgggaaccacagcggttgacgcggagcccgtatcgccgcccatttcagaagcgtcaaaatcccatgcgagttgttcggaatcgtcatgccttgtcattgtcattgccttgtcactgtcttcaatgttttgccggtcagagccgccatgcacacattatcgcacaaatgttcgatttgctgcatcgccaacgtctgtttggcgcactgcggaaagcacgccgttcagttgttcaacgacctcaggaactgcatctgcaccacgtcggcaccgtcgcgctcctcgtcatccatccttgaagcggcaaccgaaagcgtacgtgccggcacgaacatgccttcatccacacagacccgcgcggcctttcgtaccaaggatgcgacctgggtattgggccataccggcagtcccgcttgggtaagcacgtgcatggcttccggaacgtcggtgggcaccggaatgcattgcgattgcgcgcgtccgatcaattcctgcagctcgctctccagcatggcgattcgcccgggggcaatctcctcgctcatgatgtacgcggcggccgcgatgtcgaagtggtcgcacatccattccgcataggcgagtctgtaataggcgaacgacgcatcctcacggtcaagtgcgacgtgcaacgcgttgaggcaagccgctctggccggatcccaatcctcggcgcgcgccagttgaaccgccagcttgagatgggaaagcgggtaggccggcgcatatcgcaccatcgcattgagatgcggcaacgcggccttcacgcctttgacctgtgcaagcacgtcggcgagttccatatgcgcgtagaacagattgtccggaatcagcacggtccgttcgccttccgtggcgaacatgcgattgtagatgacgcgttccgcatacgagttgaaataccgcggcacgcccggattcgaagcgaacagtcggtccattcgccccaacgccgcttcggccagttccacgctttggtcgacctgtcctgagaacagcaggtctctcgccttgatgcgttccgcgtcaagctcgtcggccaagcggaaggagaagtccggagtgtctttgccatcgatgagcgcactcgtcacctgcggagccaacgacgtcaattccgggtcggcaatggtgttgatgacgtccatggcctgctttgccttggccaccgattccagatgggagtcctgcgcgattctgtggaattcgccaaccgcgcgctgcagcaggtcgacgcgctgaatggacaaccccgacatgtcacggcagccgaacagctgtgccgtgtcatggtcgaatatggcgtcggaaagctcaggctcctcctgacttccggatggggagaaacgactatcgcgcaaatcgaacgtggcgtccactggcttcaatgcgccgaggccgtccacatccatttccgcatcgaacatacggtatgtgcctgttggatcagacaatccgcactcgcccagacgctccatgaattcgcttctggtgaaggtgaccgtcaccagattgcgtacggtcggattcttgcgaagctggcttaatggatcatcaccattcccatcgaaatcgccgaagccgatcagtcccgcgtcaagagcgccatcatgcacgccctgtgcggaaccgtcgtccacgctagaggaatcgttcgcagtctcgtcgggaaccgcgaacgtcacttcgtcgaagtcgatatcccgcatcagatcctcgaattggctgttcaacgcatcatccgtatcctcggagttgacgccatcaacgcccatgtcggcggatctcggcgccaccggacgggacgggtctccgtggaaatcgccgtccttcggatcggccttggacccagaaacacccatatctccagtacgaatgcgttcgaaagccgccaaagcctcgctcatcagctcgctgatggcggaatcctgctcggccacggcctcttccaaaccaatcgaatcgatatgcatcgacacacgctgtatgcccggatcggcgccaaaactcaacgcggccatcatcagcccaacacgcagattgtagtccgcgctcatgcgggcacgttcggcgtccgtcatatccacccatgcgtggcgggacacgtcatatttggtggatggcatcatggaaacgccggcagaggtgaaaccgatggccatattgccgtcttggaggctgcatcggaagtccacgtcgaagcggtatggcaggcgcatgctgcgcaatagtctcgacattgtctggcggtatacccattccgaaccgccttcggctccgaaggtggtaccatcctcgccgtccttcgtgttttcggcgatggaacgtctggtttccgcggcgatgtccaccaggcgcatgacggcttggacgccgtcatcctgctgtgagtcgaggatcgcgccgaattcgtcgtccggtttcaatgcgatcagcgccggattttccagtagcgccatgtcgatttgcgcggcttccgcgcgggttacggtgtcttctgtgggcagcttgccgatacgggcgttgcgttccagccatgaactgactgcggcgaaacggttgaggttgccttcgatgttcagcgcgcgcagcgatgccgagaacggcagtgtggaatcccaagcgaagaaatagcagcccgagtagctggacgtgtataggtgcaatggttccgcgccgtgtactgcttcgagcccttggtctttgtcaagggcgcctgcctcgcgcatgaggtcggcgaaataatcctcaagtccggatgcgcgcatgccatgagagcgtgcgctcatcgtgtctctgatggatcggcggatcgcgcccatcggcgcctctcggttgagcctgcggaagatgttgcccgtgccgaatcccacgagtagcccgttcatttgcggcagcatgtaggctgcgaagaatgcgatggtgatggcatccctgtattccagatcgaatcgcatggtttccggcaggttggcacgcatctgttcgagcgtgtagcggttgccgactttcagccaggatgcgagccatatcatgcggccaccgggcatgcgtcccacgacaccgccttgcgacgcgcgcaccatcttcggcgcgccgtttgtcacgtgtccgaatcgtggaccgtctggcagggtgagggtttcttctttgacgaatatgaatcgtggttccagatcctgcacgtccatttcgggattggtgcccgcgaagacgcgtgctttgctgtcggcgagcgcgatttgcgcgaagtggttgttgtcggtgaatagtccgatggagaaggctttgccttgggtttgtggcagttgcgcccagccgagttggagtgtgcttggtatgccttcgaagcctttgatgatgtgtcgtttgatgagtgggttgagtttgatggcgttgcgggtgagttcatcgacgatgtcgtctggcgtgtcgagggctttgccgaaggggttggcgtcggcggtgttgtgggggtgtttgttgtggttgatgagttgtcgtaccccttgcatggcgtggttgagcatggtccgtccttggtgtggatggtgtgctgatggcgatgctggtgtgaggtgtgacatgtgggccattctttcaattcaatgcgacatgcagcctttagaataaagttcgtgactttttcgaaacagcgttttcaggcgcgtcatcgtgtgtgcgcagctattgtagccgcttttgttgtggtggtgttggttgagtgcgtgttgtgtaatgtgccgtttttccgctcgttggcggcgtcgggtgattcggcggctgcgtataacacgttggggccggggcttgagcgtcgtgatgacgggttgttggaggttactgatccgacgcaggcgtatttgcaggtggctgcggatggttcgtctgagtatgtgcggatcgtgccagtgtccgatgaggttatgggtggtgtgcctgccggttcgcgcgtgttgcgtacggtgcgtgttcgtgcggatgcggatcgtgtggctggttcgttgtgttcggtgtcgttggattcgtctcgttcgttgtatgtgagggctgcggccggtcgtacggtgcgcgtgcaggtggtggagccgaaggggtcattgattccgtttgatgcggttcgcgcgaatgtgcgtgtgccgttttcggtgagtccgttgcgtgtggcgttgttggtgttggtgatggtgttggtggcgttgtggcgtccgggctcgcgcctgtggaaggtgccgttgaatacgtcgagtgtgcgtcagcgtgtgacgttgggcgtgttgttgacggttcctgggttggtgactgttgcggcggtggcgtggcagttggtgtctgcggtgccgttgagttttcatacggatggcatgtatacgtatgattacgatcagtatgatcatgtggctcgggcgttgcttgatggtcatgcgtggcttgatttggatgtgcccgacgcgttgcgcgatgcggataatccgtatgatgtgacgactcgtcagcaattgcttgccgatggtgtgagtccggtgtattgggattatgcgttttttgatggtcgttggtattcgtattttggcgtggtgccggcgttgctgttgttcgtgccgtatcgtgcgataacgtcgttgtgggttgatggtggtctgatgatgccgtctggcgctgcggtgccgctgctgatgtttgtttttttggtgttcgcgtgcctgttgacgattcgcgtgatcgagcgtgtgcgtccgcatgtttcgctggctgcggtcagtatgttgtgcgtgtttgtggttttggcgtcgaacgccccgtacttgtggtatcggacgaatttttattcggtgccgattgcggcgtccttgttgttgagcacgttgggcttatggctatggatgggtgcggtgcacccgaacgcggccgatgccggtggcgatggtggtgcgaatacggtcgaatcgttgtcgctgcctcgtttggctgccggttcggtgtgtattgccgcgaatgtgggttgccgtccgtcgtttgtggtggtggcgtttgccgcgttcccgttgttctggccgcagattcgtgcgattgtggggcagttgcgtgccatcgcgtctggttccggcgtgcgtgggcgtgcgcgcaccgtgttgcatgcgttgcgcacgcctttggccgtgctggtgcccgcattggttgtggtggtgcccttgttcgcctataacatggtgcgtttctcctcgccgttcgatttcggttcgtcgtatcagctgacggttacggatatgacgagttaccatcagtcgtggtcgaattttgtttggacggtcgcatattacctgtttctgccgttgcgttggacggatacgttcccgttccttgccgtcgatcccgcgcctttgaaggattgggggtttgcagaggcgatgcccggaggcctgttcgtcatggttccgcttgctttggctgcgttggcttgcccgttcctacgtaagcgcatgcgcgttcgtggccatgccggcatgtggcccacattggtgatgttcctgctgttgggtttgctgatcgtagctcttgacgcgcggctgggtggccttggatggcgttatatcgccgatttcggctggctgtttgcgttggcttcgcttcctttgatgcttattgcgctggattgcgaacgtccgcggcttcgctggctgttgcgcgtgctggtgttggcgctgctgttgttcacgttgtcgttgacggtgttgtcgttgttcctgtacggccgcgacgacgagttgattcgtaataattccggtttgtttcatgacgtgcagtcgtggttcaccctgatgtaagttacggcgttttcagggttatttcagggttttatcacaatttttccaataaatcattcggcttgttccgagttttccggataacagtggcgatgtaactgttcgctgtgagatgaacccttgttggagacatcagtcatgaaatcgcttccacttttgtcgaaccatcctcgtgtaagacgctggaccgcggccgtcgtcgcatcagccgtcgcattgggcgtctgcctcgccagctacgacaatgtcgatgcggccatcaaacaaaacaggattgaacgactgaacgcacgtatcgagaacgtgtacacagccgactatcaggatatggccgacgacaagctcgagcaggaaaaaagcaagtcctccgcaacagaggatgacatgtttgtcaccgaagatccgtacggcaccaacaccacgtcactgtatgtgtatttcactaccgacgacgcggttgccgtctcctataccgtgcatgcagacggctatacggatttcacccgtgacacctatcaggaatcgcaatacagcaaaacccacgaattccagctgctcggcctcattcccggcgagaagaacaccgtcgccatcacgctgaccgatgccgacggcaagtcccgcacgcatgccatcgaacacaggggcgcatccctgctgggcaatgaggaggtgcagttggagaagaccgtcgcagccgattcaggtgaggatctgggcggcggcctgtatgcgattctcggcaatgattccgacgaacaggatttcatgctctactacgatacgaacggcgtgctgcgcggtgagattccggtgctctactatcgttcgcaccgtctgctgttcgatgatgacggtctcatgtggttctccgcgtccacgcatcatatggtggcgatgaaccgtctcggcaagctggagaagatctacgatctgggatccgactacattctgcatcatgattatgcgatggattccaacggcgacatcgtgctgctggccaccgagctcggccgtgacgacaacgccgtgcaggatcaggtcatcaagctcagcacttccaccggaagtgtaacccgcttggtggatttcggtgagctgttcgccgactataaggcctccaccacgcatgcgggaaccgacgagtcggattcgaatgccaagaatcgttgggattggctgcactgcaataccattcaattgttggatgacggttccgcattgttctccgcccgtgagacgtccaccatcatcaaggtggatgatttggaatcggatccgacgcttgattatatgatcggcgagccatccgtgtgggccggcaccgatgaggccagcagtttcctgacgaagtccggtgatttttcggataccggcggccagcattccatcacgtatgtcgccgatgattcgctgcctgacggccagtattacatgtatatgttcgataacaatttcggcacttcgttgacgcgtcctgattttgactggtcggtgatcgacggcatttcgaccgaattgtcgtccgatacggcaaattcgcggtatcgcaagtatctggtcaacgaaaatgccggcacgtatacggaagtgtcatcgttcgtcgtgccatattcgccgtatgtcagttccgcgcaggaattggataatggccagatcctcatcgactcgggcatgaagggtctgttcggccagtacaacaaggatggtgatctgctggcgcagttcaagatgacgttgaacagtgcgtacatctaccgcgtgtacaagtacgatttctcgggattctatttcgcctgacatcctgtccgcaggcttgacggggccgggaatctaaactccttgtgggagtttggatttccggccccgtttcgtatgcaatgggttcggcacgcccgtacaatggttgccatgggttttttcgattcgctgttttcatccaaacgtcccgaagcgacgcatgacgtcacgttcacgctagatcaggcaggccacacgtatgaggatggcaatgtcggtctggagccgacatcgttgacgatcactccggaaagcaaacgtgtggctgtgatcgggttgaatggttccggtaagaccacgttgctgcagctgttggatggcgcattgtctgcgacgtccggttcggtgcgtatcgacgcgaatggtgctgcgtatgatccgtcggtgaaacgtgatctgaaacgtatcgaatcgatgatcggccgcgttcgtcgcgaggaaattccgaacagttattacaaagcggattccattcgcgaggcgattgatgaaccgttgaagaagcataaggtgccggaaagcgaacgccaggcgatcatcggcaatctgttcgcgcatttcgatctggcggcggtcgcacgtgagcccgcctccgcattggatagcgagaaacgtcatctgctggcgatcgcttccgcattgagcttctcccccgcggtgatcgttgccgacgagccgaccaagggtttggacgaggtggcgtccgcgcatgtggcgaaagctctgttcagttacgacaaacaggtagtgttcgccacgcatgacacggagctgatcacacgcgcggaatatgcgatcgaccgcacgctggtggtcgacgatcatcaggtggtgttcgacggtggcccgcatgaggccgtggccttttacacggacctcatccgcgctaaatatgaggcttccaaagcctgaccatacccacggattattcccgttccccacatgttgcggctccttcatcggtgtcgacgatggaaccacaacatgtttcagccgatcattgtgttgacggtgtcaagcaccgtctgaacgttatgcctgaattcgtcgggttccggcaataacgagatcgcgagatagccgttcgacgtcatatcgaagaaatagccgggctgtcctgaaattccgtgcttttcgatcatggacaacaccagttcgttctcgtcaagcacgctgggcacgcgcaaaagcacattccatccgccttcggcacgcaacacgctgaccatgccctgctcgtcatcatccagcatggtatgcaaggctgcgaggttggtttgcacgcgctctcgcacgcgcgcggtctgcgcggctgcggcgcccagcatggcggggatctgtttggcgatgatctcactcattggcagatagtcgtcggcgaccacgtcgagtctgcgcttggcctcatccacttcagccgccgggccggacacttggatccaacccactttggcatgtggcgcggccaacgtcttcgagaacccatccaatgcgaatgtgagcgtgccggtctcccccgcgagacgcgcgttgccatcgaatggttcaagatcatagtcgtagaacacctcatcggcgatgatggccacctcatggtcatgacaaagccgcacaatggcctcacgttccgacgctttgacgtacgatccggtcggattgttgggattgatgagcaccagcgcgcggatgcggccgccatcttcaccttcaagcgcttcgcgtagttcggccacgtcgatgtaccaggatccgtcgaaacgttgctggtactcgatcatgtcgacgcattcgagtcgtgcgatcgattcgatgagcggatatcccggcttcggtgcgagcacggcgtcacctgcattgcagagcagtttgatcagccatgagtacgcttcggacgtcgagctcaatatgtataggtcgtcggcggtagcggtattgccttgttcatgcaggaatgcggccagcgcttcgcgtgcgtatcgttgcccgcgtggctccgctccgtagatgtccggcaatagttccgacgcgagcgcatgtttggttggattggagtcgttgagtttgccgagtgtgatgccgtttgctttggcttccgcttcggctttggcgatgggattgggctcgctgatatcgactctggaggaaaaacgcatggtctccaccatactctctgggttgcgcaagtgttgcatcgagcaagaaggatgcattcgccatgcgatcatcagaggaataacaagagccgtccgacggatgaatcggacggctctcgcttatatgaaggttaggaacctttatggttcacgacatcacttctgcttgatgcttgcgtagtacgcagcgccgatgatgccagcctcattgtgcagcttggctgcgacgatcggggtcttgatgtcgatgtacggcaggaacttctcggacacgcgggacacgccaccgccgacgacgaacagctgcggatccaagtagaactccatcagggaataatacttggtcagacgcttggcccacttcttgtagcccatatcgagcttttcacgaatggaggatgccgcgtacttctcggcgtcacccttgcccttgagcagttccaaatggccgagctcagtgttcggaatgagctcgccgttgaagatcagcgcggtgccgatgccggtgcccagcgtggtggcgacgaccaggccgtcctggcccttggctgcgccgaactgctgttcggcaagaccggccgcatcagcgtcgttcaccacggtgaccggacgaccgcaagcttcggagaacacttcggtgacgtccacgccaacccaagactggtccagattggccatatagccgagcttctcgccaacatgaatcggagcggggaatgcgatgccgaccggagcggactcaggaacctcaaaatgctcgagctgctggcgaacgatttcgccaacggccttcggagtggaaacctccggggtgaggatcttcagacgcggttcagcaaattcgcccttctcgaggttaaccggggctgccttaatgccggagccgccaatgtcaacgccaaatgcctgtgcagtttcaatcatcttcgacctctcctatcaaggtacatagtgggtatatcgaaccggtaaacgccatagtaactcgccccatgccccaaaacgcgccgacaatacacaattggtgaatacgattgcataatctgtcgcaatgaaacgcaaatatttgcgattgttttctgcaaacgattcgccccatgccaacgcaacgcatcggcatggggcgaatcataagaaaataaccgtctgaagacggtgtagccacattacttgagcggcggcatcggcttccaatccggatcatgcagcagcttgcgcgaatcccaccaacccttggcaatctgcaccaagccggtcttggcatgctcacggtccaccatcaccaagcgaatgacctccttggcggcggtcagcaacgtgccaaagccgaacatcagcggacggtaatcgccgaacgacatgaaatagcgtgccatgtagccacggttgcgcatgatgtggtaacggttcatgtcggaagtggagttgagctgacgcacgccggcgatatcccaattgccgatctcgcgcgtacgtcgcaggatcacgtcaggcaccacgatcggattggtgaccttgctggcgcgatagccgtacatcgtatcgtcccagtagatgaagaagcggggatccggcaaaccgatctgttccacgatattgcggcggaacaggccgccttcaaagcataaggtgtccatcacacgatagccgggacgcccgaacgcggccggagcgatcggattgggaatgccaagaggcacgatgaaatcgtactgccagtagaacgggcctccgtcgtagtcgtatcggcttccctggatcacatcatggctgccggtccacttggcgagcctttcgatggcctcaggcatcacggccacgtcgtcgtccatcacccagaaccactccgcacccagctcgtatgctttcttcacacctgcggagaagccgcctgcgccgccgaggttgtcggattgcggcgcgtacaccacacggctttcgttgcccgactggtcggcgatggtattgccccactgcgcggtgaccgcttcacggaaatcgtcgaccatgccttgggtcgcctcgctgtgctcgttgtccacgacgatgatacgccatggcgccacagtgagtttttcgatggattcgaacagggtggcgagcagctgctgacgcctgtacgtcaccacgacgatagccagcttttcgatggtgttcttcgcaacttgcttttcagtcatacgttccattcttgcactcgccctcaaccgaacatcgcctgtgttcgcatcatgcggcacgattccattcgacggacgggctcttgcacatttcgtgcggctttgccataatgtacggcgtaatgcaggggaacccgtgttcgtcgggttgagatgggccaagtgaggcctgaaccctttgaacctgatggttaacaccagcgtagggaggcatgtctagtgactgctgtgacatcaacaaccgatttcgattatgagttcgacgccgccaaaggcatccaacgcgacaatcttccgccgttcgcgcagcgcatgcgcaaggccgccgacctggtttgggaggaaggctaccagcagccgttcatccgcgagcttggcgaaggcacactgcaacgcgagcgtttcgccttctatctgctgcaggattttcgttatgtgaacgattacgccagagtgcacgctttggggttggccaaggccaccgaccctgaaatcatggcgttcatgctcaaggtgcagaacggcgccctgcaggtcgagaccgaagtgcaccgttcctacttggccagctatggcatcaccgaagagcagatgaataatgtgcgccagtcggccttcgcgcgcgcctacacgtcgaacattctctccatcgcctacggcaaagacattctcgacattctcgtggccgtgctgccgtgcgcctgggtgtatgcggattacggctaccgtcttgccgtcgagttcgcggacacgctcgacgacaatccgtacaagagctgggtcgacatgtataagaccgacgagttctggcaggattccgtgtggctgctcgatcatatcgagaaactggtggccgacgcgagcgaggagcgcaagcgcgagctgatcgacattttcgtgaccggcgtggagaacgaatacatgttctgggccagcgcgtacgacatgcagtacacatggaagcccgaatggaatcaggcgcgctgatagcactccttcatggggtttcctgacttccgattgtttattttcattgcagcaaggcgggtgtcttctgattggttttcagaaagcacccgccctgttatgtttggtcgcgtcagtttcccgctttattcgcgtacgaggcggatatgttccacgtcgtcgcgatgggagcggcggtagagcacgaaacggttgccgatgacctgcacgagttccgcgttcagttcttcagccaatccctcgcctgcttccttggcggtcagaccggatccgtcgagcacggagcacttgatgagctcacgcttttcgatggtttcgtccgcctgcttgatggcgttttcgctcagatcgttcttgccgacctggatgagcggattgagcttggtggccaggcctcgcagctgcttgacctgcttcttggttaatgccataacttgttccattcctatctatgatgcttgctcaagagtagcgtgaggacggtaaaatccgccgactgccttcagtttagtccagcgatcagaaccaacgcagccacatatgccacaaccacaccgcccgcggcaatgtctcgtttggtgatgctcatcacgcgccaatgtgtgcgtgcgataccctcttcatagcatcgcgcgtcgagtgcgagactgagattgtcggcatggcgtatcgcccctgcgaacaccggaatgatgatggaaaccatcgccttgatacgctgcacgaacgttcccgtttcgatgctgccacctcgagctgattgcgcatccacaatggctttcgcttcgcctcctaacgtgggcaggaaccgcagtgcgaggctcatcaccagtgcgatctcctgcgcgtgcacgcctatttttgcgaagggtttgagcaaggcttcgaacgcgtcggtaatggccgtgggagtggtcgtggcaaggaataccgctccgacgataatgaccgcaacgaatctgcaggcgtacaatatagcgatacgcacaccgtcgtcggtgattggaatcggtccgatgttcgcaagaacattgccggatcgtacgaagaacacattgagcagtccgcagaacacgaacaatgcaaggaacatgtgaatcgatttgaacagttgtttcacgccgatgcctgatgtcgcaacgatcatgccggtcaacagtgcggccaccagtaactgccagaaggagcggatggcgaatgcggagaacatgaccgccaacgcgctcaccatcttcacgcgcgggtcaagccgttccataaaactacggttttcacggacgtcttcctttgcatgtccggagccaagcgtgtgcagattcttcgaacctgccgtttcggaagtgacattggttccgatatctcgagtgacgtcattaccgttttgtctgcgatcaagcgcgatcacccgatcggcgagcacgtcgatttccgtttgcgaatgggaaatgataagtacggtgacgccttgggaatgaagggtttggatgagatcgtgcacgcgggttgtggccgcttcatcaagtcccgcggtcggctcgtccataatgagaatccgcggttggcatgcgatgacgcccgctatggcaacgagtcgttgctgcccgccggaaaggtcgaatggcgaacggtcggcaagatgttcaatatgcagcaatgccatggcttggctgacatgttcatccacttgcgcttcatcaagccgttggttgcgcggaccgtaggcgacgtcctcggctacggtttcggcgaaaagctgacgttcggggtgctgcatgacgtagccgatggtggcgcgcagtttctcgcggtccgcacgcttgagcggctgcatattgccgttggcgcgttggcgtgcgacgggaatggtgttgacggtaatgctgccagattgcggctgttccagcgcgcagagaagacgcgcgagggtggttttgcctgcaccgttatgccctgtgatggccacggtttcaccctcattgatggttatggaaagcttatcgagcacaggattgctactgtttggatattgatatatcagattatggatttcaatgattggtacagctgatgttggcttcgatgcgccatttgcaatattggatttggcaattgggttgtcttcttgcgctgtgcctgattcgtccatttccggaatacttgcagtattaccgcgagcgctttgcacgatacgcccgttatccaggcgaatgatgcggtcggcattgacgaattcgtcacgatggtgggtgacgagaatgatggttgtgccgtgctgctgcaattcgtcaagaatatgcatgatgtcggcacggccttgcggatcgagcatggcggtaggctcgtcgagcacgaggatttcgggattcatggcaagcatgccggcgatggcgacgcgctgctgttggcctccgctcattcgcgtgggatcggcttctcgttgtccgctcatgtcgactgcgtcaagtgacatggcgatgcgcatatcgatatcatcatgcgcaatggcgaggttttccggaccgaaggcaacatcatcctcggtgacggtggtgacgatctgatcttccggatgttggaaaaccgccccgataccatgccgggcgctgcggtaagcatcagcgtgcgcgccggcgtcatcgaatacgttgtttcccaacaacgtgacatgtccggcatcgggtgcggcaagtcctgcgatgatgcgtgaaagtgtggatttgcccgatccgtttggtcctgccaagcatacacgttcgccttggcgaacggtcaggttcacgccgtcgagcgcccaggtcgcgccggagtcgtaggtgaaacgaatatcgtgcagttcgaccgcgatggtgttcgtggcgctgtcaggattcatggaaaaagtctttcataaacgaaaggaaccttccatacgtcgaaaggttccttcctattcatcaatatgcggaatcgatatggtgaacgaggctcagcggttcaacaggttggagatcggcttgtagatcaggaaggtgaccacgccatggatggtgaatttcaacacgttgaacggcagaagcgccggcacgatcaatgccacgacctgtgcggtggtcatgtgcgcgtagaacggtgtgacgattatattgcccacaatcgccaccgccaaggccgcgatcgcaccgacgatgatgccgatgaccgcgcctttgcgggtcttgttcctgcggtagatcagtgctgccggcacggataatgccaaagccacgagcacggccataagcgtgccccatgggttggtaaacaggtgcggcaggaaaccaagcacgctgacgattaccgccgccgctggcccgtaggcgaaacctgccaccaggctgacaatgccggatggatcatatttcagccattcaacgcccggcacaatgggaaattccacaaagctgacggccatcgacagcgccacgaacagcgcatacatggcgatgcgtttggtggaccagcgtccagagtcggccacgcctgtggaatgcgcgttgtcggggcgcatcatgctttcgctggcgatttcggcgtcgttgttttgggtattgtttggtgaggatacactcatgttgagccccgtttcttccatccggactttgaccgttggctccggattctcaccggatcagccgctttcgcgggtcgcgggcttcggcatgggaccgttatgaacgtcagtcgtaccgttaccgccagtaaggattttcaccttccctgaaacttgcacgacaatatatacgcccaccatgcgatattcgcaacctgtgttccgtttttatcttgcgctttggaacgcaaagattcctccaaccgcacgtcacgacaacaggccgagcaagtcgtctttgctgagtgtgccgacgcctccagatgcggtgccgtcggtgaactgttgggcaagctcgcttttcttctcctgcagtttgaggatgcgttcctcaatggtgtctttggctacgatctggtacacgttcacatcctgcgtctgtccgatgcggtgcgcacgatcggtggcctggttctgcgcggccgcgttccaccacgggtcggcgtgcaccactacggacgcacccacaaggttcagccccgtattgcccgctttgagcgagatgaggaacacgggaacatcgttgccattgaattcgtccaccagttccacacggcgtttcttcggtgtctcgccggtgatggtgtagaagtccacgccctgttcagccaaacgtgtaccaatcaggtcaaggaatgaagtgaactgcgagaatacgagcactttcttgctttcgtccatgcacgtggatacgagttcgcagatggcgtcaagtttggcggaagcgtttttcgcatccgcatagacgagtctcggatcgcaacagatttcgcgcaacagtgtgaattccgcaaggattcgaatcttcttcgtattgaagtcggcgtccttggttttggtaagggtggcgcgcaaccgttgctcgtgcgccgcatagagtttgcgctgttcgccttccagtttgacggtgagcacgttttcgaacttgtcaggcagatcggtcagcacgtcttttttcagacgtcgtttaatgaacagtccgaccaaagcctgcagtttgtcagccatgacggaatgttcagaaccgggtgccatgatcggctgttcgtatttttctcggaacttcgtgtaggttcccagcaatccgggcatgaggaagtcgaagatgctccacagttcgctcaaccggttttcgatgggggttcccgtcaatgcgaaccggtgttcggcggtgatctgtttgacggctttcgccaacttcgtggcatggtttttgatgtattgcgcctcatcgagcgccatcaatgcgaaccggcaggcggcgtaatcatccacgtcgcggcgcaataaatcgtatgaggtgatcaccacatcggtacgctgcatatcgttggattccgaggggttcttccattgctgtgccacggctgcgatgagcttgcgccgttgcgctttcgtgccggccacgacttcgatggtcagatcttgcgtgaatttttcgcattcggcggcccagttgtataccaaggacgccgggcagacgatcaacgcgggaccactgcccttgcgagcttccaccagtgacagcaattgcacggatttgcccaaacccatttcgtcggcgagaatgccgccgaagcctttgtcccacaaggtggaaagccattggaagccttccacctggtatgggcgcagtacgtttttgaggttgcggggcacttcgtatcgttttgggtcgatgattttcacatcgttgacatagtcgacgaacgattcgcttttgccgtcgtcatcaacttgagcatccaagaggaacgcccgatatccgggaatggtgattcttccggaatcaagctgttgctcatcaaggtcaagatctgtggcaatctgatcaagttcatgcagatcggcattcttcagatcaacgaacgtaccgtccttgaatcgatggtagcggcggttcctgcggtaggaattcagcaacgcgccgacctcgttcatcggcacttcgtcggctatcggcgaaatctcaaccagattcgagtcgatggacagtccgaccttcaccgtagggctgcctggcatcatcatgccgtcgaacgcggctgtggagtacacctgcccgaccgaacgcaagatatccacgccttcggtgagcaagagcagaatagtctgttcgtcttcctcacgaatccgcgccatgtcaatggaactccatgtcgggaaaagctggcgaaccacctgcaccgcgaatgattcgcgagccgtatctcgtctgatgagcgccgctttcgaccgcgagtccggattaatcacgcctcgtagcgctttggcggtcggcaccaactggaacacgaaatcgccgtatcgtgccacagcctcgcaggtgatgccctgcagatcacggtccaagtagaattcgatctggcagtcgactcccatccgttcggcgacttcctgcggaatgtcgaaaccaatgcccgcctcggtaagttttggcagtattgttcgtgcgaacatgggccagtcgttttccgcaatgaacacaccatcgctaacgttcgacgcgcacaacgtcatcaacgcgtccactgcgggaaggatgctgtcggtgcaacggaagaatccgctcactggcatcatatgggaatccgtcggagtgccgttatgttcggcactcatgagatacacgccccgctgcccgacaatccgatccgtgatggtacggttcgacgtgatacgcacgcccgacgaagcgccttccttcacatattcggcgatgaaccgaaattgcggattgccatcaaatatggcgatagtatgcgatctggactcccctggcgtggtcacttcgacgtagtccggagcggtgtcatccgtatgggcgaaatcatccggagtgagctgccgcgccctctcacgcccctcatgcttgggagcttccagcggcccacgtgctatcagcacgtcttcgatgtagtcctgttgcggttccgcttcgaacaggttcagtagatcgcacaattccccatcggtgagcatgatttcacgttcgatacgcacgtctggcgcgtaatagtagttgttctgcagttgcgctgcggcacgtgatccaacaacaccttgcaggaatcggaacagctgcagcgagaacggttcgagcatgtccggagtgtgggtgaacgagagtttctgtccgtatgacacgtatgccccgttgtgcatgtcggctacgaatttggaaatgctttttatgatataacttgcgtcgccgcagccgattttcaacgtcaggctccacagctcacggttcatgatcagcgtgggctccagacgcacgcttcccggtttcactatgatggaaccgctcttgcgttttgttttcgtggccccttgcgtaatgacgcctcgttgctcgtcggcgagacggcttttcgcgtcgacgatgcgcttgagcacgtcaagctgcgcgctttgaccggtattgtcattcttcgcatccagcgcacgcatgtagtcggataggatatgcgaggtcacgccacttcgcttgaatccgcggaaccgttcgggctggtcaagaaacagcagcagcattgcggcgacatgcttgcacatgccagtatagcggcgccccccagccggatccgaatcgaactcgtcatcgtcctgcacatgaccgaacgtcgatcctgaaccgaaatcatcataatcatcgacataatcgtattcatcgtcatcatcatcgaaactgcgatattttggattgttgcggtagctgggcgaatatgccgacgaatacgtgccataaccgtgctgcgaaccgttgaacgcggggcacgagcaatacctggccaagaaaagctcatcatgcaaatcaagcgtggcctgcacttcgtatcggctggacggtgaggtggtgccccgcatattggcatgcagggtgatgcggtcggaatcggagtcgttcaggcaatgcagatccgacattttcgcacgccactggttggcgattccacgggcacgctgcaatacaggctgactgcattcgctgcgtagttcgtcggaaagccatgacaaagtatctgccaactgaaccccaatcgttcgcacatttgttcttatgaaagagtatcagcacagcggaacaggaaagccgtggctgcaatccccgccacggcttcgctccataccggttatatcagcggcaacgcttggtgagcggctgccatggatcgagttccaccggttcggattccagcagcggcccgatctacgctggttggtgatggagccctgcttcagttctatggagaagtcgcgcggcagcgagcgctgacccttgtaatcggtggcggcttcgagcacgcccacagataccgtcgcgttgaccgtggaaccgaccgataatactggtgccggccagagcgccactcaagtgttggattcgttggaggtcaaaggccgcaccccagccagcgccacagcaggacgtctactaccagaactgcactgcggcacgagccgctggcgtcgcgcctatctaccagggtcagccgggctaccgttcgcaactggaccgcgaccatgacggagtcgcctgcgaataaatccaatacagtgtctccacctttccggttgcgagacgtatggtggtgaggcataggaaaagcgccgggttatcatctggcgcttttcctgtgcctcagcattttccgtatttccgcagtgcagtcacgagaaccgctataacctgcgcagctgcgcgatgtcatcgcgcagctggttgacggtgtccgtcagttcccgcacattgtggcgcaactgttccgtttccgattccgcctcatccgcacgcgcgaccgtcagcttttgatgggcatgcgattgtcgagcgactgaccgttggcgtagcagcggacgttgcctaatgcaatggagatgatactgcgttcggtgatctcaagatggttgcctcccgccacatgtggggtgatgaggcatttcggctcgcaccacagcggtgagtcggccggcagcggctccggttcggtcacatcgagcgcggcgccatggattcgtccttccgcgagcgcgtcggcaagcgcctgactttcaatggcgtcgccgcggcccgcgttgatgatgatggcgtcaggtttgagagatgcaatgcgttccgcattgagcaggtggtacgttgtcggagtggatggtacgcacatggcgatcacatcggcgtattgcaggacgtcgtcgagggaatcgaaaccgaccatatgatcgatgcccggcgcttcgacggcgggattacggcgaatgccgatggttgtcattccgacgtttttgcagagtcgtgcgaagtgtgatccgatgtcgccggttccgatgacgagcgccgtttttccgttggggctgatggcgcgtcctgcgtcctgccacatggcgttcgggttgcttgccgcgtagatgtgcaggttcttcatgatggcccacatcatggcgaacatgtgttcggagacgctttgcccatatgcgcccgtggcattggtgagcatggatccgggctgcaggatgccgggtcgctggtatttgtcgacgccggcactccaggtttgcaaccattcgagtttggggcattgcgcgcattcctcgggcgcgatgttgccgatgaccgcggtggctttggctttgagttcctccggtactgcggcagtccagctcatgcttccccgttgggccgaatcgccgacgaattcctgtggtatgtctttcgcggcacgtatgaattgcgcacgttcggattcggtcaacggcaggcagttgacgatcaatttgcggtggttccatattcccatgcgttttaccctatgacaatcgtcggatatagggtttcacgttgggttctgggtcagacgccgagttcgtcggtgtcaaggatgatggtgaccgggccgtcgttggcgagccgcacgcgcatgtgggagccgaatcgtccttcttttacttcgagtccttgtgcgcgcagggcgtcgttgaatccgtgccatgtctgttcggcgtgcgcgggcgctccggctttcacgaagcttgggcggttgcctttgcgcacgtccgcgtatagcgtgaattgggagatggacagcacactgccgttcacgtcgtggatggaacggttcattttgccgttctcgtcttcgaagacgcgtaggttggcgattttgcgggcgagccagtcgatttgtttcgctccgtccgtgtcttccactccgacgagcagcacatagccgacgccgatacgctgcggttcgaacgtggcatcgacttccccactcacctcgtcgaccacgtcgacggatccttcgccgaccttctgcaatacgatgcgcataagctgcccttctcccctctcgtcttcccgtccgattcagccggcgtagtcgacgatggcttgcgtgacctgtttcaggtagtcgagcgacgtctgccaatcgtccggcacttcgatggaatggttggcatcagcgtacgtgcgcacatggtcggtgagcagatgcgctttggcgtcatcgtagtatgggtcggcgtcacctgcgcagattagtggcatagggctgctggcagttcctggcagtggtgcgggaatgaccgacttgtgcttgtcgaatggcggcgggttgagtaccggggtgagcagcaccacgcgcaatcctagttttgcggaatgcggatatgagagtgtggagagcgatttggtgacgaccagcaaatgcggctcctcacccgattcggcagcatgttcgagcgccgctttgcgccattcgtcgaccacgcgttccatgcaggcgatcatttccggaaactcgacgctttccgtcagtttcaggtcgagccggtccacgaaccatccgttggccgcaagcgcctgcgcggcccaatacagcaatggccgatccacggtgtagcctatgcccggcatgataagcacatgcttgccggtttcagtgttcttcacgcggttcttaccccatggggtgaccgccggcgtcacattcttcgttttcgctggtttcgcgctgttcttacccatgctgcttcccaagccgcctctccatgcattccggacgtaaccaatcgtcacgactggcatcgttccagtaatgcatgctaggcggcaccgactacaatcccctccactccacaaagcacacatcgaacggactatagtaaaagaaagtgtgtttttagggttcggaggcgccatggaacatcgaacgttccaccgcattctcgccgcaatcatagcagtcctgatcgttctggcaggatacggcgtctactatgtcaacgactaccatcacgccatcaacgtcggcaacgcaatccaatccaatccaacggtgaaagtcaccgacatcgaagacggatggctattcgacggccccggcacaacaacggcgatggtgttctaccccggcgcgaaagtcgaagcaagcgcctacgcgccgctcatgcaggaaaccgccgcgtcaggaatcgactgcttcctaatgaaaatgcccgccaacctcgccatcttcggcatcaaccgcgcagacgtggtacgcagcgatatcgccggctactcatacgaccactggtacatagccggccattcgctcggcggcacgatggcagcaaactacatcagcaaacataccgacaactgggacggactcatcctcctcgcctcctacccaaccgatgacctaagcaaaacaaaactacgcgtactatccgcatacggcagcaaagacgacatactgaaccgcaaaaaagtcgaatccgcgcggcagcgcatgccgaagcaatattacgaacgggtgatcaagggcggcaaccatgcgcagttcggcagctatggcgtgcagcagggcgatggtgtggccgctatttccggtgatgaccagattgatcggaccgtggcgcttattaggcagttcgtcaccaacagtctttgaattgtccccgtttccgatcgcaatccgttgcgacttttctgtaagtgatgagtacggggtcggccccgctactctgggagcgcaatttcacttcgaacagttgagtacatgtgttggcgcggtaccgtgaaagtatggcaacacacatgctgaacatcaaacgaatctacgacaaccctgtcgacgatgacggctaccgtatccttgtggaccgcatctggccgcgcggtgtttccaaggaacgcgcgaagctcgaccgatgggccaaaacggaggtgacgcccaccaccgatttgcgtaaatggttcgcgcacgatccggcgaagttcgacgaattcaaagcacgctacatagagcagctcgattcacgtcccgaagcggcgcgattcgccgacgacgtacgcaatctgctacgcgacaccaacgttaccctgctgtacgcggcacgcgatccgcgcgtcaaccacgccgtcatcctacgtgactggctgttggaacggctcacctgacacgtacactcacatactcgctcacgcacgttccgcatcacgtccattacaacgattaccagctattacgaaacacgcgttttcataggatgaaactttcgttacacgtctgccctataccatcacgcgatgggcgccatggcgttggcgtttaaacgttcgatgcatactttcaggtccatcagttccttaccaaacaccaagaacaagggcttcggccggtcgaacggcggtcgggcaaggtcttccggctggacgtatccgttctgttcgacgtagtcgatgattctgttcatcagcgcgttctgcgcgggactgagcgaatggttgttgatgaattcgccaaacgccttcattgtcgcctgatggtcgagtttaatgatacggcgcaccgacagtccgagaggaacgtctccgaacgccttctggtattcctctctggaaccaagctcatgaatcatgatgttttcaaggttcgagaagtccttgccggaaagtggctcgttgtagtggagtttacggatgacctcatcgttgctgtgctcgttgatgtatcggttgagcttctgcttgtagtcttcgtaatgctcggctgtgtcgaattcccgtccttccgatcggtcgatgacagggtccttcaggtccgtgatgaccattttcctggcagtggagtccgcaatgaagcgaatcagatcgcgcagtgtcatacgaatccgctccagttcctcaagggaggccccatcgaggtaatccggattgtcggcgaccaatttgatttccgtttcccgctctttgacttgaggaatggtcatgcgttccttgagcctcgtggcaatggcacgaattttcgtcttatgtctcgcggcggtccgtcctctgacggaagccaccataaggccgtacatcagcgcgtcgaaacgtaacgcatactcgtcttcgccgtcgtaatgcgtaagagaagcgacttcaccggtcagatcgtgcacgtcaatgtcgcttaaatgttcgaacgttttaatgttccggtatttttccacgtattcgcgccgcaatcgcactgataccttggattcgtccaaggatgcgacttgtccgtgaatgtcgttgacgagttcgtcacgccatgccatgaggttttcgtcggaagtgaattcgctcgactgtaatgcgtggaccaattcggttttgcgtgagaatatcctctcactgagggacgcgaccggcttctcatcggcatcgttcttctgctcgcggaagaattcgaaattaccgcaatagtcgaaaatgtagaagcgcttcttgtccacgtattcgccgtcgatgccgtccacgcagtcgagtccttcacataggcgtgtgccacgaccgatcatctgccagaatttgatacgcgaacgaacttttttgaagaacacgagattcacgacttccggcacgtccacgccggtgtccatcatgtccaccgaaacggtgatgacgggcatggttttgcgtttgaaatcctggatgatcgcgtgcgagtagtcttcgctgtgcaccacgaccttgatgaagccgccacgagcaagcttgggatatagtgcgccgaatcgttccacgatgaaacgcgcgtgtttttggttctgcgcgaaaatgatggttttgcctatctgttctccgcccatggttttgatgccatgttccatgaggtcttgcaatacggcgtctaccgtgccggcgttcatgacgaatctgttcaatgcgtccgcgtcgatatggtcgggtacttcgactccgccctcgccatcgtcttcgccgaaatcatcttcgtaacgttccttgtcctcttcggacaggtcatcgtatgtgatgccttcgtcggtgaatttggtttttgcttcgatgttgtagaacggtacgagatagtggtctcgttccacggcggttttgtattcgtacagatacgttggcacgccatgttccgcttggaagaagtcataggtgttgcggtccacttcatcgcgtggtgtggcggtcaagcctacgaccaacgcgtcgaaatggtcgaaaatatccttgtattttttgaagatagaccggtgtgcttcgtccacgatgatcaggtcgaaatgtcccggagaaaacgcaggctttccgtcggatgctgtttcggtgtcgattgcaccgatcatcgtctggtaggtggagaacaccacccgggcgtcgacgtcgtgcttgttgtcgcacagattgcatagcgaccagtcgggatagtattcgccgtaagcgcttttcgcctgcttgaccagttcgacacgatcggcaaggaacagcacgtttttcacaagccgcgcgcgcatgagcacgtcggtaagtgcggcggatacgcgggttttgcctgttcccgtggccatgacgagcagtccacgacgcttgcctttccacaggttatcgcagaacgctttgatcgcttcgatttggtagtagcgtccggcgactttctcgttaaccggaacagtccgcgggtcgatggcttccctgcgccggttcataatgcgttgcaggtcatcctgcgagaacactcccccgaccgggcgtgatggtccgttctcgtcatctacgaattccgtggcgtatccgttgctcaggaaaatcagcggacggtatccgaattcgcgttccagacatttcgcgtactgtctggattgttccagtcctttcttcggatcatacgaggttcgtttcgcctcgatgatcgccagcggcttgccgtctctgcctttgaggtagtagtcgacatagccgacctgcccctcatggtcttccataccggtgaccttgcgttctttgacgacctcagcctcggaatcaacatcccatccggcgagccgcaaatcaaggtcgatgaaccgttgccgcgtctcgtattcgctgatatccatctcgctgtccggcatgggtggacgcggagccttctgcacggacagcgcggctcgggattcctcaagctgacgttcgagttcctggatacgttcggttttggcgctcagttccttggcgagttcctgtttcgcggcgtcttctttggcttggacttccttacgggagagcgcttgttggacgcacggcacttgtttcggatcgaaggcgcgcttttcgtaccatctgccgtacgagtagtcgatccattggatgaacacgaacaggagtttcagatcgaacatcgcgtccttgggactgatgcgtgtcttgccatggacggtgatgtttccggctttgacgatgtactggaacgaatccaacattttctggttgccgatcgcgcgttcgaaagtgggttcgtggattagcgattggagattgtcgcgatacggcatttggatggaacggtccgccgcgtacacccatttcaccgccagttcgaacgctttgcgcgtggccatggcgcacatggtcggagaaatggagaacgctttttcggcttcgacgcatggaatggcgaactgctcgtaatcatcctgacccagcaggaacgagaaattgctcatgatatgcccctccagccccatcacaccgcggaaaacaccatatgagttcatcataccgcttccacggcttgcatagggtgttattccagtgtttttccaatcgtttctagtctgtgtcagccacagaaaagaagcttgcatgcataattccagagaggctgttgagaaggtggagcattccgccaaatcgcgatttatcgacctgcgcgacgaaagcagcaaatttgtattgaaggcttaacggaggaaggggaactgtcatcgtctctaagtcgtcttttgtaattgcttctctagttgcaccagccattcttgaatgttcaagaagaaaacgctgatatgaatcacttgtaaaaatagaatttaagacacgcggcaacattctatttggatcacaacgcacaatagaaacatgttgattgacacggcctcctgccaaataatcaggaagaagacaggaacgggcaactgatgcaccagtgatattcaaaagaacgtctcccttgtgcaaggtaacattatccagcttttttgcttgaatttcatcgatataagctaaatcttttgattcaaaatatccattatgaacattcatgcttctaatcaatggaatacctgatgttttataagcagctttaccgccacgaggcgtagcgccagagccgagtttagtgcaaagagaagctaatgtgatgcgcgcccatctgttctcttcgactgggtctccgaacatttcgataaaccgggatttgacgagagcatcaaggtccataagatgcgattccgctatcgtcacttgattcgaaatcatttcgaggttccgaacaatactcctttgaatttctatcgagggtaacgtgacctgcatattacgcaaaatggtcagattgatgttgttctgtgcagcgcccctgcccgatgatttcgatatcgattctcgggattttaaataatggtataaaaaatcgcgatcaagtgaatcatctttaattttgagaccagcaattgcttgattcgttgtcgcaggaatcttcaagatgctcacagcaccaatcgaagcgaatattgaatatagcagggttccagactcaagcattttcacagaagagttgttaaatccagcgtctgttatgcgctcttcagttgatgaaacatacttttcggacatgtctccaatcttcacccaaggtatggttccatctttccagtattcagcaacggaacgtttgggagttccaccggagcatatctcgcacagctctccgagcttcactttctttccgacaaattggggtttgtcagtcattctggcctcctccgagcattttgtgcagttccgcgaggctttccgtcatctgcctgttcaaatcatcaagatcggcgaggatttcctcagtcggtggatattcaatacgttcgtactttgtttccgcgtacttgttgaagctgaaatcgtaatcgttttccacaatttcgctcttcggcaccagaaagctcttatcagtacgggcgcgctgttcttccgtgtcgaggtttccccatcgctcgagaatgtcgggaatgtcgttgtgcttctcgtccgaatcgcgcttgtcgtcgagcgtgtatccgtcgccttccatgttgtagagccaaaccttgtccgtgccgcctgcgtccgtcttcgtgaacacgagaatagcggtacttacgcctgaatacggcttgaacactcctgacggcatgtagataatcgcttcgaacctctggttgtccaccagttcggcgcgcaactgccggtaggccttcgagttggagcggaacagcacgccgttcggcacgatgcacacacaacggccaccaagcttgagcatgcgcaggaacaatgcgacgaacagcagctccgtctgcttggtttccacaaccgccttcaacgagtcgtctatgtcctcaacatccacgctgccagtgaacggcggattggcaagaatcaaatcaaacttgtcgcggatggtgttcagatgggacaagctgtcctggttgcggatgtcaggatgatcgatggaatgcaacagcaggttcatcgcggaaatgcgcaccatggtctggtccgtatcgaagccggtgaactgttcgccggagaatgtcttccactgttcctcggtcatctcctggtcatggttctttctgatggattccgctgcggaaataaggaatcccgccgtgccgcacgccggatcgcagataagctggccgggtttcggaccggcaagcgccaccatcatgttcctgatgtgctgtggtgtgcggaactggccgttcgtgcccgcggtgttgagcttgctcagcatgtattcgtacagatcgccaagatcgtcagcgtcctgcacgtagttcgacagcagatcgtcgatgccggaaacggccttttcaagcgtcttgggcttgttgaaaccgaaggcagcgtcctccatgctttccgcaaaggcgttatccgaatgcatggttttgatgaacgggaacgccttctggctgaccacgtcaaacatctgctccgcaggaagatccttgaaccggctccaacggattgcctgtccttcctccgtttgcgggaacacatgcttagcagtcatccccagcatttccatgttctcggcttcgagctccttgtcatccaaggatttcatgaacatgagatacgtcagctgcatgatgacctcgatggggttggtgacaccaccctcccacatgcgctgccagatgtcgtcaaccttgttcttcgtcgctccggtaatcatttactatcgtccttgctcgtttcctacattacgtagtctaccggcattatcgtttggccatcgcatccagccagccgaaattatgtacatttaacgcccaatcagctctctcagagtttcccgaaatgcgtgttctgcaaatcacggatatgttcgcgccgaactgccttatccgtaatattcaggctttccaacctgtccgccactgcgttcacgtcaggccccatgcattgcggatggtcaagcactgtagatctcagatcattcgtatgcaccacgaactcacgatcggaatgagtttcactttgaacttggtacgattcgcaaaacatacaatcgaaatgaaaaccgaatcttccaatcccaataattccttcaagcattgaatgtgcccgtaattctgccgcaaaggcgaatggattttttgttcttgccaaggtacatgaaccattcagaatatttggaatcgccgtaaatcgtgccggtatagttcttcgtctccactacgtaaatgccatacgctgaaacaaccacatggtcaatctgatacagccccgtcgaatccttgagcaccaaatcatccagcaaacggtactctgattgcggcagtttcctcagttcctcactggcccaatgcttgccagccctgccagtaatttgattgccccaaatcgttacgattgtcgcaagaatcagaatcggcagaacaatcgcgacataccaaatagtcaaattcgactgagcaaaagcaacggtggcaaaacgcatcactgcgacccttcttccttgaacaaccctcacttgcagcataccccctctttcgctcacatccgaatagaatgatggaaaatcgcaagacgtgcgcaaatccaatcgaaaagcaggaggttctcgatacgtttgctgacgaatcagccgtatcaaccaaaacgcaacaatgcagatacaaaggcacgaatgcgaaacatgaaagtggcagccgggcagttcaccgtaacggaaaagccggagcacaacatcagcatcatcagtgggttcaccagcgagcggcacgcaatcatgcacggatattgttgctgccggaaggtctgatcgcccgaagtgacgatgacccacgctacacggccgaccacgcgcaaaccatagacggcccattcgtcaccgcgctgcgtggcatcagcgaagccaacaatctcgccatcatgggcacggtccaccttcacgaggacaccgccgacctgccgtacaactgtttcctcgtcatcgaccatggccggatacttctcgaataccgcaaaatccatttgtataatgcgttcggcgagcgcgaatccgattcaatcgcgccggggcacgagattccaccgctcgtggatatcgatggttggaagttcggtgtgatgacctgttacgatatccgttttctggagctggctcgccgtcacgcggtggccggcgccgacgtgttggttgtaagtgcggcttgggcgcgtggcgagggcaaggtggatcattggacgaccttatgcaaggcgcgtgcgttggagaatacctgctatcttatggcgtgcagcgagcatagtgggcatgacatcggccatagtatggtagttgatccggccgcgcgaattcttgcgcagtccggcgaacgcgacgaactgatttacaccgacctgaatcggaatcagctggaggacgtgcgccgaatacttcccgtgctcaagaatcgtcgtatcacgttgtaatcgcctgtacgcacaacaggacgcacaggcgctggcgttattactgtccggatgagaaacgtgcgaggactccggacttggccaaggcacggtacagtccccatgatccgaaaccggcgaatacggccgcgcttagcagttcgcatgcggtgccgatgagcccgcgtggactgaagaatgagaatgcctggtagtagaacaacaacaagtagaagttgtagacgacgccgaccgtcaaggctgccagaatggtgatgctgagtgtccaacgacgataacggaacagtgcgacactgcttcggcggcggacgctccgacggcgatgtcgatcacacgccatgtcaatggtctacgtttttcctgcggcacgcctttggctgcacgcataaactgcgcttgttcggatggcgtcaacggcaggcaattgacgataagtttgcgattattctcgattcccacctatcccaccttaggacagacatgagataagcctttcacatgtgagtggcgaatagattcagccgggtctgacttgacccggctgaatcacatgtatgcgcccgtctgttcaggcgagggactcgtacgcttgcacgtcgaccggctcgagccattcgttgctcatcacgttcggatctcctgctgaaaccatgaatgccagatgggagaaggattcgcccggagccgcaccatgccagtgcttggtgtcggcgggaatgcacacggcttcgcctgccttgagttccctgggctcctggccttcgatctggtagtagcctcggccgcccacggcgatgagcacttgggctccaccgtggtggatgtgccagttgttgcggcatcccgactcgaaggtgacgttgtggatggagatttcgggagcgtcaagcaccggtgcaagataactttgacctacgaaatactgggcgaagccgtcgttcggctctcccatcggaaatgcgcttgggttttccataatggtcctttcgtatcaatacgtgttcattgaacctctctgaaaaaccaatgtccaataagtgtcgaacatgcttttccatgcaacaaatgcatatagagaaagctgcgacacgtattggattaataaccgacgcaacggtaccgtggaacatattgacgtcgttcattccatctatttcaggcaagggagctgcacaaccatgacagacatgcaatacgcgccattgggccggtcgggaatcaacgtttccaaggtctgccttggaggcatgagcttcggtaaggcctcgccggatttccatcagtggaccatcgaccagcagggaacggaacaagtcatcggccacgccatcgaccgaggcatcaacttcatcgacaccgcgaactgctatgccttcggcacttccgaggaatacatcggtcaggcgttacgcaatctcaatgtggcgcgagatcaggtggtgcttgccagcaaggtgtacttcaatgatgggcatctttccaaagaagccatcaaccgagagatcgacggcacgctcaagcgtttggacaccgactatctcgacctctacatcatccaccgtttcgactataccacccccgccgaggaaaccatggaagccctggacgcgctagtcaaagcaggcaaagtacgcgcattgggcgccagcgaaatgaatgcgtaccagttccacaacctgcaggccgtggccgacgccaatgggtggacccgattcaccagcatgcagtgccactacaatctgctctaccgcgaagacgaacgcgagctcatccccgtatgccagcagtacgacgttgctttgacgccctactctcccatggcttccggacatctggcacgcccgacatggaattcgaattccacccgcggcaccaccgatggcaccatgcacaacaagtatgaccaagcgaaggcgcaagacatgcccatcgtcgagcgcgtgcatgaggtgtccgagcgccacggagtgcccatggctcaggtcgcgcttgcatggcattgggccaaaggcgtgaccgcaccgatcgtgggctgctcgaagccggctcgcgtggatgacgccatcgccgcgttgaacgttcagcttacggaagatgacattgcctacatcgaggagccgtacaccgcgcacgaattggtcgggccgctttcccgccccggtgaaaaggccttggccggcaccctggcgcccacgctcaaggaaacaacccgaaactaaaaccatatgtgacggtatctgccttatatatggcagataccgctccccgtctccacgtatctcgcctatatatggcagatagcaccggacagcctcgcaaatctgccatatatagttgagttagaggccgagaccctccacccaagaagtcacttcgtcggccgatacgctggacgagaacctctgaccatcctgccagtcgccagctcccgccatatccgccaaatcagaaccgctgctccccaacggagatgacgcagaagtggcgaacggaatgactttctcgccggtgaagtcattgtcagtcacaaaatgattgaccggccatacggccccgccccaccagatcggatacccgatgaatacagtgtcgtacttatcccacccatctggcgaggtaacgttcaaaagaacatcgcgcaggctttcatcattatgctcgccgttcactcgactgaattcgtcgttccagttcagatcaccactggaatattcccgctccggggtgggctcgaacaaatcaccgttcgccgcatccgcaatggccttggccacgtcggcggtgtgacccgtagcggaataataggccacgagcacatgacttccactctgccggcctccccgcgcattcggctgtgagcttgtggaacaacttgccgcagtgcaggattccatcgactacatcgactacaaacaggagttctatgacggcgtgcttgcaggaacaaccgaatactacagcaatctcatcgacgtaaacggcggtacagaaacagatccgcccgcctgcgagcatctgctcgactgagtactccattttacgcgcaaagccatgagctctctcaacatgtagttaaaaaaacatacgtcagcattaaatactaaatcagactgcttacacgtggccacgcaaccaatctgattctctatcggctaaaaactcctcacaatcataagtcgcgcagatccacgactgcatcccacaatatgcatgtccgcgcagcccctacacgtcggaatcggaaaagtcgctaaagtcatccaaagatgacacccgcttgcaaataactatacggatattccactcgtggcagactggcgttgtgtataggagggaaaatgaaactaatcgccatactgttgtccatcgtcatgacgggtgcgcctaactccatgactaatcaaggtagtctttttacatcagcaaacgttctcaatatgtattctgcagagatataccccaagtgcccgccaatcctacactggctctgccgagtcttctgacatgatgacaggaaaacgcgcatgaaactgccatgctcctttttcagaagatgttttagcaaatcctcctatggacttaatccatttcatatgcagcgacaaaccgtttccggacaccggcttgtcaggaaataagttctttgacgaaatatcattcacctgatccacatgaattaaatcatcgtcatcccaaaaaacaatgagacggtattcacctcctggacttccatgcacagcgatatttgtatatagctcatgaatcaaagaaaaaacctcacgggaaaaagcatcatcaagattcttcaaatcttttagcgcaattctcgtctttccatgaaatccgagttccttcaggaaggaatccccttgctcacctacaatttgcaatccagagagactcatattgtccgcttgtactgattccgtctttccaccattcattaaatcaacaacagatcgcatctcatccaaagtttctacgacgagagccctcacttctcttatttctttctcgtcaaaggttttgttcttctcagcatccaagattagaccgtccagcaaaattgccatgtatgccaagttaccagccactgaatcatgaattcggctggctaccacgctctcttttcgcaggtattcgacgtgctgacttaatttttcataccttagtttgttttgtttgagctgggcagcaagctctttccacgcaaacgtttttccgacgaagtatgcaaagaacatgacaagaattaacatgaaatactcattggccgccacaccatcagcattaaagcgccacattcgaaccaatgccaccgcgaacggatacagcatcccccacaacgactcaattcgcagccccgcataccccagagccaaccaagttccccataaaaagcttggaccaccgtcatctggaataagacagcaaatcacaaaagtaaaaaaaatgatattgcaacatataatcggccgccgcggcatcaggacaacagctaatacatgcacgcatacgaggaaaaatgtcatcacacccgcagaagggaaaaacagtatttccgcaatagtcatgatggcacaaaccgctacaagcagatattggaggtgaaatacgcaccatgagataaatggatttactcttttagtactcacgttcattaatttccatccattgaattactgcttgagtcctatttttagcccctaatttcttcatgacccttcgaatatacgttttcaccgtaggttcccctatgccaagcttgatgccgatctcctttgaggtaaaacccagggaacacagccccataacctctcgttcccttttcgcaaacgtttcatagttgacatttccacttttggcagtcaataatctctcatgcgactcctgcgcactttcggaagatgcatatttaacatccgcccgccgcccattcactattgcacataagacatggcaaagacctttcacattcgccttatccacaagacagctcgctccgttttccagagcaggcacacagtaacggtccagagaaaaagcagtcatgcccactaaatcaacctgagcagtctcctcacgaatggtccggcacacatcgcaaccgctcattccctctagagacatatccacaagcaatacatcaggacgcgtccgcgagttaagactcttactcaccgcggtcagaccatccgatacagcccaacacacgttagcctgcggaagaatacgctcaatcatcatcttcataacaccaagcgtcaatctgtcattgtccacgatagcgattcttattcgttttcccaaatacatcgtcactcaccttcacccctaagcatacaaatatagccacgcattgcatcacgtacaggccatcacccagccagcagcaatagctattttcaaacacggaaaagcgaaaaatcctcattttccagaaccggcatccaagatccccattcccctgatcgcccagaatcacttaacgctaaaagcacaccggccgatcccgtccccaaatccatggaacacttgtatccataaagtcccgggaaaacaatgtttccattgttcttcatcaggtaaagattcaatccatcaataatccgctcccacagctcatcatcaatacctaagtcgcgcaacgctattgcagcaggcaacagtcctgcatagcctccgaataagccaccattaaacgtgcaaaccatatctgaaccttgggaaagccttctaagaaactcctcattaaggaattccattgactcattaccatctttataaacttcaataaaagctagggccacaccagaagttccacaatccagataaggcattgttctgggtttattcttcaaatgatccacgtaatacatcggacgctccttgttatccgcattggcaagatgcgttagcgtaagacgaaaaatgctttccgcacgggagcgcaaagcatcgtctttcctgcaaagagaagccttccacaggaacagacctgcacccaaccagcccttcattaaggtaaagtccgctttcgaactcagcatgtcttgcgaagttaaaccacaatcgcatctctcatacaccttggaaagaatatacgacaacattttttcttcatgcgagttcctagatgctcccaatgacagaagagccatgccaatgccagacaaaccagagtacaaggaatagtcgtcaatgcctgccaaataatcaatgtgagagattccgatataagaaagcatttcatgacattcctcgcgagaaaacacctcatatgcagccatggccacacctaccgtaccgttaaacaatcccgcgcggaacgacataccgtctttcaatttacgtaataccgatatatatttctcccgcgcaatagcataaaaccattccgagttttccaaacatgaagatttcagcaaagccaagctcacaccggcaaaaccagacccaatgctatatttagacatctcatcgccatacattgaaatatcacctttgacaggatattcacctcgcaagtcaagaccagagacaatccctttataaagaagtctcataaaggtttcaatattctcaggatctaaaagcttgtcacaagcctgtaacgctttgtcgataaatggtccatgagacaataacggagtcaagccaagcattcgcgatctgacagaccgaagaaaagaaactgcctcattcccaaagtgcttttgcaccatataatcctgacagaacaacaacgaaggagccagataataaaggggacatatgggaacaaaaaggcggtgcactataaccgcgaaggcataccaatcttgttgttcatagttgcatacagcatcgttggtaaatcctggagtagcgatatctacttgaaaatcttgggaaagttttttcgccgcctcaaaatcaatcagtttaatttctaaagaatcattaatcagcacatttgataagctcaaatctccaaccgcaaatccaattccatgcattttcgcaattgcactttccaatttggttgcgatctctttacaccctcgccaataagaatcagagcaatccgtccgagcagagcatccatcgaaagggaattccattgctatgtactgctgcaaatctcgaccttcaaaaaaatcctcaactaaaaatgcatgattccagacatcaaaacaatcgacagcattcacaacatcagagagcggactcaaggaacgaaggatttgatattcatgcttgattcgatgaaaagcatccaaacatgacctatcactgaccccaacattttttcgcccttctttaaggatatatttttttgccgtttcgcgaagcgagatacaccccaccgttattactaaaatggacagcggagtctatttgataatccgttaattttccatttgagtattcaataaaataattattctctttaacatatataggttcatcaacgaaagaaggcaaggaatacagcggtaattctttatccggtattaaatcaccctgaggagtcactatcacaggtacattcttttcgtttgaaaagcgcggcttcagagcaccatatctgaaaaatacattactattttgccattgtttatcagttaagatataaggaccatcatcatatttacaaacaatggtttttaaatcttttagtagctgaataaaaatatgttcagaactggggtaaatagttatgaatttacctgactcaagtctatccgcatattttccattcgcctgaatgaaacaagttctacttgaaagatatttaaaagaaatagatttaacgaaaagatattcagcaacatcatagagaacattctgagcatcataaattgtagaagtgatatgaattttccaaccttgaggaggaaaagagtacatcagacaattgacataagtccaatgcccatcagacctaacgccccattgctctgagttgtcattcgtcggcaaaacataagcatcttcacaagcataaacaggttcgctatagtatatggtctccttatctgccgagaaacggaggtaatcatccgccgagtaaccaaccatcacaattccctcttcccctatatcaatccttcaagagttgattttgaacaaaaaatctatacgctggacatctttcaatgagctctcgatgatccccctgatccaaaagataaccatcttcaataaagaaaataacgtctgagtctattatcgtagacaagcgatgtgaaatgacaattgaaatatcatactcatgcgatcttaataggttatcaagcacacgtctttctgtcttcacatcaagattcgacgttgcctcatccaaaataagtatcggagctttccttaaacaagctctcgcaatctgcaatctctgtcgctgtccaccagacaaagacatcccctgctcaccaacactcttttccaaatcaccaacggaaataatttcatctaagcaagcatttttcaaacatttattaatgtctttttctgatggcacaaaatcaagaccaaaaaataaattttctttaattgtcgtagagaaaaggagattatcttgagagacgacagtaaaccaccttctccactcttctagatgctgcccatcaagcaagctctcattgatagcaatggctccagaatttgcactatatagacctgttattgtattaataatagtcgttttcccggatccagatggtccaataattgcatatcgaccacccttttccaacctcatactaacatcatgaagaacttcattatcattgtaaccaaatgaaacgcttttcagttccaaataatcaacattattatacgcaaagttttccatatctacttctcttgagatccgatgacacggttgattctttttaaggaacctttgattgtttgacaactcaaataaaaggtaaataaaccacctactggagtaaccagctgaaagaataacattacatatgcaacaaacgaaccgtatgtcaagagatgtacgtccatcagatgaacaccatagcaaacaatgaccccagtacaaaaaatcgaaatcagattttgaacgggcgtaacaaaagaatatactttgtcattcaagagattaacttcttttatttcatttactcgtttcttgaattttagaagcatacatctctctgcattacataacttaacagtgcgcatacttcgcactatttctgaagtaaacgtatttaatttaccaattctctcttgcagcatcatcgcatttctgttattaaatatacctaagggaacagccagtatcatcactgcaggaaagataattagaaccaaaatagatagtctgtagttaattacagtaagagcaacgacggaaaacagtatattgataacactcgaaacaaactgaggaatactagccgccacaaaattcctgaccagagagatatcatatactattccactggcgatttcaccgctattttcattgtcaaaaaagagcatatctttctcaaaaattatatccatagcctgaatacgcaattccgccacatgaagatcggcctcagttgaaattagcaatccaccaattgcacacaatatgaattgcgccgcaaaaagaaaagggaatacatacagtaaactaagatcaaattttttattatctataaaatcttttatcaaaagaggaacaaagaatgataacgtcgatccagcgatactgcaaaccacgccaagaatcattctcttgctaattcgcataaatttaagcatcagatttttccgccaaatattttgtattagttttaagcaactttcctttactgcctattctaggtttaacatcctcatcaccaacttcttcaggttttaatcctaagctttcaacaaaagcatctgataagtcatcaagcgccatatccttcattgaccaaattctcttatttaccctaatcaatggcgtcgcaaacccctccctccctggagctattaggtcgcttcgtagtattgtgtaatcattacttttttcaatccattcatcgtactgtccatttaaactttcctttgcaatttctctagatattcccgctttaatcgcttgttcgattatcttttcatcagacatttctacataatctacttctgaaggctggaacttttcatcaaatatttctgaaatgaatgcaacgacatgctttggatctttttctgaaatgtaggctatggatcccgatactctggccgaataatggtcagatgaacacttgtctaaaaaaatcacaggatgaatttcaagcttaatctgaccactcgtatacatttttcctatatcatcatttaatgttctatcaatttgtgcacaagccggacataggggatctaaataaaattctacagtcggaatatctttttttgacccaacttgcaccagtagcccgccatcatttgttgcgtttgtgggttttcttttcacttctgataatgactcatacgctttttttatatctttagcgtcacttgcactgtttctagacatgaaaagcccaataaatgcactggcgagaagtataataattataaatacagtaaacaatccgagaattgtttgcttttctctttcattcaatcttttcattacagcatccatctatcaaaatggctatctgttaacttcaaaacagatagccactgcagtttaaaactgttgctcttctacttcagcagaaccaactccacgaactatgccaatgatgcgtattcggatcacaattaggatccgtcgaacaatttccatgcgtgtcaacacatggtggccttttagaggtcatacttgcaggttgcgcaatcaaagcctgtaaactgagcaaatccttcatttccactcctttgaacttccagactctcatcacagcgaaacagatagaagtccagaaacatttcttccactgacgaaacccagtttgacacttttctcaatttcgtgtcttattcactctcttatgtcatcccttagatgacatttcaagccatatatggatctaccatttttgacatgtaacggctcgtttttcatgatgggttacagacatcattgtctgtaacccatcacattgcgaaacggccatcagaacctagaaatcagccctagaaaggactgggcatactctcttcacttgttgccgtccaaaattgccgatagatcgacaacccaaataagtgaaagctgtccatatactgaagcttgtccgaaaatgtcactttccatacaaggcagaaacgttcagcagcgcccctcatataggaagaaggaaagtgcaccatcttccaagccaccctgcgtgaaggagtccctgcgtacagtacgttccgctttgcgcgtcaaaccacggtaatcataaaaaccgtaatcgcaggtagtgtcagtgaagaggaaatactcgttcattccggcattacgaaacacgccaagcatgtggttgaacagcttacgtccgacgcccatgccccgcgcttccggggaaaccacaaacaacgttatctcagcctgatagcttttgccggcatctcgtttcaacacttcatcgacctgcaaaatcgcaatctgatcggcaagtcctcgacggccatccttacttgccaacaagggcaacgccaagcaatttcgcgtaatagcatgacgtatcctctgcgctgtggtaacacgggatctcaacgagcccaataccacgccaagcacccgaccatcacgttcagcgaccgtagcctcggtggtgcgggaaagaaaatcatgcatgtcgatggccgcgagtcgatgcatattacgcaagtgaatcgccttgcgcagcttatacttacgtaacccgcgctcatcgttcggaacgttcccattatcatccgactcatcatccacataccaagcctgacggacaagctcttcaagcgcaggaaaatccgtgcgacgcatcggtcggagcataatcatttctgaagtcatgctcccccatcctagccgcagccatgccaaaactccgctcacggatgacataatgcacatagtattgcgatagcaggaatgcgtaggatttgttggcattggcgtgtgacgcttgggggtctggggtcacacgcttaggatgagacaggattgcgtgcgacgcgcaatgaatgagaggttcatcatggcaatgttgattagacgaattacaggcactctatgcttagtacttgccgtggcatgcgcatgttacgctttcgccgtgcgcaatacgcattccggcacgagtttctggattgtttggctagcgttcgcagttttgttcgcgatactcggattcggtctgctcttccggtggtggacgatattgccaagactggtcagaggcatattgattgcggttgcgtgtattggtctggtcgcgttcggcacggtggaaagttgcatcgtcagtaaaatgcatgcgcaaggcaaaccggatctcgattatgtggtggtgctcggcgctcaggtgcgtaagtccggcccgagccttgtacttcgctaccgtctcgacaaggccatcgaatatttggatgagaatccgaataccatctgcatagtctccggtggaaaaggaccgaatgaaccgttccccgaagcccaaggcatggctgactatcttaaagagcatggcattgacgagcagcgcattcttgaagagccggattcgaagaccactgaggaaaacatcgtcaacagcaagaagctgatcagtgacgatgatgcttccgtaggggtgatcaccaacaatttccacatgttccgcgcactgcagattgccgacaaatatggtttggacaacgcccaaggcattgcggccggctctcccccgaacatgcttgtcaacaacatggttcgcgagttttttgctgagattaaattcctgctgtagatttcaagtttctcaagctgtaagcatatcgggaataagttgaggggttggctcttggaaccaacccctcaacttatttgggactcttacgagtcagaagctatcgatcgaagctcactcttcggaagcaagctcgtcagccacagcggcagctgcggaagcagcttcgacgctctcggcttcttcatcttcagcggcttcaccgaggaaggcgctcaggtccagggtttcgccctcggacttgaaggtcacggcgcgcatgccggcgagcaggcccttggaacggccgacttcctgcactgcggaaccgagctggccgttgcgcatgatggcctggatgaaggcgttcggatccatgccgtactgctgggcgatggaagcgaggaagttgaacacgtcggactgggagaccttgacgtccagcttctcggcgagcacgtcgagcaccatctggtcgcgcagttccttttcgacggtttcttcggcttcggccttctgctccttggtggcattggccggatcagcggtcacgcccttgagctgctgctcaaccatttcagccttgacgcccttcggcaccggaatctccaggccctcttcgagcttggcgatgaaagcgtcacgagctgcggtggcctgacgaccttcggcatcctgggaagcggccttcttgaggtcttccttcagctcgtcgagggtgtcgaactcagaggcttcagaagcgaagtcgtcgtcgagttccggcagctcttcagccttgacggagttgaccttgaccttgacctgagccttctcgccttcgtgctcgcctgcttccaaggtaccttcgaaggtggtctcttcgccggcggacaggccttcgagagcctcatccagaccgtcaagcatggtttcggagccgagctcgtagctcacgccttcctgggagtcgaccacttcgccgtcgatttcggcggtcaggtcgatgttggcatagtcacccttggcggccgggcgatccacacccacgagggtgccgaaacgctggcgcagggcttccagacggttgttgatgtcttcgtcggtgatttcggccttggcgacctcgatctccatgccgtcgatttccggcagttcgatgtccgggcgacgctcaacggtggccacgaacttcagcttggtctcgtccttggcggattccggaacttcctgaacgtcgatttccggttgggccatcggacggatgcccttttcttcgagagccttggagtacagctccggcacaccgttgttcacggcttcgccagcaacggcaccgaagccgatgcgctggtcgatgatcttgccgggcacgtggcccttgcggaagccaggcacgttgacctgcttggcgatttccttgcgagcattgtcgagatacgggttgaactcttccggatcaacggtgacggtgagcttcaccttggtcggctcaagattcctgacgctgattttcacgcttgcgctcctgaaaaatacggttcttcacatttctgccgttaggcaacctctacatgatagcgcgactcacggactctgcaaccagcgcgacctgccacgccctcgcgccctgctcggtgaggaattgcgcaacgtcacgtttttgcggttcgtcggtccaacacaggttgcgcagatactgcggtttgatgatgacgtccgcgggggtacgcgtgtcttccgctatctgcgccaccatcttgcgtgccttgtcaagcgttgcgagacgttccggataacgttccctccagactcgcgtcgctcgtggagcggatatgctctgcgcctcctggttttggggattgccgctttcgatgaccggccattcgctttccggcagatcaagcgcctgttggattattctcttccacatgcttggcttgattttacgttggatcggcgcgtaacgttcgaacattttctcctgttcggcaccggcttggatgcgtacacgctcgttgatggaacggaccgccctgaattgcgcggcgttatgcggcttgcgttccgccacttcgatgatggtgctgtcggcgagcagcagtgtcggcgaaatatcgtattcgcgtgccagttcatctcgtttggtccataatgctttcgccacggccagggcctgacggtccttcatgatttcggtgatatgcgagatgcgcagccatgggatgggatgctccttgcgtggcgcagttccttcgcgcagcgcgtaatcgaattcctcctcagcccattcgatcttgccttgcttttgcagttcggcgcgcatggtcgtttcaagctcgatcagcaattcaacgtccagcgccgcataattacgccagtctcggggcagcggcctgtacgaccagtcggccgcggaatgctctttcgcaagcgtcagtcccagataatgctcggtaacggcagctaatccgaaacgtttgagccccagcagccgtgcagcgatttccgtatcaaacaaacgtttcggctgcaatcccaaatcaacgaatcccggcagatcctgcaacgaatcatgcagaatccataccgcatcgcccaccgcacgattgaaatcgttccaatcagcaccttccgcagccaatgcctgcggatcaagcaatcctatgccggcaccgtctcttttgaattgcaccaaccaatcgtcatgaccgtatcggaagccagacgcacgttccgcatccgcagccaaagacccatgcgaagacgccaatgcgctgcagtactcgcggaatgccggtagggtgtcgatcacatcgggcacgccctcacgcggctcggcctgcaaccttggctcgtcagtcaacgggataatcctcctcggattgcgtcatggaccggaggaacctagcccacgcgcccacttgggcgcccgcgtcaaggcctccatcggcatagtctagtggcgtccaagacacacgaatctcacacccggtttcgggagcgtcggactgagtgccaaacgtcgtgcttttcgtgactgtgacggttcccgaaatatgttcgacatcgcacgaaccaacacggtccatcatcgcatcccaatacatggacggtatcagacaatcgccttcgcctccagacaacggcaacgcggcgaaagcgacgcaacgccaatgagaatgccagtcatttcggtatttgtgcgaatacaacaccatgatccagcctgtggaacgcgcctcgtcgcattgcatctcaactccaatgccgaaactcgccatggcgcacggcactggaatctcacgatacgacacgcttggtaatcgaggcatacgttctacggaaagcacggcgtcccataccttgtctggcacgccggaaggtcgggtcaacatttgttcaggagggtcggcgtaggcgcacgatcccctacctgtggcacgcgcttcgttgggcgtgccttgaggaaaagcatagatgtccaccatgattcaaggctacggcagagtcgccggttttgcggtatttcacagcatttcgccacgcgtcgaatgtgaagattttttcgcgtggcgaatgctggttcaacaattgcacgaatattcctttttccaatcgctgaggcactttcaaacgattgatttgccggaatcgttggctggaatatgcgtggcttcccgtttagtagacggtgaagccgtgcgattggaattgttccaccacacgctgtttcattgcctcggacggccccttctggtcttccaacgggtagggaatgttgagcatatgccattttggacggccaagctggtggaatccaagcacatcgatatgttccactgcgtcgccgaacgactcgcagatcttcgccacattctcaacgttttcctcggatgaggtgagtccgggcacgagtacgaaacgcacccagatcttcttgccggccttggccagacgctgtccgaaatcgatggtcggttgcagaatgccgccagtcaccttcttgtaggtttcctcatcgccagacttgacatcaagcagacacaggtcgatgtcgttcagcatgtcgtcggtatagcttgcgccaaggaatccggaagtatcgaggcaggtgtgcacgcccatctccttggccgcacggaacacgcgggagacgaatgctggttgcatcatggattcgccgcccgagaaggtgataccgccatgcgtcgccttgaaaagatccacatagcgttcgatctttttgaccatggcctcgtaatagacgggcttgccgtcacgcattttccacgtatccggattctggcaatactggcaacgcaatgggcaaccgctcatgaagacggtcatgcgtgttcccggaccgtcgacggacgtgttgatgtcccaggaatgtacgaagccgatatcaccgcttttcagcgcgttgatgcggtcacgccggtccaggccgatcggcgattcgaagcctgacaaccctcccataagcgtttggttgacgtagttttgcgattctctgagcatatgccttgttgtggagcgaaaatgtacgttctcagacatcggtgtcctttcgttgtatctctccaatggtttccccacattgtacagggaaaaccaaggggcgaagctttcacgctccgccccttgcactctaccgcttcacacggtaccgttcagtctcagtcgacgacggtgccctggtggaacgtacgggagatcacgtcgagctgctgctccttggtgagcttgacgaagttcaccgcgtagccggagacgcgcacggtcaggtgcgggtacttttccggatgctcgacggcatcctcgagctgttccttgcgcagcacgttgatgttggcgtggtacagaccgtggccgttgccggcgtccagaatgcccacgaggttgccgatgcgctcatcctcgtcgcggcccaagccatcaggggtgatggtgttggtcagcgagatgccgtcaagagcgtcgttgtagtcgatcttgccgacggagaacatggaaggcagcatgccatgggagtccatgccgttctccgggtttgcgcccggagcatacggggtgcccttcttgtggccggacgggaaggcgccggtggccttgccgtattccacgttggaggtgatggtcaggatggactgggtcgggaccgctccgcggtacaccggcaggcgcttgacctggcccatgacggtggagacaacccacttggcgatctcgtcggcgcgatcatcatcgttgccgtacagcgggaactcaccctcggtgcggtagccgacgatcagatcgtcatcggcgccttcgacgtactcgtcctcatggcccggagtggtcttggcgtccttgttgtagatcgggtagaccttggcgtacttgcatgcggacagggagtcggctgcgatggacaggccggacataccacaaccgagggtacggtacacttccttgtcgtgcagagccatctcgatggactcgtatgcatacttatcgtgcatgtaatggatgatgttcagagccatcacgtaggtctcggacagccattcgagagccttctcgtagttggccttgaccttctcgtaatccaatgagccgtcggattccggctggatcggctcgataacgcccttgtcgatgacctgcatgccggtcatttcgtcgcggccgccgttgatggcgtacagcagagccttggcggagttcacacgagctgcgaagaactgcatctgcttgcccacgcgcatcggggagacgcagcatgcgatggcggcgtcatcgccccagtgggagcggatttccttgtcggactcgtactggattgccgaggtgtcgatggagatcttggcgcagaagcgcttgtaggcttccggcagcttcggatcccagaagatggtgatgttcggctccgggccaggtccaaggtgctcgagggtcagggtgtcgagcagacggaaggaggtcttggtgaccagcgtacggccatcatcgccgaagcctgcgtcggaccaagtcgcccagtacggatcgccggagaagatcgcgtcgtaatccttggtacgcaggaagcgcacgatacgcaacttcatgaccaagttgtcgatgatctcctgtgcgtcggtctcggtgatcttaccggacttcaggtcacgctcgaagtacacgtcgaagaaggtggagacgcggccgaacgacattgcggcgccatcctggctcttgacggaagcgaggtagcccatgtaggtccactgcactgcttcctgagcggtctgtgccggacgggacaggtcaagaccatattcgttgccgaggttgatcagctgcttcagggccttgatctgctcgtcatgctcctcgcggaagcggatccagtgctcgatctccggctcggtgaagtcgttgcggtacggcacggagtccttgtcacgctgcttgaacttgatcagggtgttcacaccatacagtgccacacgacggtaatcgccgatgatgcggccacggccgtaggcatccggcaggccggtgaggatcttgttgtggcgggcaaccttgatctgcttggtgtacacgccgaagacgccgtcattgtgggtcttgcggtacttggtgaaaatcttcttgatttccggatccggctccttgccggcttccttgatggcctgctcgaccatacgccaaccgccgttcggcatcatggcgcgcttgcaaggaacgtcggtctgcagaccgacaaccacattgtcgacttccggagagtcgatgtaaccggcgccgaatgcgtcgatgccagccggtgtgtgggtgtcgacgtcgtagacgcgctgcttgcgctccacggccagatagttgtcatcgaggtactgccacaggtgcttggtcttctcggtggcgtcagccaggaaggactcgtcgccctcataaggcgtatagttcttctgaataaagtcacggacatcaatgtccttctgccagttgccctcagcgaagccttcccaagccttagcctgaagctcttccggggagactgccgtcgcatcaactgctgccatttccactccttctgggtgttggtttggcgacgcatcgttacgtcgtcgctagttatcgattctagctgcataaacctgtatagaacctgagtttacgaggaaataaaagtgacatatgtcacacttgcgaagtatgaaaaatcgcggtgccgtaatccggacaccgcgatttcttatatcgcatcaactacttttcatcggaagaccagcgtttccattcgcgatcctgttcttcccatttgatgttgcgttcctgcacgatcttccatgcatcgagcgcgtcttccctggttttgtatggtcccatacgatggctcgccggtgagatcatacccagttcaggctgttcggtgaccgtattgaaataccattgcttttccatatcactccttacgaagcgtgtaacgaaacaatagttcgtcgctgttttattcgcggaacgcgttggtgatcggcaagcggcggtcacgaccgaacgccaatgccgtcacctttggcccaagcgggtattgacggcgcttccattcggcacgatcgaccagtcgcataaccgtgtcgacggtggtctcatcgaaaccgtctgccagaagatcctcacgaccatgcgcatgttcaatgtacattgccaacacctgatcgagcagctcatattccggcagcgaatcggagtctttctgccccgggcgaagttcggcggatggagccttttcaatcgaattgacgggaatcatcacgccgtccggcaacggcgtccccgcagacccctgctcgttgcccacgatatgcagtccgccaatgcccatgccttcggcggcagccttgttgcgccagcgggagatctcccacacacgggtcttgagcagatccttgatcggagcgtatccgccgatcgcatcgccgtaaatcgtggaataaccgcaggcaagctccgacttgttgcccgtggcgacagccagaagccccttggaattcgaatatgccatgacaatcacaccgcgaatacgcgcctgcaggttctcagcggccacaccttcaagatcgagctgcttctggaaggagacgaacagcggttcgatgggctgaatgtcgtagtgcgctccaatattcttcgccagatcggcggcatcatctttcgaaccgtcagacgagtacatgctcggcatggaaatgccatacacgttagctcctcccacggcgtccgcggccatggccgccaccaatgcggagtcgatgccgccggaaaggccaaggcacacgcccttgaaatggttcttggccatataatccttcaagccgagcacacaagcggtatacacttcctcatccggatcaggcttggccgcgataacaccaacctgctgatgttcggaggcagtatccaaatcaaagaagctcaaatcctccatgaacatcggagaacgttccagcagtgtaccgtcagcgtcaaccacaaaactgccgccatcaaacaccagatcatcctgaccacccacctgattgaggtagaccatcggcgcgttcacttcagccgcacggcgtaccgcaagatcgagtcgagtatcagtcttaccctcctcatacggagaaccgttcatggtaagcagcaaatcaatatgctgctcggcaagttctgccacaggaccgccatcctgccagatatcctcgcaaatagccacaccaatacgtgcgccattcacatcaagcaccatggacttattgccaggactgaaaatgcggaattcgtcaaacacgccataattgggcaggaagtgcttgtcatagccggcccaaaccacgccgtcatgcaatacgacgagtcggttgcgtggcttggatgtctcgcgatcagtgccgaccgtgccaaccaccacaaacaggtcgccaagcccatcggcagccagttcggtggcgagccagttggctttgttccacgcggctttgcggaaggtggcccgcagggcgaggtcttcgatgggatatccggtaagcgtcatttcaggaaagaccacgacttgtgcgctgttgctggaagcgagatgcgcatagcgcatgactttgtctgcgttggagtcgaggtctcccacgcaagtgtcgatttgggcgagggcgaaacgaatgtctgtcatagttgactagtgtattgcgatttgcgtatcagatatgcaaacggcacgcatatggcgagaaaaaccacatgcgtgccgaatgatcatcgtgcatatcgctatatcttcagctatcttcgatcacaggagaattgggccgaagatcgaccagcttacgcaagttcgttcaacacggtaaacgctgcgttggtatagaattccacgcccgcctgtaaagattcgtccaatcccacgaagttcgggctgtgccagtcggggcatccttcctcaccattggagccgatgaaggcgaacacgggcaacgcaacctcggtgtattcgcagaagtcctcccccgccatcgacgggtggatcggctcaagttgcgcatattcccgcacatcatcggccacgatcttcgacagtccctcgtcggagaccagcggatcctggaaatcgtcccagtcgatgtctgcggtgatcccgtagccagctgcgatggcgttgacctgttccttgaagcgttcaccgaccatgatgccgtctgacttgtggaagtaacgcacggtaccttggaaacttgccttggccggcaccacattccatacatgaccgccatgcagttcggtgatggaaagcaccaatggatggaatggcgacacattacggctcacgatggtctgcaacgcgagaatcatcgtggcgagcgcttcgataggaccggtgcccttgtgcgggtagccggcatgcgtgcccgtagcgtggagcgtgacatggaatttcacgcatccggccatcatggggtcagggccgatggcaatctgcccgggcgcatagttggggttgttgtgtgcgccgatgatggcggagacgtcggccagcagtcccgcgtcgatcatggcgcgtgcgccggtgcctgtttcttcggacggctggaacagcagtttgatggatcccttgatttgtttgcggtgtttggcaagccagaatgccgctcccagcagatatgacatgtgcaggtcgtggccgcagccgtgcatgactccatcgttgaccgaggagaatggcaatcccgtgtcttcctgaatgggaagaccgtcgatgtcggcgcgcaatgcgatgcgcggtccgggttgttctccgcggatcagcccgaccacacccgattcgagcggattgttcaggatttcaatgtcgtgcgctctgagcagttgctcaatgtaggcgcttgttttgaattccttgaagctgcgctccggatgggcgtgcaggtaatggcggatttcgatgagttccggcgtgatttcgacatgttcagtcatcttgcgtgaatcccccttggttgcttctctccattaagattaagcggctttcaccgttgctgtcagcgtttcagcaggtgcttcgcgatggcattggcgacgccctgcaccacctgaacaagtacaatcataatgattaccgccgtccaagtcacagtctggtcgaatttctggtatccgtaggcgatggcgaaattaccaagaccgccgccgccgatgtatccggccatggccgacatgtcgagcacgccgatgaacaggaacgcgtaggcgagaatcagcggcgcgagcgcctccggaataagcacggtacgcacgatggtgaatttcgaggctcccatggctcgtgccgcttcgatcacaccggagtcgacgggaaccagattctgttcgacaagcctggatgtggccatggtgcacatgatgatcatcgggaagatcgcggcggccgtgccgatggaggtgccgatgactttgatggtcaacggttgcatggctgcgaggaagatgatgaacggtatcggtcggatgatgttcacgatcacgtcgaggatgcggtaaacgaccgcgttttcgaataggttgccaggacgcgttccgtagagtaccacgccgaggaccagtccgagaataccgcccacgatcatggtgacgagcaccatttccaaggtttgcccgatggattcaaacaggagcggtcgtagtaccgtccagtcgctacggcttgcgagggttacgccttcaatctgtgtcatgcctgctcctgtccggccctgataagggcctgttcatatggtatcggctgtgccgcggtaccgaaatcgacgatatcgctgttttgcgccagttcgttcaggaacgattcgacattgtctccgccgaattcgtaggtgatcgctccgatggccacgccgttgacagtgtcgataccgccgtacaggaggctgcttcgtacgccgtgtttggcgataagttgtgagatgttctgcccggatgccgcgatgacggtaccgtcttcacgctcttcgacgtcatgctgtcgaataagcactgtgacgatgtgtccgagattttcctcatgcatggtgttgatgcgcgactcttcaggaatgccactgatggcggtggagatgaatcgtttggtcaccggctgtcgcggggccgcgaacacgtcgtaaacgctgccggattccactactttgccggagcttatgaccgccacacggttggcgatctgctgcacgacgttcatctggtgggtgatgagcacgatggtgatacccatttccttattgactcgtttaagcagcgacaatacttccgtagtggtttccggatccagagcgctggtcgcctcgtcggcaagcaggatcttaggattcgtggccaatgccctggcgatgccgacgcgctgcttctggccgccggaaagctgcgacggatatttgttcgcatggtcgcttaagcctacgaagtcaagcaattgcgccacgcgcttgtcctgataatccttgcgccaatggtcgagctgcaacggataggcgatgttctgcgccactgttttggtggagaataggttgaactgctggaagatcatgccgattttctgtcgaatcggacgaagcttggattcgctgagcgacgacacttcggtgccaagtaccgtgaccgtacccgatgtcggcttctccaaagcattgatcaggcgcaccaatgtggatttgccggctccggaatagccgatgatgccgaaaatgtcaccttcgttgatggtgaggctcacatcgtcgacggcgcgagcaacggtcgtgccgcgtttgccgccgtcagtgccgctgccacgctgccggaactccttgaccacatggtcgaatgtgatgatcggtgtgtgttctgtcatactgccgctttcattaatggtttttcaacccttgaccatacaaccacgcctgacgttggtcgcacatacaggaaagccccctccttggagggagctttccgaaaaggacttactcggcgtccttggcttcctgttcgatcgtcttcaggtaatcctgaagttcggatgtgctgaacttgtcggtcagaaccgcggtgccgccggaattctcctgcagcttgtcaagcacgctcgaggtctggaagatcttaacgaccttcttgtagacctcgttgttcacgtcggccttgcgagtggcaaagatgttgatgtacggacgggcttcttcggattcggcgtcatcctggtaaatggcgtcggtggccttcaaaccagcgtcggcgacataatcattgttgatgacgcctgccgcgacctgcgggtccttcagggagttggcgacctgttcggccttcagcggggtgaccttgaccttggacttggattcgtcgatgtcctgcggagtggagaacggcgtccaatcgcccttcatcgtcaccaagcctgcagccttgagcacgccgatggcacgggcctggttggtctcgtcgttcggaattgggatggtgctgccttcaggaatctcgtcgacgctcttgtacttggtggaatacacaccgagcgggtagattgccacgccgccgatcggctgcagatccttgttgttctgcacattgtagttggccagatacagtaggtgctggaactcgttgaggtcaagctcaccggagtcgacggccggattctcggaagtgtaatcctggaaatcaacgatatcgacgtacaggttctgcttttcggcctgcttcttgaattccacccactgcggatcggtggcgcccaccacaccgatcttcaccgggttggcctcggttcccttttctgcggtcttgtcggatccgttgaacgcacgaactccaaagaacgctccgaccgcgaccagtgcgaccaccacgacggcgatgatgatgttacgtaccgtgtgattgacgcggaccggttcttccggcaatcctgccggctgctgatttgcttctgccatgatgaatcctctctcttcttcctcattgctttgcatggtttccaacgtgtctgtgatggactgcatgccatcgcgtcgtgtccaaccatacgcgacgcttccgctgcgagacgccgaaacctaaaaattgccttatcggagttcgttatagcgggcgttcaatcgcaatgattccagcattttcatcaatcctccggaatgtatggaatcatgcacaatagtggcatgcacaggtgtgtcggcaatcatgtccgctccctacactgagacaagcgagcaattacgaaattgcatattcggaaggtgttttccatgaccgcaatcgacattaaagcggcgtttttcgatatcgacggaacgttgacgagcttcaccacgcacgtcgtaccgcaatccaccattgacgcattgcgcgcgctacaatccaatggcgtcaagattttcatctgcaccggtcgccctcctgcgcagatgaatgtcgtgttggataccattcccgtcgatttcgatggcattgtcgggttcaatggccaatactgcattgatgacagcggatttttggaaaagcatacgcttgacgcaaccgatgtggccacgatcgtgcgttggctggatgagcatgaagacatcgtcgcctgcatcggcgaagaggattacgtgtatttcaaccacagcaacgatcagatgcgccgcacgtgggcaagcctgggtaagaccgcgccggacgtattctttgacgatcctcgagtgcgcacggcgaaacatgagacgttccagatgagcccatacatcagtcgtgaccaggaagccgagctgttgtcgctgctgacgaacacgcgtggcgtgcgatggcatccggatttcgttgatctgattcccgctgacggcggcaaggatcgtggcatccaacgttttctcgaccattatggctggtcgaaggagcaggcgatttcgttcggcgatggcggcaatgacgtggatatgctgcgctttaccggcatcggcgtggcgatgggcaacgccaccgaagagccgaaggcggtggccgattacattaccgatgacgtcgatcataatggtatttggaatgctctcaagcatttcgacatcatctgacgatctaccgttgaccgtatttcatttcactgcagcaagtagatgcatgcggcatcacaagtttcccatcgctctgtctctgcaataaaacaatcgaccaacacttccggctcatcggaagacggcatttcgggctgcgcgcaatgcgcaaatcctcaaagtcatgcaaatactagttaacgcaatactatttggtggattttgttcccgatgtttttcgtatagcaccctaggtcaaccctttttggtattttttcattggatatgccatacgatgggatatcttttcggagtatacgagattagggaaaatatggtcaaccaccataaaatgattaatgctgcaatcgcaacgcttgcgacttgcgccatgttgctgccggtagtaggcagcgccaatgctaatgaatcctcgaataccgccgtacttggtgccggctatacggccaccaagatttcgcaccccaatgcagggctgggcgaagatgacggtatcgtaaacgttttgaacggtgaatccattgatgatctcacgcagggtttgcccgagcgtggtcagaactattcatgggcttcggccggctacggcgactggatgtatgtgggcacctgctattccgcaatgggttccacgctgaaatacatggctaacaccatgggcgccaagtatgccagcatcaaggccgctttggatgttgcgttcaacggcgagctgttcctcgacaatggcgagaaccacagcttgctgctcaagatcaacgtcaagaccggtgaagtgaagatcatcgtcaatgcgattggcggagagcatgcggtcaacggctatcgtgcagccgttgaattccatgacaagctgtactttgctgccgccgcaaagggtcagccgtacctgctggaagttgatccgaacagtggtgatgccactgaaatcgtgtatcgttccgctgccatgaccactggtctgaagaagggctacactgctggtatccgtggtttgaccgtggtcaacaatcagcttatcgccagcatgatcaccgataacggtgccactattgtggcttcttccaacccgtcagcaggccaggattctttcgccactatcgctacccagaccgagggcctgtacaactatccggcatgcgctgtaactgatggagtgttcggtggatgtgtgtgggatatggtcggcttcaagggcaatctctatgtcactatggtgactggaaccgcgaagaacaacaagcaatccttcgcactcgtgcgcggcacgcaagataagggaaccggcaagtggaccttcaagccgctggtcggcgatccggcagacggcgccaagtacgagtggggtttcggagcgagtcgttccggcgcagccaacatggtggtatacaagggccacctgtacatcggcggctacaacgatccgatgaacgctttggagaaggccatgcagatggatttctccgacctgtacaaggatctggagagcccggtcaacctgtggcgtatggacgttgacgaagacggcaacgaaaacttcgaaatgctcgccggcgaagccaacaacaagtacttcggcgattccaaaggcaccatcgatggcaataccatgctgtccggcttgggcgacagcgacgagcagagccgtcacctgaaccagtatgtgtggcgtatgcagtcctacaacggcaagctgtacgtcggcaccttcgacatcagtgatcttgcatacccggcaacccagttcgccaacggcgacattctgaagcgtactccggaagagtggaagaagcagatcgaatacatcaagatcttcttcgactctctgaagaagaatgaccagaacggcacttccggcactacagacacggactctcaggaagcctccaagccttccgagtccgaatctcaggaaaccaccaagccgagcgatgatgacatcatgccgttgaacgaaggcgaagcatctgagagcgatcaagctgcacaggcagttgaagaagccggcaagaccgacgaagtggccgctgacgtggctaccatgcagcagctgctggaggacatgggcgctgatctcaactccaagcagaccgacgtggtctcccctgacggtgtcgctccgcaggccgctgaaacctacacgctcgacgatcgttaccagttcctcgcatccctgcagcggctgctcgacctgtacaacaagaacaagcagtatctgccggaattcattaccaacgagctcgacaagtggcttaccgaagagaatctggagaacttcatcgacttcgtgggcgtgctcagctacctgcattactccaacgatgagactcgtggctttgacctgatcgtctcctccgatggcacgaacttccagaccatcagccgtaacggtttcggagataacaacaaccacggtctacgcgtgttcgccgtcaccgattccggtctggcaattggcaccgcaaacccgtaccatggcactcaggtgtggctgctgaatgatggtgaaatcaagaatgctgagctgacgaatggcgatgcattcgactacgacaagtatgatagcgataagaagagcgccaacgccaacggtctgaccgttggcatcaaccccaatggcaataccgtggaagacgtgcagtacgactaccagtcactgaccgccggcacggattacaccgtggccgatgacggttccatcgtgttgagcagcgcattcctcaatggtcgcgaaaccggcagcaccggttctgtggtggtgttctacaaccagggtgcacgcgtgcgtttcactgtggccatcaaggacagcactccgaacgcaccgaagaaggatgatgacaagcagaatacgaagcctgccgcacacaagaaggcaaacactgccaacaccggttccaacgtaatcggcgttgttgtggtggtcgctgttctggttgtcgcagcaggggcattgttcgtgttcaagcgcaagcgttcctgaattgccagagcctgttcttaggactcattcctaagttcgtccgcatataacaatcccgtatgatccggttcgccggaatcatgcgggattttttattttgcaggaatcgcccatctcacgtcatgtcaaactgccatcacaagctgatttcaatgtgcgatatgcaaccatgtggaagttccgatacgggacccattgaaaatggcacgcaatcctacaaataacagattcaccgcaagccacagcaatgccatacgcagcgcggaagacgcctgcatcgcatcgcatatccaaccaatcgcagcaagacagggtacatatattgcagctgtcgccgtacacgtcaatgcaagataacggtaatcccctgccccaatcagaatgccatcaacagcccacatccaaccagccaacggcaatgtcacgccaacaaccaccataccgacagtgagcaaatgctggatctcaatcgactgagaaaacagcggggacgcacaccatccggcaatcatcaaaccaataccgattaccgttcctccgcataatcctgccctgccagcgattctcgtcaaacgcatggcttcatcctcttgacgggcaccaatctgcgcggcaaccaacgtctgaccggcaataccaatggcatcaagcatgttcaacacgaaattccaactggaattcaccacctgatacgcagccaacacttccacgcccatatgcgtagccagcaccacattcgccaccaggcatgcacgcaacgcaagcgtgcgcaagaacaacaccgcaccatcgccagcactgttcaacactcctgacaaacgcggccgtaaacgggcaccttccgcacgagtccacaacacagcaggaacaataagcactaccgccataaaccattgcgaaatcagcgtggccactccagacccaaacacaccccaaccgaatccgagaataaacagcagatccagcaacgtattgagtatcgcacccagcgtagcagctaccaacgtgatgcgaaccttctgcagtccgcggaaaataccgttggccgcatacaccagcaacatgccgggaataccgaacaccacggcacgcacgtagtcaaccgcgttatgcagcacactcccttgggctcccatggccatgcacaacgggcgtgcaataacgaacagcgccacagataccaccacgccaatgattccagccagccacagaccatcaacgcctgcttccaagccttctcttcgtttgccagcgcccaaaagacgccccacctgcgatgtggtgctatacgcaaggaacacacatagccccactacagtgagcacaatggttgacccgaccgacagaccggcgagcgcctgcccgccaatatgtccgacgatggcggtgtcgatgagcacgaatgctggttcggcgataagttgcccgaacgttggtatggccagtgtgagaatggtgctgatggtggtgtatgatgcgttgtttgcggtatctgtttcgtgagtattctgcgaagttgatgtggtcataatcgtaagcgtctggcgtgttggggactacatgtgcagtgtaaggtcacgtgtttcgctgttgttgttgattgctcagattttggctatgtctgttttgcgctgttgagaatgtcgttgaaggttttcgctgattgtctgcataaaggtagaggggcatataattcccgaaccgctcgtgacgcatagtccaagctcctgcgagacccattcgaccccatccaaaccctagtggattcccgaatccgccttcgcagtaatacttcatgtgaccgtcgaacttagccccgaacgcgtcaatgggctaccgcctggtctcaagcccatgagacactaggaaccatgactacagttatcatgcgcaccactgaaggcgacatcaagatcaacctgttcgatgacaagaccccggaaaccgtggccaacttcctgggcctcgccactggcgagaaggaatgggccgacccattcaccggccagccgagccacaagccgttctacgatggtctgaccttccaccgcatcatcaaggatttcatgatccagggcggctgtccgctgggcaccggcactggcggcccgggctacaacttcgatgatgaaatcgttccaggactgaccttcgatcgcccatacctgctggccatggcaaacgccggcctgcgccgcggcatggacggcaagatccacggcaccaacggctcccagttcttcatcaccaccgtgccaaccgaatggctcaacggccatcacaccattttcggcgaagtcgcggatgacgagtccaaggccgtcgtcgacaagctcgactccgtggcaactgaccgttccgatgctccgctcgagccggtcggcatcacttccatcgaagtgctgaagtaagtttcgcatcaacaagacttacggcaaaacaatgaaaagcccctcgcgtgaggggcttttcattatctccgagagaatctacagcagttcagatgagtctcacgaccgcactgatcgtgtcagattttgcgtaaacgaggttcggcggagtccttggcaccggtgatacgatacacatcgaacacgccttcaatcttgcgcactgcggcaagcaaagtattcaaatgctgggggtcggccatttcgaagctgaattggctggtggccacacgatcggttcccgtggaaatggagccggaaataatgttcactccatggtcggaaagcacgcgcgtcacgtcgctcagcagatgcgggcgatcgagcgcctccacctgaatcttgaccatgaacacgcccttggtactcgtccactgcacgtcaaccacacgttccggctgacgcttctgcaagtccagcatgttctggcagtccacacgatgcacggacacgccctgattgcgggtgatgaagccgatgatgttgtctcccggcaccggcatgcaacatcgggcgagcttgacccaaatgtctcccacgcccttgacggaaatgcccagcgagctggtggtcttcttggtgcgttccacctgcttgagcggcagagcctcctgctccacctcctcattcacctcgtcgctgcccgcatcacggaccagatgcgagatgacattctgcgtggaaatctgcccttcgccaatcgccacgaacacggcttcggcattggcgagattcagctcatcagcaacaccgatcaacgcctcgggagtcagcagagtcgcaatcggaagattgcgcttgcgcatggctcgtgtcagctcgtcacgaccttcttcgatggcctcggtacgacgctccttgctgaaccattggcgaattttgttgcgtgccttcgggctcttggtaaagctcaaccagtcacgagacggaccagccgattcggacttcgacgtaagcacctcgacggtgtcgccgttttcaagcttggtgtcgagcggtaccagacgtccgttcacgcgggcgcccatggtacggtggccgacttcggtatgcaccgcgtaagcgaaatcgatcggtgtcgcctcggcaggcaacgatacgatcttaccttttggagtgaacacgtagacttcggcagcacccagatcttccttcagggagccaaggaattcattggaatccggggtctcactcgtccagtcggcgagctgctgaatccacttgaaattgtcagcctcgctcagctcctggttctcgccacgtttacgatcggacttatcgggcgagctcagcgcacggccagcttgaccgttctccttgtacttccaatgcgcggcgataccgaattccgcacggcgatgcatgtcccacgtacgaatttgaatctcgacaggcttgccgccaggacccaccaccgtggtatgcaggctctggtacatgttgagctttggcatggcgatgtaatccttgaaacggcccggaacggggttccaacgcgcatgcaccgcacccaacgcggcatagcaatcctgaatcgtgtcgacgatgatgcgcacacccaccaaatcgtagatattcgcaaaatcatgaccacgtacgatcatcttctgataaatcgagaaatagtccttaggacgtcccgttacgtacgccgtaatattctgttcgtcaagatcttcgttgatctccgcgagaatctgcttcaaatacacgtctcgctggcctgcgcgacgggccaccagcaccacgatctcgttgtagatcttcggatagagcactttgaagctgagctcttccaattcggttttgatcgcgttcatgccgagacgattggcaagtggcgcgtacacgtcaagcgtttcatgcgctttcttctgcgcgctcggagttttgacgtaacgccaggtacgcgcgttgtgcacacggtcggcgagtttgacgaccagcacacgcacgtcgcggctcatcgcgaccaccatcttgcgaatggtttcggcttgcgcggaatcgccgtattccatcttggaaagcttggtaacgccatcgaccaaaccggtcacggtatcgccgaactcggcgcggcactcatcgagcgtatagtcggtgtcctcaaccgtgtcgtgcaacaggccggcggccacaaccaacggtcccatgccgagatcggcaagaatctgcgccacggccaacgggtggatgatgtacggctcacccgatttgcgccgttgcgaagaatgctgcttgaccgcacgctcataagcgcgctcaagaatgcttatgtcctcatcgggatgatggtattcgcacatcttcaggatcggctcaagcggatcaagcggattcgtgctgatctcgcagcccaacattcgggcagaatgaacctcacgctcaacgtcacccatcgtccacctcctcgctcgcaatgctccctatactacccgcgcctcaccgtgcatccgaggcatccgaccgcgtgttgcaaggccaaatacccccgaaaccattgagatgtcagcgtttgccgattcctctgcgactaagccagtgcgttcagctcaggaagccacgcctgtggaaccaaacccacgctcagcgcgatccgacccaggcagcgtttccgcctcgatgaacttcgcttcgacgtaacgctgaataaccagctgcgcgatacggtctcccggatggaacgtcacggtgtgttccggatcaagattgatcagcggcaccttgatctcaccacggtaccccgcgtcgatggttcccggcgcattgagcacagtcacaccctgcttgacggcaagaccggaccgtggatgcaccagagccacgtaacccgctggaagggcgatcgccactcctgtaggcaccagtgcccgctggaacggcttcagcgtgacttcctccgtagtgcgcagatcagcgccagcgtcaccggcatgggcataatacaattccgccggatggtcaggatccagcgactttaccagaacctcgacgttttccggttcgttatatgcttcgtcgaacgccatcaggcagcgcactcctgacacaccggctgaccgtcgtcagtggtgtaggcaagctggctacggtgcttcaccaggaagcattcggagcagatgaactcgtcaccctgcataggaatgacggtcaccgaggcgtcctcattgctgaggtccgcaccgggcagctcgtaatcttcggcgatggcgttctcgtcatcgtccatatcgttggaagtgttctgggagctcttgcccaaagcctggagcgactcctcgtcctcgtctttgttgcgcggggaatcataatcctgtgccatcgagattcctttcgtcatctatggtgcttatgcgccataggatacatgacttttaccccgcataggatacacgaatcgaaatactcgtaaaatccgacacgtggggcacaatggaataaacagaaattcttgaaggaaagtggtgtgttgtgcctgggaattcactcgaggaagcgcggttcgatcatgtcagcgacaccggtgaactcgtctttgtttcaggtgccggaaagttcgctgtaaaggtcgacgaagcgcttgaaagagccattttggaggccaagcagattcgttccgaagtacaggaggaacagaaaacacgcatcccacccaccctgccgatttcgcaaattcaatcgttgattcgcgctggcgccgatcccgcgcgtgtcgcggaaagatattcgttaagcgaagcgcttgttcggcgtttctcggcttcggtcgaaacggaaaagcaatatgcgatcgagcagtttctcgccgttccagcgccgaaggaaagccgcgtacgcacgctttccgaactgatcgaacgcacttttgcggcagcgcgggtgcgcttggaagatgtgacttggaaggccaccagacttggattggagccttggaaaatcagcgctcagttcgtctcctccggtcacaatgtctgcgcggaatggtcgtggaacatgcacgacaatgccgtaagctgcctgaattccgcagcacgaaaactcattggagaacaggacacatcgaaagaaggacacgccgagaaacacgccgatgaaaattttctcgtgtcactgaatcttcccggaaattccgcacggtcggcgcgtatcgagcaaacggtgtccgcatggaacacgcccgagccgtccatgcctgcagcccgtcccgcggcagcgccttccgttccgatcgcaccaatcggcggcgtgtctaatgaatccgacacgcctgacacgccgaacgcgccagccatcgcatccgacttgcctctgccgagccgaccggagaaccctgctgcaggagccaatacagccagcgcaacaaacaccgacacacgcaataccgttccatccacgccggagcctgcttcgaacatggcgaacgagaaccagacacttgacccgcatagccagaacaccaccaaatcgaagcgtcgtgccggacgttccgccgtgccaagctgggacgaaatcctgtttggcgactgaagttaggccacgtcgatcaagcagggaatgtcggattcgagcatggtgagcgacccgtgcacgcttggcaggtgcatcgccttttctgcttgcgtacgtgagtccacaatagtgacggctttggcggccgatacgatcacatcgccgatcatcggttcgacgcgagcttccaccggcccatacacgccttcatccattgcctgcgagcgcgtgcgcacctgcgcacggtcctccagcacgctgcgccatcgtgtggcgatgtcttctggattctcgccttgttccgcgtagagcatgacgcaacgcggttcaccgccgacatgggcgacgccctgcatgagccgctgatcctgtgcaatgtcaatcacggattcgggatcagtggtgatcataccgtggtccgccacaatcacaatcaatgtgcctttgggcacgctacggcgaagaaggccgagttgcccgtcgacgcgctcgtacgtgccgatccatttgtcggaatcccaaccgtaattgtgcccgatcttatcggtgtccctcagatacaaatatgtcagaccgggcgtttttgccgcttgcgccgcggctgcaatccgttttcgcggatcatcgttggaaatgtagtcgctgccccgtagcgccgcctgcgtcaacgcggaaaaggcgaatttcggcagtccagaactggtcactcgaacatcctgcgcgctcagccgttcgaaaatggtcggttgttgctgcaattcaagcggaggaattgcgtttttgaaggaaatcagctggcatatttcatcggttttcggattgagctgcgtgtagccggtcataccggtcataccggggcatgttcccgtaccgaaggtagacatggctgcgacggtggtgcttggcatgcatgttgcgatgggacgttgattggcggtgtcgttcatcagcgcacgcaagtagggggcatgtcccagcctcatgttgagattccagtagccgagaccgtccacgagcgccacaaccacggaagtcgcatcgggaatgccgagcgctccctgcaaacgcttcggatcaggatggactgccgttggcatggggtatccgatggcgttggaaacagcaggaagtaccgatgacaggtgcaacgctcccccacgggttccttcagatgacacgtcatcgccgtagcatgccggttcggtcatggtgagcagctcttcgacgcttggcacttcaacactcataattcccattcaagcaccgcggcggtaccggctggtagcattgctaggttgattaccattacttttccgtgaggagattcaccgcatggtgtcgcaccgcaaaccggcaaaaccagcctttgacccgcgtacggtcaaagagaacatcgtcgaaacaccgttgaatgaggagatgagcaagtcgttcctcgaatacgcgtattcggtgatctatgcccgcgcgttgcccgatgccagagatggtctgaagccggtgcaacgccgcatcatctatcagatgggccagatgaatctcaatcctgatcgtccgtatatgaaatcggcccgtgtggtcggcgaggttatgggcaagttgcacccgcatggcgactccgccatctatgaggcgatggttcgtcttgcgcagccgtttgcgatgcgattgccgttggtggatggccatggtaacttcggttcccttgacgacggtcctgcggcctcccgttacactgaggcgcgtatggcccaggcagcgcttggcatgaatgccaatatcggtgagaataccgttgatttcacgccgaattacgataacaagctgcaggagccgactgttttgcccgctgcgattccgaatctgctggtcaatggcggttccggtattgccgtcggcatggccacgaatatggcgacgcataatctgggcgaggtggttgccgcggccaagcatctgatgcatcatcctgatgccacgttggaagagcttatgcgctatgttccaggtccggactggccaagtggcggcgtgatcgttgggcgtaacggcattcgtgaggcgtatgagaccggacgtggcgcgttgaccacgcgttcagtgacgcatatcgaaaatgtgacggcccgtaagaaagccatcgtcgtgacggaactgccgttcatggtggggcccgaacgagtgctggaacgtatttccgagggcgtgaagaatcgcaagctggaaggtatttccggggcgatcgacttgacggatcgtcataacggcactcgtcttgtcattgaaatcaaaaccggtttcgatccgaacgccgtgcttgcgcaactgctcaagcacacgccgttgcaagacaatttcactatcaacaatgtggcgttggtcaacggccgcccgcacaccatgggtttgaaggaaatgcttcaggtgtgggtggaccatcgtcgtgtggtgattcgccgtcgtagcgaattccgtaagaagaaggcgttggagcgtctgcatttggtcgaaggccttctgcttgcgatggtcgacattgacgaagtgattcaggtgattcgttcgtctgacgatgctgatgccgcgaagacgaagctgattgccgtattcgatttggatgagattcaggcacagtacattcttgacttgcgtctgcgtcgtctgacgaaaatgagccgcatcgagcttgagtcggaacgtgacgatttgaagcaacgtatcgaagagttggatcgtattctcgcttccgccgaagcgctcgacaatgtggtgatctccgaaatggatgaggccgtcgccacgtatggcacgcctcgtcgaaccgtattgctggatgaggatgccgatggtaagcttgtgcctgttgtggcgcatggtgatgatggcgtgtccgcttcggctatggccgcagcccgtgccgccgcaacggtctcttccgcagcagctgatgttgccgcagccgctaaggcagcgacgaaggccggtgaagacaatgcggccgctgtggcattgcagattgacgacgaaccatgtgcggtgatgctgtcggccacgggtttgatcgcgcgaacctccgaagatgcgttggaacgttgggagaatcgttcttctgccgacaaacgtgtgaaggacgatcagattatttcgattttccctaccaccacacgttcctcatatggtttgatcacatctgccggccgtctgattgtggcgcatgtcgtggagttgccggttgtgtctgcggatggtccgctccatgtgactggcggcgtccatgccgaagagttgatcggtatgacggaaaataccgatccgattcgcggcgaacgcgtgattgctgcgattgccatgccaactgccgatgattccggtgatcatgccgcagaacctgctcctcttgcattgggcacgcgtaatggcgtgatcaagcgttggaatcgtgagtcgcccaccacgatggattcatggagcatcatcgatttgaaggatgacgatgaagtgctggctgccgctgaagcgcgcgatgaggatcgactggtgtttgtttctaccgactcgtctttgctgacgtttgatgcgaagaacgtacgccctcagggccgtaccgcgggcggcatggcaggtatccgcttggctgaaggctgctcggttgccgcgtttgcggtgattcccgccaacaaggtggcttggaattacgaggagggagacaatggcctgttctccgcgtctggagccgtggtgttgacggttgccggcgattccgaagcactgccgggcacggagaatggttcagcgaaggtaaccccgttggagatgtacccgacaaagggtcgcggtaccggtggcgtgcgttcgcagcgtttccttaaggggcaggatacgttgatcctcgccttcgtgggcacatatccggtacatgcttccacggagggcggtgccggcgtggaattgccgaagccggatatgcgtcgtgacggttctggtacggaactttccgcgccaatcgccatcgtcggctgacccattgcaatgtgacgtgcccgcgttttgcgaagtttggaatcgtttaggattccgttcgtaggacgcgggcattgttgttcctgcgttttcgtccgcgctgtcactatgcattagcgatgatgatctttttcaacagtaaagtttcatgccttgcggactatcgacgaaacctgcggcgtaaaggatttgccggtattcattgcgtgctttcaatgatgttccgttcatttcgctgaagctgatgctgccgctgggttggcgctgcaatacgtaggcaagttcggcgcatgacggtcttaatattgtttcgtctgcggtgaagctgacaattttatggctttttggtacggagaacagtaccggttcgccttgtttgagcacaatgatggaaccggatctgcgtgctggtttgaggtaatcctgttctggccaggcgattgcggaaccagtgagattggcgggatcggtcacgtcgagcgcaacgcaggattgactgtgccattgcgtgtcgctgcgcagcgcgtcgacggtgtctcgttccgcgaattgtgccgcgccaaaacctttcacgaacatgcctcggaccagtgtgccatgttcttccattcgtttgagtaccggatagagcgctgaaaatcctccggcaatccgttccttgtcaaccaaaggagcggcaatcacgccgtatcggtccagtaatgagtcgatgagcgccagctcacgctcctctacacttgccgtatgcgccatgccaatgccggtatcgctgttttcgagcatgcccggctcgataacaccgtctagtggtttgtttggcataacggttcgcccgtcgccacaagatactgcggaccataatccactcagcgccaatggtgttggaggacgcatggtgacgcgtctacgcgcggcacgacggggtgcgcgaacggttttgcctccgtgcagaagcgctcgtactggtgcgaacgaactgttcgtcattttcccctgccataccagtgaccataaggcttcttcgaactgccgctcgccccatgccggaaagatgatttcacccgtttcggagttcacctgcgcttcggcatgctcaagccagatggtttttgtcacggctgaaagcagttgaataggaaatgctccgccaccgcttaacgccgttaacacggcatccggcatggtcaacgtttcattatcgttcagcttatccaccgccgattcaggctggttgagcagcaaggaacctgctggatagaaggcgatctcaccagcttctttggcgttggatccacttgctttcgaaccgacccacaccacatccgacgatgagatgagttcgtcgagcatactaggctgatagtcacgcacacgtgccgggaataccatggactcccataccgaagcgttcaggaacacgccttccaactgctcgatgacacgcatcagaccatcaacgccttcgtagcgttcacctccaacagggccaacgccctgacgattaagcagaaacgcctgatagacgctcggatcgaccggtttgacggcctttctggccttggcaagagacaatgctcgaatacgccggaaaacatccttgtggagccattgctgaatatcgttcttttcggaagtctcacctgaatcagtgaatcttcccttgatgagttctcctcgggcatccagttcatcaagcgcatgcaccgcctgagccgcgtcaatgcccagttcggcaatcatcttgtcagcggtgaatggtccatgcgttttggcgtatcttgttacgcgcccgctgatatcttcttcggcgagatcattccagaatgttcgcccagcaagctcgccctccacttgtgtaatagcttcggcgtccaacaacgatgccatatccgtgcttcctagaagccgttcgagcacttccagatccatggacagcaactgcgtgcttcgttcggcttggggcacgtcatactggtacatcaccgatccaacgaagccgaacagcatgttctgcgcaaacggagaaggtgtttcagtagttgcctccgataaaagtattgttcccgcatgcaggcctgtcataatcgtgcgtaatgccggcaaatcatatacgtcctgcaggcattcgcgcgcagtttccaacaagagggggaagttcttgcaagtacgagccgcattcaacagttgcgcggccttcaaccgctgctgccagagaggcacacgcttaccgggacgtgtgcgcggcagaaacagtgatctggccgcacattcgcggaatcgagccatgtaaagcacgctttcgccaacttgcgtctcaacagtgcgttgcaattcgtccacgtcgaatagcaacagctcacgtgtaggcaaatcgccgtaaccgtccggcaatcgtaaaacaatgccatcgtcgaccgcgtacacttgaccgtcgaaaccaaaccgctgtttgattcgagtggtgatggctaacgcccaaggctcatgcacgcgcctaccatatggtgaatggatgatgatgcgccaatctccgccttcatcccggcaacgctccaccacgagatcacgatccgaaggaatcgtaccggtcgcttcacattgctcgtcaagcagtttggcaagattgcttatggcattatggtcgagaccatctcgctccaaacgttgcgcggtctcacggttgaactgtgcttccaatacagtctgagccgtattctgatcaccattctttgctggttcacgcctatgcaatccttggctgagctcacgcgtcaaacgcccttgcgccaatccgaaaccataatcacgcccatcctgatccccatgccaaaatggcaagcgcgcggtgcgcccgggagcaggaaccaccactaccctatctcgtgtgatctcctgaatctgccaggtggaagtccccaaagtgatgacatctcccacgcgggattcgtataccatttcctcatcaagctcgcccactcgccgaggacctggaccagagccctcttctggaagcaccaccgcgtacatgccacggtcgggtatggtgccgccactggtcaccgccaagcgttgcgctcctggacgtgcggaaatcagctttgcctcttcgttgtattgcagcggtggacggaatgcggaaaagctctcactgttgtaggcgcccgtcatcatgccgatgacagcgtcgaacatagaccggtcgagattttggaaaggtgcggaacgacgcacaagctcgtaccaatcgttcgtggaaagatcttccatggccgcggctgcgacggtctgctgtgcgagcacgtccagagggttgcggggcatatgcaatggttctatagccccttccctcatgcattccatgctggttgttacgccaataatctgttggcgggttatggggaagaacaacgcgtgcgagactccgccgacattgtggtcggcacggcccactcgctgcaatcccgatgcgatcgacaatggggcggccacctgaaccacgagatccaccgaacccatatcgatgccgagttccaggctggaagtggccaccacgcaacgtaattcgccgcgttttaactgttcttcgatctgtttacgtctatcttttgacacggacccgtgatgagccatggcaatcgcatcaatgtcttcatgcgattcaaccagcatggtggtggatcccaccaccgagtcatagtgcccggcaaattgctcgcggccctccggtgagcccaagtcacggtgctcactcagatcagttgccaccgtgccctgtttcgactccgcatacatgtcgttgagccgtgcggtgagcttctccgccagtccacgcgagttgacaaatatcaatgtggttcggtgccgcaacacctcgtcgagaatggaccgttcaatgaccggccataccgaaccgcctgtagcgctggtgtcgagcatattgcgcaatggttccacggcttttaaatccatggccggaacagcgccggggttcaccaccgttaccggttgcgaaccaccgagaaaccgtgctacttcctcaacgggattaacggttgccgaaagccctatgcgttgcactggatgcccaatcaacttatcaaggcgttcgaggctgacagcgaggtgcgcgccgcgttttgtacctgcgaccgcatgaatctcgtcgacgatcaccgtctccacgctcgtcaatatgctgttcgccttggaggtgagcagcaggaatagtgattccggcgtggtgacgagaatatccggcggatggctgacgattcttcgacgttgttcaggtgtggagtcgccgctgcgcatggccacttcgacatcggggatgggcagctccatcgcctcatactgctgggaaattccctgcaatggcagttcaaggttcttcgccacatcagcgccaagcgccttcagaggcgaaatgtatagcactttgacgccacgcttcgttttcttgcgggagcctttccctgcagctttttgttccgcatggctcttggctgccgcgatttcgccatgaacatccactcctgcggaacgcgtcccgcccgccataagccggtcaagagccgaaaggaacgcacaaagggttttacccgaccctgtgggcgccacaacgagcacgttctcgccggaatggatggccggccacacctgctgctggacttcagtgggccgactgaacgcatgtttgaaccatgccttggtcggctctgaaaacaggttcaaacattcgtacatacgttcgatgatcgcattaccgcaagacgttattcatcttcgtcggcaacccattcgagcacatctcccggttgacaacataacgtctcgcatatggtatcaagcgtggaaaaccgtatcgccttggcccgcccgttcttcaacaccgaaacattgaccggcgttatgcctatagcctccgccagctcattgacactcatcttccttttggcgagcatcacatcaaggttcacacgaatggccatatcagatcaccgccgccagttcatcacgctgttcgatggcctgcatcaacagcgagcgcatcaccaccatcaacagttcgaacgccgcgatcagtagaagcgccgccactccgaccgccagcacgacgtatgggaacatttgcccgtcaacccccatcgcagccatcagaaagtgtgaaggcgacaaccagatttgaccggccatcacggcgagcaccagcatgccttcaatccccgcatatacgagaatgtgattcacccaacgcatggccttgccggaaaagacatcacgtttttcaaccaaggtcagcaatctccacagcggcaccaacgcgaactcgaagcaagcgacaatcagcactgcggcaaccgcatacagccaatgcatcgagtcggcgtcggcatacttggaagcaacgccagcggatgccgcaatcgcactgaactgcagtccgaggcagcatattgcaattatcacaatcagcacacgcaatacgccaatcaccatggaacgtttcgctgcggaattcggcatgatatccgtctccttcaatccaataaacctgaatatcgataataatctatcgatattcgatatgcaaatcttgtgaaagtatgttagtcgatatttttctatcgtttttcgatatgtacgatgacgtccaacatatctcagaaaggaatcattatcatgccggaaccagccaacacttccccatcgcagacttcgcaatcccaacaatcatcgccattaccagaagcacaagaaacccaagaaacaccaaaaacacaagggagccagccaacacatgaaccatccgcgcatcaggaggaacaacctttggcgaaacccaaaatcacgcgggaagaaatagcgcaacgccccctcaacaaacgcgcggtcatcaccattggcgctgcatttctcatcactttcgcattcgaccgtctgatctgcagcatacctccgacatggcttatcggatatgaactgccggttttctggatcatctgtgctcttaccgtaaccgcgctgcactggaaaaccgcacgaaaacaagttcttgtttggcttgttttgggaagcatcgtcgccattggcgtgtggaatacactcgctcagtcgacctggtgctattcgagaaatgacgagtacgcgctcaccacgcaattcgttcaaccggcgttgcttatgctgcactgtcagctggtcaacgggcgttacgatgttcgccgtccacttcaggttgcctggaattggcttaccggctggttgcagcagccgtttattcacattcgcgattttgcggaaccgttttccgtcatattcgcaagatttgcagtcgcgtcgaagcaacgttcgaaagtgcgcgaaatcggcattgcgctactgatttccactccattgcttctgacgatcgtaccattgctcatcggagccgatcaaatagttcaatatgaagtgctgaacgttttcagtgatttcaacccgatgacgatcactctgcacatcatgttcatcgtgttgccgtggcctttgctgttctcactgcttattggactcgacgatgaacccacttccacgcctccggagcaacgattctccctcagctcggtaactgcgttcgtggtattggccgtgactttgactgtgtacatgctgttttgcatcgtacagatccggttcctgttcgcaggattgttcaccgatggttcgatcgcactgccagacggattgacctatagcgaatacgcacgcggcggattctttcaactgctggcagtcacggccattaatgtgacgctatttggtttggcgatcgcactcgcgccacgtacgcgcatgctcaacgcggcactggtggcattgctggcgttaaccgccgtcattctagcttcggcggcgcttcggttaggactgtacatcaacgcatacggtttgacttggctgcggtacctttcggcgtcatttatcgccctgcttgcgatcgcgattctgctatgccttattcgcctgaaaatacgacaactgccattggctgcaaccatgaccgcactgcttatcgtatggtacgtggcgctcggcttcagcaacccgaaccatatatgcgaaatctacaatgcggctcatggtatcgcaatggcaatggcgacaacaccgtatcagtcgatggtctgaccagcgcactttttacgcaggctctcgtgcatgatcaccatcagcaccaggaaagccaacatgtacagagggaaccacagcacactgatatgctgtgcgatcaagccgaataccggcggcatgcacatcgagccgacgtatgcgcatgccatttgcatgccgacgatcgcctgcgatttgtcttcgccgaaatatgccggcgtggaatgaatgacgcacgggtagatcggtgcgcagccaagaccgacaatcatcagtcccataatggtgccgatattgcgaggcagcggcagcaacatgatgacgataccggtcagcaccagcgcctgccccaggcgaatcatggccggatcattgaacttcatggtcagaaaaccactcgccaagcgacccacggtgatgccgatgcagaacaggctggcccacatagccgccgtggtcttatcgatgcccttgccaagcgccatgtagctactagcccacagcatggccgtctgctccaatgcgcaatagcagaagaacatcaccaggatttctttggcgccacgaatggcgagcacacctcgcacaccaagcggtttgcgagtttcatcattggccgttccgtcggattcgccggaaacttcgcccgtctttacctcggaacgcttcttccacagtggcagactgaaaataagaatggcggtgagcacaacctgcagtatggagatgtaacggtagccccacgaccatccttggccggcgcccaaggcgaatcccatgatgtatgggccagtcaacgcgccaatgccccacatggcgtgaagccagctcatgtgacggctctcgtagtggatcgccacatagttgttgagggccgcgtcaacgccgcccgcacccaagccgtacggaatggcaagcagaatcagcacccaatagttaggagcaacggaaaagccgaacaatgccaacgccgtcaacgccacggaaaccgcagtgaccttgcccgcaccaaaacgcaaggtcatacgatcggaaagcaacgcggaaacaatggtgccagcggaaatcgtcatggaaatgccgccagcccacgaaatgggagcacccaaatcgacactcatcgtcggccatgcggcacccagtaccgcatccggcaggccaaggctgatgaacgccacataaatcaccgcaagcaaaagattaaccacgccctactccttcttgatcggtagccgcagaagacaatatccgccattattgtaagcacatatagctaccaatcggtaactacttgattgcactatctaccgtagaatcttcaatctttaccacacgggatcgcataccatcttcactaaaaaataccctccgaaacgtcttgacgtagcggaaggcgagctgacgacaacctcgatcaggtatcgatcttcgaacggtcgaaatcgtcggcattctcaacgatgaacgctttacgcggcggcacgtcatcgcccatcagcagactgaaaatctgactggcctgttcggcgtcttccatacggatacgacgcagcatacgtgtgcgtggatccatagtggtgtcggccagctggtcggcgtccatttcacccagacccttatagcgctgaatgtcctcgttatagctgatgtgcttcttatcaagatcagccaatttgccggccagctcatcgtcggaatacgtgtagatatactcccccttgtgagctccggtcaaggcgatgcggtgcagcggaggcacggccgcatacacgtgaccgtactcgatgagcggccgcatgtaacggtagaacaaggtgagcagcagaatgcggatgtgcgcgccatcgacatctgcatcggtcatcataatgaccttgttgtaacgtgcttgctcgatgtcgaagctcgctccggagccagcgccgaccacctgaatgatcgccgcgcattccttgttcgacagcatctgcgacaacgacgccttctgcacgttgagaattttgcctcgaatcggcagcaacgcctggaaaccggaattacgcgcggctttggcggtgccaagtgcggaatcgccctccacgatgaacagttcggccacatcgtcattgcctggctggcaatcagacagtttcggtggcatggatgccgattcgagcgcgttcttgcgtcgcgtcacctctttggtcttacgtgcttggatgcgggcgtgcatttcgccgacgatcttttcaagcacgcggccggactgttccttatagccacgtttggagccggtgatcatctcgccgaactgcctgtcggtcattttgctgacgatcggcttgacctgcgcggtgccgagcacatccttggtctgaccttggaactgtggttcggcgatacgcacagtgacgacggcaaccagacctgccagaatatcgtcacgttcgactttcatgttggaatctttgagattcactttgagcttacgtgcattgtcttcgatggctttgcgaatctgcttggtcaggcccaacagatagccatccacatgggttccaccgcccggggtttccaccacattgacgaagctgcgcatggtggtgtcgtatccgttggtccaccgcatggcgatatcgacggcacaatttctcgtaaccttctgcgcgtgcagttcaccgccatcgccaacggcttgggtttcctcaacataggtgtcttcgccagtgatacgccaaatagcggaaaccgcttcgcctttggacaggtaatccacgaaatccttcacaccgccggtatggcagaattcctcgatacgggagtgggtatacttcgatccctgaggttgtgccgcaacatcggcttcctcgatctgctccgcagcttcctcgtgcccggcagcgtcatgttcagattcatcgctttcggcaatttcctgcggttcatcacctgcagcatttgcaatatcgtcgacttccagcatttcgtcgactgattcatcgccggtttccggaatattctcatcgataacagtgattttcaaacccggcaccaggaagctggtctgcctgacgcgatcaatcagctgctcgtagctgaattccgcggtgtcgttgaaaatctccggatcagcccaataacgaatgcgagttcccgtggtcttcggactgaccttgccaatgatttcaagctcagtcggacggtttttacgcgtgcgtttgaatggcgcatccggagatgggtgctccggatcagcatcggtatacacaccaggatgaccctgatggaatgacatatgatgcgtcttgccgtcacgatccacttccacgtcaagacgggagctcaacgcgttcaccactgacgagcccacgccatgcaaaccgcccgaggctccgtacgaagagttaccgaatttcgcgccggcatgcaatttggtcaacaccacttccacaccggtaagtttggttttcggctcgatgtcaacagggataccgcggccgttatcggccacttccacggaaccgtcgctgtgcaacgtcacaacgatatgattgcagactcccgcaagagcctcatcgacggaattatcgatgatctcccacaggcagtgcatcagaccttggctatcggtggtgccgatatacatgcccgggcgcttgcgcaccgcgtcaagaccttcaagcacggtaagactacctgcgccgtaattgtccttgtctttcgccattttcctcattctgacttgcagttttgcttcggttttcatccataagaacgtcttgtagacgtaagaagtcgagaaattcgatattcttaccgaatttctcgacttcattcacctcttgtttcaatcactgatcaaggaagtcacgcagcgtctgcgagcgagacgggtgacgcaacttcgacatggtcttcgactcgatctggcgaatacgctcacgggtaacgccatacacgcggccaatgtcgtcgagcgtcttgggctggccatcttccaagccataacgcatcttgatcacgccagcctcacgcggagacaacgtttcaagcacctgcctgaactgctcctgcaacagcgagaaggcaaccgcgtcggacggcgcgatggcgtcggtgtcttcgatcagatcgccgaactcggaatcgccatcctcacccaacggcgtatgcaaggaaatcggctcacggccgtacttctgcacttcctgcaccttctcgacaggcatgtcgagctcgcgtgcaagctcatccggcgtgggttcgcggccaagatcctgcagcatctgacgctgcacacgagacagcttgttgatcacttcgaccatgtgcaccggcacgcgaatggtacgcgcctggtcagccatggctcgggtgatggcctgacgaatccaccacgtggcataggtggagaacttaaagcccttcttccagtcgaacttctcgacggcgcgaatcaaaccgaggttgccttcctgaatcaaatccaagaacagcatgccacggccggtgtaacgcttagccaacgaaaccacaagtcgcagattggcttccagcaggtggtccttggcacgtctgccatcgttcgcagcccacttgagctcacgcttgcgcttgaagtccatctggtcggattcggtgtccagcaggtgctgggcatacagaccggcttcgatacgctcggacagatcgacttcctgttccgcattcagcaggctcacacgaccgatctgcttcaggtaatccttgaccggatcagcagtcgcacccgccgcaatcacacgacgcttcggattgccggatggggtcagattctcatcatcatcgtcatcacgcaccacgaaagcgcccttttccttaggctcttccggctttttgcgttcttcgtcatcctcgtcgtcatcatcttcaggttcggattcctcgtcgtcgtcgaggtcatcctcgtcatccgaatcgacgtcatcgagatcggcgtcgaaatcgtcaagatcggcgtcgtctacctgagcgtcctcatcgtcaagtgcatcatcctcgagcgactcctccttcttggcaggggcgctcttcttcgcggtagtcttgcgaggggtcttcgttgcggtggttttcttcgccgcactcttcttcgtggaggccttgcgcgtggcggctttcttcgtggaggtggtcttttcggtcagatcagcctgttccgtgcttgccgtcgtttccttggtggccaaacttatcctcctattgatcctgcctcgaagcgtataccacatggacccacttctggcaagggcaaatcgtcaactatgtgagtaaaccatcttgcaaggacgattattcccgcataatgaggccttcacgcgcaagtcacgccactttacggcgtgttgccttatgtttccgacgtccaggcaggaccaatacgtcgttcaaccgccgagcatacaatcgccgccagcgaacattgatcatctatcgcgagcgcgctaatggctgatgccatggctccttcctggcccatccaccacatgatgtagctgatcacggcgaacggctgcgcccgatatgtcttcggaatcatatcgataatgtcgaacagcatgttgatcgcctgatcgcaacgtttcatatcgggtctggctaggggatcacggaatgaatcgctgagcagctgttccagacgctgcgcattacgagacagcttgggtctttcggcgaaactcatgagaaagtctcggtcggcgtatcgttcgtcaacgatggcggaaatgagaaatacgtcacgaatggacagcatccgattgatgcccaccgtagtccgcatgatcatattccggtcaagaccgcattcggcatggaattcgccttccgaatgggaaacgctctcgtccgatgcctgcgcaagcgcgtccatccatatgaaaagcggttcacgaatgaacgaacgcactgtttcgcccacgccgtcggatctgcaatccctttcgaatcggctgatggcttcttccatttcagtcccggtgatgcgtccggttttgttggttgtcattattctgccctccttggcatggtctatcggcttcctcgctcgccgcttatatggcactatgcccgatgagccgatgcgatgccgcttttttcgaggcctgtggtcggaggatggcttcttcggcgtttcgcaaaatgatttcggtaccgcaactattgcaatcattgagatttggtcttgtcgaatgcctgtggataactgttggtatgactagctcctccgatttggaacagattgaatcacgcattgtttcgttggtgaaggatttcgcattccttcatgcggacgattcggttgcctcctcttgcaggcctattgccgacatggtcgccaagcaggcggtcacgtcaagtgagggtggcaagcggcttcgcgccttgctgacgttggattcgttccgcgcattcgcttcggaggatgtgcgagaacgtgatttcgacgcgcttctcgatttagcgtgcgcggtggaagtgttccagaccggtgcgctggtgcatgatgacatcatcgatgattccgatctgcgccgtggcaagccgtctgcgcatcgcgcattctccactggtacgcatagcgaggccatcggccatggcttgggcatcatgctcggcgacatgttggccacggcaagcgtggacatcgcggacaaggcagcttccaagctcactcatggttccgatgtggtcgcggcattgctcaacatgcaccgcgaggtcgaagtcggtcaagtacttgatttggccgtagagctcaatccgttggacgatccagacgaactggtggaagcttcattgaacgtattccgctggaaaaccgccagctacaccaccattgccccactggaattcggcatgcttgccgcgggtataggcaaagacgatgcgaggaagcaggcattggcagtcggcttgcctcttggattggccttccagcttgcagacgatcttctggatgttgtcggttcgagcagcaatacgggcaagcccgttggaggagatatccgcgaaggcaagcgcacggtgcttctagccgacgccatcaacgcggcgaacgacacgcagcggcgagagctcatcgacatgtgggaggccgattcgcgttccgaaactcaagtaaaacgcgccattgaactatttgagcaaacaggagccatcgaacgttcccgcggtagaatcgcggatttgtggaatgaatcgaaaacagctatcgaaacattgagcctttccgaataccacgagtcactgctcatcgaggcctgctcacgtttcgtgccaagtattcacgtccaaacacgcgcgtgacacgcgacctgcgtgttttgcaaccaacatccggacaggacgcgcgttcgttgcacaatccgcaaacctctgcttgtagactacaagtgggaacacgttcgaacgtgagttgttttgaagaaggaaccgtagcgatcaaccatgagtgaagctccacacgcccctgaaggtcaggtcatcgagggccggtatcgggtcgtcagcagaatcgccgatggcggcatggccacggtgtaccaagcggtagacgaacgtctggagcgcacggtcgccatcaaaatcatgcatacccagctggcgcagggaccgcaccgggaccagttcgtggaacgattccatcgtgaagcccgttcggccgcggccattgccaatccgcatatcgtgcaggtgtatgacaccggcgaattcgacggtctcgattatctcgtcatggagtatgttcacggcgtgaacctacgttacgaaatgaaccagcagggtacgttcagcgttcgagagacgttacgcattattggcgagacattggatggcctcgcttccgcacatcgtgcgggcgtggtgcatcgcgacatcaagccggaaaacattttgcttaacgaccgtggccatgtgcagatcaccgatttcggcttggctaaaacggtatcgcaggccacactctcctccaccggcatactgctgggaacagcagcatatctagcaccggaaatgatcgagaagaatcaagccacacctcagggggatttgtattccgtgggcatcatggcttgggagatgctcgccggcaacgtgccattcacttcagataatccagtaacactggtattcaagcatgttcacgaggatgtgccaagcattgccaccgcttgcaaaggcatcaatgaaggcgtggccgcattccttgcccatctcacggctcgcgcggtcgaggctcgtccagcagacgcatccgttgcgttaaccgagctgcagcgtctgcaatcgacgcttgcggtcagcgattggcagtatcgtcttcccccggtagacgtcagcgcttccgacagtgccgcgcccgcaaataacggtgcgccaaccaatgtcggcaatcctgttcctcccgctcccccggcaccgccgacgcagcaattcgatgatcgcacacgcaagctggacagggtcaagacgaacgcaacaaccgtcatgccggtgcagcaacagaacatcgatccagaagcgacgacacgtttctcgctgccggcagatggcatcgtcaatagccttgacaatgccgtcgacagcgctgcatcgcaatcccccatcgcgcaaagcgacgaatccggcaatactccaaacagcaaatccgcgaaaaagcgtcgcacaccgctcatcgtcgcaggcgtggtggcgctgctgcttgcatgtggcgccggcggttgggcatggtggtattatcagggccccggcagctattggaccatgccccagccggatggtatgacatgcgacgcgtccgcagcatgccccatcaccaatgtgaagtggagcgactacgagagtctgctcaagatttccgatatcgaatatgaggtgtcggaagagtatagcgattccgtggaggaaggcaatatcatctccaccgacccggcgaatgtcggcgatcgcggcagcaagcgtcgtagccagaaagtcaaggtcgtggtctccaagggagtccggcaggcgacggttcccgccgatattctcgacgcgaccagcgcatccggcaaggatccaatcaacgcactgaagaaggctggattcgataatgtcgagcagaccgcggcttctgatgacacgtattccattgacgtgcctcaaggggcgttgctgtcgttaagtgtggatcccggcgccacattgccgcataatacgacgatcaccgtcacggtgtcgcaggggccaaagccagtcactatgcccgatatcgtcggcaagacgaaggacgaggcacagcaggcgctggatgatcttagactcaccaccaattggacggaatccttcgacgacaagattccacaggggcaggtgatttccgcttccgtcaacaacggtgatacgttgcattggggagacagcgtcgacgtggtggtttccaaaggaccggaaaccataaccctgccgaattatgtggggcagaaagcctctgacgccaaagccgcattggaaaaactcggattcacggtcaaggtaagttcgcagctcacgttggattccaatcaagacaagaaggtcgcttcgcaggatccggtaggtggcaccgaagtacgtcttcgcgacgagaacggcataccaaccaccatcacattgaagatgtattcctcactgttctaaaagtgcattacctgctttgccaaacatcatggtataggcataaggaaagccccggctcgtgtagtgtgaaccgcaccccgattgttggactgaagaaattcagattcgatgatcggaggtgcggttctttcgtatgcgtgaggatcgaaggagacgttacgacgacgggttccggcgcg

SEQ ID NO: 843 - DNA, 119938 bp, Unknown
  gut microbiota DNA sequence
agacggcgccagatacgactcgagggacacaccccggaggagttccggagcatgtccctcgcggtctagggctgtatcctaattaacaacgtccaacaaacggggcgcagttcagtgtcgtgccggggcttttctctttggtttctcagctgttcgcctgttcggcggatttctgagccttaagctgttccttgactttctgagcgtattcgttcacgtattcctgaccgctcatcttctgaatttccatggtcacgcgatcagtcagcgtgcgcaaatcgtcgtgcgtgatctggtcggcgggcttcttctccacggcaatcggttcgccgtagaccactgtggtcttgcccttaccaggaataatctgaccgggcttctgcaactcgcgagatccgataatggcggacggaacgattgggcatccggtttcaaaagcaagtcgcgcagctccggtatgacctttatagaggcgaccgtcagggctacgcgtgccctcaatatgaatgccgaacaggtggccgtcttcgaggatttcacgcgcgtggttcaatgcgccaagcgatttcgacccaccggaacgatccacggggaacacgccaaccgaagtgaaccaccacttcttaaacttgcctttgatgcccttgccttcgaaatactcggctttgcccatgaaatgaatcatgcgcggacaagtcagcggcaacagcgcgtcatcgatgacggcaagatgattggccgcaataatggcaccgccttcgcgcggaatgttttcaagcccttttgcggtcggccccaaacggtggatggcgatcggtcccaggcctttaacgaaaaaccagtagagcattcttcacggtcctcccagcggatgggcatccgcttgattacagttatcagtatgactgacctcaacaatagcaatgccgatgaagaacgcccaaatgccgcgccgaatggtggcgaaggggcttcttcaaatgcggacgatttggatgccgcatgggctgaattcgcaagttcgcatgccgacgatttgcaggccgtggagcattctcgtaacgcgaaacgttttgaaaagcatgcgcagcgccgtgagaaggaggcgttgctttcgattcaggatttggatcagggcacgttcactgatgacactccgcaaggtcgtggaccgcgcgatttcactggttccagctggttggacaccgatagtgtaatggatcgttacggcgatgatttcactcctccgaatccctccatcggtcatgtcaagatatcgaagttggtattttgggtgcttttgatcgctggtgtcgccggtatcatcgcatctgcgttcatgcctgctttggctgggattttgggatcgattttcggcgtgtgcgcgttgattggcgctgcaggattgatcgtacagcacaagggacatacacaaacccgccgcgatgttttcgatgatggagctcgcgtatagcaacatatggagaagactgcatcagctacgtcttttgtgctcttctctgtgatatttgtcgctgcgatacgtataaggcgtgtctcgtcgttgagtgttttgacgagacacgccttatacgttcttatgatctgctatttcgccgaatatcaagctttcttggactgggcggcggtgatccactggtcaagcagtgccgaggccttgcctgaatcaacggtttcttcggcaatggcataggccgctttgaatcgttcagtcaggctggcatcagctggcacctgatggccgtccgcaacaatcgcggatgccgcgttgagcagggcggtagtgcggaaaggaacgtccttgcctgcaaggaagtcacggaacagctgagcgttgagctccggctctccaccctttaagtcagccaccgtcaccttgtcgagaccaagctccacagtcggatcgaattcactctcagtgacttcgccgttgctgaactcccagatggacaccggaccagtcggagccatttcgtcaagtccctcgcttgacgtgtacaccatgccggtctggccattagccgcatataccgcagccatgatcgggctcattgcgcgattggcgcagcccaccgccatgtgcttcggcgaggccggattggtcagaggtccaagaacgttgaatacgcatggcatgccgagcgccgcacggacaggtcccacgaagcgcattgccggatggaatgtgcgtgcgaaagcgaatgcgatgccgcattcgttgccgacctcagcaacctgttccggttccagatcgagcggcagtcccagcgcctcgaagcaatcggcagtgccgcacttggaagaggctgcacgattgccgtgcttcacgactttcgctccggctgcggcagccaccaccgcgcccatggaagacagattcaccgtcgcggcgccgtctccaccggtaccgacgatatcggtggtctcaccgtcgatatcaagtttgatggcatgggagaccatggccttggccgctccacgcacctcatccggagtcaagccaagctgctgctgggttgccagaaccgcaccgacggccgccggattagcgttgccgttcatgaggtcatcgacgaaccactcggattcctcggcactcagatggtcccctccgaccagcttggtgaggatcgacttccatgtgatttcagccatgatgccctccttgacgcttcagcatgtcacgttgttgatacgatatcgccgccattgtaaccgttctacatttcatggtttttcaacgtccatatcacgaacaggtaattgcagaaaagcgctcatcataaacaacacagacattttcaatatctatcttccgcatatcgggcaacgagcatgaaacaaaaaggcggtctgcgaaaaatccgcaaaccgccttcattatgcgcgaatcatcagagcatcacacgatatgtcactgttcgttctgtccgtggcacatcttgtacttacgaccggaaccgcacgggcactgggcgttcttgccagttcccgggaaggtgcggccatccgcccacggagagcgcaattcctcgctcttcgggcgcttattggcaggaaccttgccctcagcatggctgatcggctgcatgcctacgatgccaggctcattcttctgttcttcggccagttcgtcgatgacggtcttctcggcctcatcgtcggtttccggctcggcaggagcggtttcaccggtcggctgcgcttcgctatccaggcccatcaccgcttcggctgcgttcacggcctcttcctcatcggattcggtttcggcgtcttcggtggtggcgacacgatcgatgtcaacgtggaacagcagctggatggtctcctccttgattgcttcaatcatggagttgtacatctgatagccttcgcgctggtattcgaccagcggatcgcgctgacccataccacgcagaccgatgccgtccttgagataatccatctcatacaggtgttcgcgccacttgcggtcaagaaccgcgagcacgacacgacgttccagctgacgcagaccctcttcaccaagcttggcttcgaagtcggcatactggtcctttgcgtcggaaacgataagctcctgcagggctacgatggccttgtctcccttgagcttggagacagcgtccttggcggcttccggatcgacggcaatcgggtacacggcgttcagagccttgaacaggccttcccaatcccaatccttcggcttgtcggaacccttgttggcgcccttgatgtagctcaataccgtatcgtcgatgaacttgaggatatcctcgtggatgtcttcgcccttgagcacagcctgacgctcggcgtagatgacggtgcgctgcttgttcatcacgtcatcgtacttgagcacgttcttacggatttcgaagttgcgggattccacggccttttgtgcggtgcgcacgcccttggaaacgctcttcgcttcgatcggctcgccttccggcatgcccttggccataacgcgggccacgagctgggtgttgaacagacgcatcagatcgtcttcgagcgacaggtagaaacgggactcgcccggatcgccctgacgtccggaacggccgcgcagctggttgtcgatacgacgggattcgtgacgctcggtaccaagcacgtacaggccgccgagttcaacgacctcttcatgctcgtccttgacctgctccttgatttcggccaaggtgcccggccaacgcttctcgtactcgtccggagtgtcatccggagaatagccttcggacttgagcttcgcatcggcaaggaactcgacgttgccgccgagcatgatatcggtaccacggcctgccatgttggtagccacggtgacggcgcccttacggcccgcgacggccacgacggcggcttccttgtcatgctgcttcgcgttcagcacctggtggggaatgttggcaacgtcaagcagggacgacacgatttcggaggattccacggaagcggtacccagcagcaccggctggcccttcttgtggcgcttggcaacatcgcgcacgatggcggcaagcttctccttcttggtacggaagatcaaatcgtccttgtcttcgcgaatcatcggcttgttggtcggaatcgggagcacgcccagcttataggtgcccatgaactccgcggcctcggtttctgcggtaccggtcatgcccgacagcttgtcgtacatgcggaagtagttctgcagggtgatggtggcgaaggtctggttctcagccttgacttccacgttttccttggcttcgattgcctggtgcagaccttcgttgtaacgacgacccggcaggatacggccggtgtgttcgtcgacgatgagcacttcaccgccagtcaccacgtagtcgcggtcgcgcaggaacagttccttggccttgatggcgttgttcaggtagccgatcagtgcggtgttgttcggctcgtacaggttgtcgatgccgagataatcctcgatcttgttgatgcctggatcgagaatgccgacgaccttctttttctcgtcgacctcatagtcctcgtcacgggtgagcttgagcaccagacgtgcgaactgacggtaccaacgggtcacgtcgccttcggccggaccggagatgatcaacggggtacgggcctcgtcgatgaggatggagtcgacctcatcgacgatggcgaagtggtggccgcgctgcaccagatcggacttttcccacgccatattgtcacgcaggtagtcgaagccgaactcgttgttggtgccgtaggtgatgtcggcgttgtactgcttgcggcgctccggcggtttctggttggtgatgatgcagccggtgctcatgccgaggaagcggtagacacgacccatcagctcggcctggtagcttgccaggtagtcgttgacggtgacgacgtgcacgccctggccgtcgagtgcgttcaagtatgccggcagggtcgccacaagggtcttgccttcaccggtcttcatttcggcgatgttgccccagtgcagcgccgcgccacccatgagctgcacgtcgaagtggcgcaggcccaaggtgcgcttggatgcctcgcgcacggtggcgaaggcttccggcatgagcttgtcgagggattcgccattgtcgagacgctgcttgaacttggcggtctggcccttgagctcttcgtcgttgagcgctgcaatctcatcttccagcgcgttggtcgcctgtgctacgtgctcaagcttcttgatctgtcggccttcgcccattcgcagggctttgtcaacgatatctaccacaatcactccctttgtgtatgcgagttatctcatctgagattagtcgctgtttaacgatttccgaaaaacaccgtccattttacgtaactttcagcttgttgtggccttcttccattcgacacaccaccttcagacatgaaaaagaggcccgcacatacactgcgcgagccccgttcggtcagattatctccctatccaacctgttgcatgtcttacttcgccacattctccggggtgtcgatctcgaagacgccatagctccagccgtgacgatggtagacgacggacggacgaccggtctccttgttcacgaacaggaagaagtcatgtccaatcagctccatctcatacagcgcctcatcgatggtcatcggctccgcgatatgcagcttgcgacggatgacaatcggggtgtcgcctacttggacttcgacggactctcccggacccagctcagcggcgacggcttcggccgggctgttattcggcacttcgaccggctcctcaacttctggagtcggctcgacgacaccaagatcgaccgggaccggatcgctgtagccacgacgatgatccttgcgacgatcacgggtgcgacgcagacggagggtcagcttgtcgagcgccatgtccagagcgctgaactcgtcggcgctggaagcctcggcgcgcaccacggtacgacctgcgatgacggtgatttcaacgcgcttggcggtgtcggcctgacgcggattgccctcgtgcgacaacacaatctgaacacgctgcgcatccggggcgatagcggtcacacgattcatcttgctttcgacaacgtcacggaacctttgcttaatctgcgtatgacgtccggtaacgacgatttccatgtggacctccctagactcaagcggtgttacccgctatatacggaccaaacagctgcttcgctgttcggtagtcaacattgtagccgcaacattgtgatttcactgaaaagttgacgcaagaaaaataaagtttttttgattttcctttcgtccgttttcttgctatcatagtgcatttgagacctcttgatggccgcgaccgatccgtcggttgaggaacttccgggctccatagagcacgatggcggataacgtccgcccagggcgacctgagagatagcgcagcagagaacagaccgcttatcggtttcgaccggtaggtaagggtgaaacggcggtgtaagagaccaccgggccactggtaacagtcggccgcatggcaagcctcatcgggagcaaggccaagcagaaggcgttttgagggctgctcgcccgaagccttcgggtaggctgctagagcctgacggcaacgtcaggtcgagatggatggccatccgtgcctgaggcacgacagaacccggggtataagaggtctcactcccttatcacaccgaccgattcccgtggcgaaacagtgtttgaaaaccgcataaccactatgcgaatcagtcgtttcagacgaacaattcctgtgcgattttccgcagaacttcaggattatggcctttccgcccaccagcactccagaaccgtcttttacgcacctcgacatccaatccagcagtttttcttgctgtccgacgtcccagctcccatgcagcctcggcgaacacgccttgggactcggcctcatcgcacacacgttgcgcgagctggcggtccacacctttgcgtttgagctccatgaccgctcccctataccccatcagtcgtgatgtgcagtaccgcaccgcggactgggcgtacgcctcgtcgtcgatgagacggacccgaatcagtctgacaatcacatcgtccaccacctcggaggcataccccttgccgatgagtcgctcccgcatcgcgcctgacggacgcggcgccgcatcaagcagccgaagggccgcctccctgcatgcatccaaatcattcggatcgtcaggaatccgcgacacgccgactgcgacacgccctgcgtgtcgtgcgtgtcgcgcacgcctcggcgtgtcattgccgccaatggacggagttcggtcgtaatcgaattcggttcgaccggcctgcggccgaccaccgcaggaaagggcaaggcccccagcctcagatgataccggctggaggccctgctgttcaagaaatcgctcagcgctgatcatacgtcacgccttgccggctgacttggaagcctttgccgcgcctttggctgcttccggcttgccagcatccgctttcgccttctcctcgcttgtggcattagacgcagaagcctcattaccatcttcggcaaattggtcggtgggctcaatgagaccaaactcggccttcaccttattctcgatctcttcggtaagctccggattgtctttcaagaattggcgcacgttctcacggccttgacccagttggtcgccaccataggtgaaccatgatccggacttcttcacgacattgacctgcaacgccatgtcaagtacggaaccttccttggaaatgccctcgccgtacaacacgtcgaattcagcggtcttgaacggcggagccatcttgttcttgacgaccttgaccttggtgcgattgcctacagcctcatcaccattcttgatggtctggatacgtcgaatatccatgcggacggacgagtagaacttcaacgccttgccgccggtggtcgtttccggattgccgaagaacacaccgatcttctctcgaagctggttgatgaaaatggcggtggtgcccgcctgagccaaagcgccagtcatcttacgcaatgcctggctcatcagtcttgcctgcaaaccgacatgactgtcgcccatctcaccttcgatttcggccttcggcaccagtgcagccactgaatcgatgacgatcacgtcaagcgcaccagaacgaatcagcatatccgcgatttccagcgcctgctcgccgttatcaggttgggaaacaatcaacgaatcagtatcgacgccgagcttgcgcgcatagaccgggtcaagcgcatgttccgcatcgatgaacgcggcgacaccaccgtttttctgggcattggccaccacatgcaacgccagtgtggtcttgccggaggattccggaccataaatctccacgatacggcccttcggtaggccgccgatacccaatgccatatccaatgccagcgatccagtaggaatcacctcgacatcctgctcgggacgatcgcccaatcgcatggccgatcccttgccgaaactcttctcgacctgcgcgagcgccgtatcaagcgcagcctgacgacgcgggtcgatgccgttcgcggacttgttctgtgcggctccctttgccgcgctcgtctgtgccatgactactccttttgctgactatgacgaatggtggcttcaccgtaaggccacggcattcgttcccgcaaatctaacggccgttgtggtcggaggatatgcgatctaacgagtcataaccaacatttcttggaaaatcaacgttttcacgcgatctgaagaatttggaaacagcccgtctaggttgttgtctgtggataactatatcccaacatgcgaacatctgttcgaagaggcgtgttgtgttcggaaaacgtctcagcgcaccggcataggaggcgcgttatggtccttgccccaacgctgggaatcgggaatgcccatctggtcgcataacacattccagaccactcgcggctcctcaccagcgccaagcgcgtccaccgccgtcatgccgccaagacgatcaagcacctggtcatgcgccagcgctcgaccatagctacgaccaagcacctcttcaagtaactgccaaaattcacgttcctgcacgtgccccagtgtacacagacttgaatccatgtacaggcatgaaaaacgcccggcgaacaatcgccgggcgtcaaccttacattcgaatcaggcagccacagaatcgagatagtcagccaccatgcgaagcatctgggctgtagacagccccaaggactgcgcgatggacgacagcagttcggaactggcctccttctggccgcgctccacttcggaaaggtaccccaaagacaccccggccttttcactgacctcgcgaagcgtcttatgatctcgcgtgcgcaggtcgcgcagcacatggcctatggcttcacgcagcgaaacctccttagcctcatcgggctgttcctgagcgtgcggcgcagcatgcgtgcgtacccgatcggagtcctcttcctgccacattcgcgtcaatgcggcctgacgctcatccttggcctttttcgcagcgcgcgcacgaagcacctgctgctgcgcgaacatcacagcgcgccgctgagccggcgtaagctccctgacacgagctccggcagcctgcgcagtcgcaggagccatagccttgagttccctctgctctttggtgagtgtcatcatttccattcatcagcccctttttcgtgcgtacgtctgtccactatggtcaacactcatctttgtggattattcctgtgaatccgctgaaagctccctcagcttttgcagaatacaatgcacgacgccacgtcgcacgctctccctatctccctgcaggcgaagctcaaaagcctccgttcgccgagagcgaacacctccgaacccctccggcagggaacaaccgacatatgcaagacctgccggtttatttccatcaggtccaggccccgccactcccgtggtcgacaatccaataacgcagtcgccatccccctgctgccgatacagcctcgccgttccggcagccatctggcgggccacttcaggatggacagccccctcgctgcgcagcagttccgcatctacgccaagaatcgaggccttggcacgaatgtcatacgtcaccgcggaaccgagaaaaaccttcgacgctcccggcacgcgcacgaaagcgtcggccaacaggcctcccgtcaacgattcggcggctgcgatcttgaaatggttggtttcgcaatatgcaagaacggccgcagccaattcatcgcattgcgattggttggcggcagccgtctggtccatagattcagtcatgaatgccttacttggtttcttttccggacttgcccgcggacttcttacggccgccgaacgtattgaccagatactcgccaccggaatacaggcagagaatcagcgcaagataaatcagcgcatacgtgatggtgtagtagacggtcatccacatcggggtgtcgttgaccccttccggcgccaagctccacataggcagcatgagcatggccagaccaatgcactggcagagcgtcttgtatttgcctgcctgggatgcggcgatgaccttgccgcccgtgtcgatcacaaagaagcgcatgacggtgatgccgatctcacgaatcaggaacagggcggtcacgacccatcccagcaccggattgccaaattcgttgaagatggcggcaacgatcagtgtgccgcaggtgagcagcttgtcggcgatcgggtccatcagcttgccaagttcagtgacttggttgtatttgcgggccatccaaccgtcaagcttatcggtgcatgccgcgatgatgaagatgacagcggcaacccaacgcatggtgacgttgtccacgccccacgcgccggctttggcgtacagcgccaaaaacacgatgaccaaaatgatacgagagaaggtgacaaggttcggcggcgcgttccagccgtcaagcaacgatgatttgcgttcttcttgcttttccataccgttcacgttaccctgacacttctacttgcttaccaatttgcgtttcatacggagcgttccccagtcacatcgccgcttcggaatccgccgccgaagagactcccgaactcagcgacgagatctcacccttgatgaaggcgagcacctgcggcaagtcctggggctgcaccaacacctcgcgcgccttggacccttcggacggccccacgacgccacgtgactccagcagatccataaggcggccagccttggcgaatccgacacgcagtttgcgctgtaacatggacgtggaaccgaactgcgaggtgacgaccagttccgccgcctgcagaagcacatccatatcgccgccgatgtcttcgtccggctcaatggccttcttgtcggcttccttggccatttcttcgatatcctcacggtaatgtggcttgcgctgggtgcgtacgaattccacggcacgtcggatctccgactcgtcgacccatgcgccctgcacacgcaacggtttggcctgtcccatcggcaggaacagcgcatcgccctgtccaatcagagtttccgcgccagtggagtcgagaatgactcgagaatcagtggccgacgaggtcgcgaacgccaaacgcgaaggaatgttcgccttgatcaggccggtgaccacatcgaccgatggacgctgggtggcgagcaccagatgcacgcctgcagctcgtgccagctgcgtgatgcgttggatggagctttccacatcattcttggccaccatcatcagatcggccatctcgtcgacgaccaccagaatgtacggatatggagcgaccttgcgcttcgatccggcaggggcatgcaccttgccggcgcgcacggcagcattgaagtccttgatatggcggaatccgaagaattcaagatcgctgtaacgagcatccatctccttgaccacccattcgagcgcctgcgcagccttcttcggatcggtgatgatcggcgtgagcagatgtggaatacccgcgtatgccgatagttccactcgcttcggatcgaccatgatcatgcgcacctgatccggcgtcgccctcatgatcacggatgtcagcatggagttgatgaagctggacttaccggaaccggtggcgcctgccaccagaagatgcggcatcttggtgaggtccgccgttacaaaatggccttccacatccttgcccacgcctgtgagcatcggattcggatcgtttctcgccttgtccgaacgaagcacatcgccaagcaccacggtttcacggtcggtgttcggtatttcgatgccgatggcggacttgccttcgatcaccgacaggatgcgcacgtcggaactggccaccgcgtaggcgatgttcttctgcagattggtgaccttctccactttcacacccggaccaagctccacctcatacatggtcacggatgggcctcgcagaaagccgatgactttagcgtcgacattgaactgctggaatgtgaccgtaagagcgcggatcacacgatcgttctccggagtgtgcacggcatgcggcgcgccttgcttcagcatgccgagatcaggcagatggtaggggccctccggaatctcaccggactcgtcggaaacgccctctccgttcgatccggcatccagatcgttcacgacctcattggtcgccgcatcgaccatgacctgcgacccgttggacgtgccgtcctcgtcgatgacggcccacgggtccccgacagccacgccaacggatttgatctcgtcggacgccgcctggccggcaaccgtcggaatggtttccgggatctgcggcatggtgccgttcgccaaaccgattgggtcagaggaaagggaacgcaccacaggcgtctgcggcatggcgacggttccaccgaaatcctgagcggaatgttcgtcggatgaaatgctgcgtggccgcgagacgctctggtatggttcgtcaagcatggtttccgccgtttcgccatgccgttcggcagcattacgaaacgcctcatcaccgtcgtaatgatcgagtccgtcctgagcgccctgcttcttggatttcgatgatatccattgctttatgagggagaacggcatcggcttcttcttttcagccgccacatcgtcggctccattatgcgccggcacgccttctgcgaacgacagcgtggtatctcctatacgcacttcgttcgggaattgctcggtctcgtcatcaacctttttatttgcaccgaatccaaaacggaccttcaatgcacgtactttgtcgggaatctcttgaacccctgtattggtaatcagcaacaacgagaacaaaatgacgaccacgaaaataacgatggcgaacgccttggaaagcccccatgccagcgggcagccaagcacatagccgagcagacctcccgcattctgcagcaacgccatgtcgaaaccttgggcgtcggacgcgagcgccgcgtcgagtatggagcagacggaccacagaatcatggaccaccccgccaccatacgcacattgccgcttttgcgcttggtctcatatatgaggctgaatgccaccagcgccaaaaagaccggcaggatgacgctcatcagaccaaacaggccggaagccaaggcgtggagcatccggccgaacacgccctgcacccggaaccattccgaagcgcagaacattaccgcgagaatcaccaggataaaacatgcgatatcacgtccgtacttggtcaagacacccatcacaggcgacggctcgaccgcgtccatgaccttggtctcgccggaacgtgccttgcccgtggaccctttgccgccggatttcgtattggaagatgctgttcgtgccataacggtcatgattttacccatgggatgcgccatgacatgacatttcctcgaatcgcacacattttctaacttaagtgaacacgcaatttcactgattggattccgccaagatcgtcaccgtcaatctggaggccaagccggagaagaccgtggataaggtggaaagcttcgacgaatatgacagcggggttttcatttcaggcgagatctccgagatgatgctgggtgtaggcgtccgcctgtgcgtctatagcgtcataggcacctgcatcggcatgttcgatgatggccatcgcattgtctagcagcgccggattgagcgcttggagccagtggatgcgcgggtcacgaccgaaccatcccatctgcttgcgtgccagacgcttcgttttctgcgcaatgtccatgaacgtgtcgttcaggtcacgcaacccgtccaaatagtcgacgacctgctggtaaccgagcgctttggctgcggtgatgcccagtttggggcgtatgcgttccacttcttcgatgaatccgccttcgagcatctgcttggtgcgaatatcgatacgacggtccagttcctcacgcggcagatcgagaccgatttgcacggtgggaatgacgtaccgatagtgcggaaggcttgccgaataggggcgtcccgtcacttcgatgacttccagcgcgcggatggttcgtctcggattgtgcgggtccatgcgcgccgccgcttcgggatccttgaccttcagctcgtcgaacaacgcgcccgcgccttcggctttctcccgttcctcaagcgccttgcgtacttgcgggttggtgccagggaaggagatgtcgtcgatggccgcccgcgcgtacaggccagagcctccgacgaggatcggacgcactcccctggcctgtagttcggctattttctcgcgggcgagctcttggaacctcgccacggacatggcgtcgtccggttcgatgatatcgatgagatgatgcctgacctgcgcctgctcctcaaggcttgccttggccgtgccgatatccatgccccgatacatctggtatgcgtcggcgttgatgatttccgcctgttcgcctttgcgcgccaacgctttggcgacggcaatgcccaacccggttttgccggatgcggttggtccgacaatggatacgaccttgcgctgcatcacaggttcggcgtctcctgttttgtctgttttctcaaaggtctgttcagtgtcgaacggcataggtctgccccgccttcggatcgggatcggcgatgaggttgtgacgcccagcgtgggtgatggtggcggtcacgaaatcgcctacctgcggcatcggctcgccttcgggcacaccgacatgcacgagcacgccggttttctcgcgcccggtgacacgatgggtcgcggcgtccttcttgccagatgcgccggtgaccatcacttcgacgtcacggccttcgaaggttttgagattttcttcggtgatgcgttcctgcaatgccacgagtcgttcgaaccggtcttggaccacgtcgtgcggcacctgctccatttcggctgccggagtgcccgggcgcggcgaatagatgaaggtgaatgcggacgcgaatctcgcctcttccaccacacgcaaggttttctggaagtcctcttcggtttcacccgggaaaccgacgatgatgtcggtggagatctgcgcatccggcatggcctcacgaattttacgcagaatgtcaaggaacttcgcggaacgatacgaacggcgcatggcgcgcaggattcggtcggatccggactgcagcgggaagtgcagctggtgcatgacattgggcgtttcggccatggctgcgatcacgtcgtcggtgaaggcggcgggatgcggcgaagtgaaccgcacgcgctccaatccttcgatctcaccgcatgcgcgcagtagcttggagaaggcgaaacggtcgccgatgccgtaaccgaacgagttcacgttctggccgagtagcgtgacttccttggctccttcgtccacgcactggcggatttcggcaagaatgtctcccgggcgacgatcatgttccttgcctcgggtggtaggcacgatgcagaacgtgcaggtgttgttgcatcccacggagatggccacccagcttgacaccttcgacgcgcggtcggtgggcagctggcttgggaagtagttgagttcctctttgaccttgacctgcgcatggccttcgatgcgcgcctggtcaagcagctgaggcagggagccaatgttcttggtaccgaacacggcatcgacccaaggggccttttttgcgatcttctcacggtcgagctgtgccatgcatccgccgactgcgatctgcaggttcggacgctggcgcttcagttcggcccacaggccgatggtgccgtacatgcgttccgccgcgttttctcgcaccgcgcatgtgttcatgacgatgaggtccacgtcatgatcgaggtattgttcttcggtggcgggcacatagccatccgcttcgagcacacccgcgatgcgttcggaatcgtgcacgttcatctggcatccgagggtgtgtacgtagaacacgcccttgcctcgcgtggcggtgtcttctgtggcaggttccgcaagtttcgaggcgcgctccgcctcggtcatcatgtcttcgttcatagcattccatgctatcggcagggattcccatcacgcgccgtatgcaccttaatgcagcgtggcatgcggtggaattggagggatgacggcgctttcagcgctttttcagtttttccgcgctccttttgggtacactatggaaccgtgatacttgatagacagagccgcatcaataccagtgaactgcaagcacggctgaagtcggtgactttcgacgatggtccgttgccttccgatcagattaccgagttcattgatcaaatgcaggtgtatgagggcgcgatgtatgaaatcagcaccaaactggagattctcgattccgagttccaggtgcgtttctcccataatcccatccatcacatggaacgcaggttgaagtccatcaattccattctcggcaagttgaggcgcaaggatctgccgttgacggtggagtcggtcaaggacaatctgtttgacgtggcaggcattcgcgtgatctgcaattatcgcgatgacgtgtattcggtgtcgaattatctgtccgcgcagaacgatattcaggtgttgcgtgtgaaggattatattaagaatccgaagcagaatggatatcgttcgctgcatgtgatttatgcggttcccgtttttctatcttccggaccgcattacacgcctgtggaggtgcagttccgcaccatcgccatggattattgggcgagtttggagcatgcgctgcgttataagacggatttgcctgacgcgaagctgtcggagcattcgcagacgttgcttgattgcgcgagaagtctgcagaatgtcgaagcgcagatgcagaacattcatcgcgatatcaatggcgcgccgcaggttggcgaggcccctaaggccggctgacgtctgccggtttgcgtttggccgcatgcaggagctgatcgatgggcagctgggcgagtatggtgcccgcgaaaatgagcgcgcagccgaggtaggctcgagtggtcatgatttcgcccagcagaagcgcccctccgactgcggagaagaacgattcgagcgacatgatcacggacgctctggtcgggggcacaagttgttggcctatgacctgaagcgtataggctacgccagcggagcagacgcccgcgtagacgatggcgatccagctttgcgcggcaccggcccagtcgatggatccttcgatgatagagccaatccagctgatgatcgcggtggtggtgatctgcccgaatgaaagcaggatggggtccatgtctcgtccaaaggtgtctatgacgaggatgtgcccggcgaagaggactgcggtgaacagcagcaccatgtccgccagggtgatggatccgaatccgtcggtgacgcacagcaggtagaagccgataacggagatggcgacgctgatgatgacgctgaggtgcactcgtcgacgcaatatgatgaaggccagcagtggcgtcatgacgatgtatagagcggtgatgaagccggaccgtcccgccgatccggagtaaaggatgccgtattgttggacggtgcttgcggtgaaaagcacgattccgcagatgatgctgaccacgatgggattgccggcccatttcggcatggcgacgattgcgccgttaccgagggtgatggacggttttccctgggtttcacggcgtttacgctcttgttccgctatggtgctgcggcgaaaccaaagcaacggtatcagagaaatggatccgagggtgaatcgggtggctccgaagaacagcggtgttgtggagtccatgccttgcacttgcgacacgaatgcgaatccccaaatgagggccgccagtacgaggcatgccatgccgccaatctcttttctctgcatgagcacccaccgtaaagcatgtctttgaccaacggataaagcctggccacattctggtcaggctttatccgttacgttgaccgaggagcaatgccaataatgtcccatcaaaggctgaaagccaaatgacgcgtgcgtccccaaaacgcaccgaaggaaggcgcacgaaggtacgccgactgaggagcaatgccggggacgctccgtcatttggatttcagtcgcgattgccgaggagttggagaatatacatgaacatgttcacgaaatccaaatacagattcagtgcgcaaaggatggaaaccttcttgaccatttcggggccttgggcggaatactgttcaagcatggcgcgggtggcttgggcgtcgtagacggtcatgccggcgaagagcagaagtccgatggcagagacgatcatgagggtagtgttgccgggggcgaagatcatgagaatcacttcggcgatgataagcacgatgaggccgacgaaaaggatggggccggccttgagcatgttgatcttggtggtgcgtccgaacatggtgagcgcgaagaagaagccggcgcacaatgcgagggaaatgccgatggtgccaagatcgtaggccatgaagatggtgctgagggtgaagcccatgagcgccgcatacacgtagaacatgacgtatgcggtggagaccttcattgtatggatgcgcgcgccaaggtagatggcaagcacgatttcaatgacggcgggggcgaagatgccgatgatgcccgtggtttggatgagtgccaggtacgcgccgctcatttgggtgatgatggcgaccacggcagtgacgatcaaaccaagggtcatgtgcgtgtatgcgctgttgacggaactgcgttcggcctgctcgtaggaataggtggcctgcacgttgactgcggcggtaccgttgggcgcataggcgtactgtggctgcgcattgtactggttgtactgttggttgtactggtattgattgttgaagccgttattctgggcgttgttaccctggggctgctgaccgaatgccataatcgctcctttttgctcgattgcgcatcacgatacggcattttcctgacgatttcatgaatattggcttaatctcatgatttcttcaaagcccgcataggtttcgcgttcgacacggggagtgtgccggacgcgaaagactgggacatgccatgtcagatggcgaacttgtacgtcactttggcggtgtcgctgaaatcgagaaggttcgtcacgtcgacggtgatttcggaatcgtctttaagcacatatccgagggttaccgtgccggttgctcctggctgcagttcagacagataggagccggaatcgtagccttccggattgtccaagtacatggcggtgtcgagttcctgaccgttttggaacactttcggattagccagcacggcgaaggagttgttcttatcggtagtgttggtccactcgtaggtgacgagcacggtcggctgattgttgtagtcgttgccggaacgcactgcggatacgattttgacgtgcatatcggtgagatcgccttccatgtcttgctcgcctttcgccttggtgtcggttttggtggaatcatcggttttggcgtccttatcggcgtccgccgacgaggattgcgacgtgcttgtgcccgtgatgtcgtcaagcgccttgctggcggccgattgcatggccaaggtgatgacgatggccaacaccgacagcaccgccgcgactatggacaaggctttgccacgctttttgcctcggaacgtgcccacgatggccacgatcgccaataccgcgccgacgagtccgaagatcgccgcgatgttgttgatgattggaatgaagctcagcaccaagccgagcgcgccgaacaccactcccacgatgccacataccgtcgtgccttgcggagccggggacggcatgatcggcgcgggtctcataccgttcggcgctgccgggccgccgttgggaatcggagcattgttgaactcactcatgatctttttctttcttctcgaagtggtcggaacactttcgagcctacgggatcggcttcgttcccggtattggacgaaagtccattcctgcctgcactttggggcgcgcggcttgcgccatcatgcccgatagctcaatggcatgtttccatgagtatgccgataatgggagtcatgagcgtgatcacaaacccttccaccgccgaagtgccagtgcgcaccagaatctggtgcacggtgccgatggtggtgtgcgcgagtttcgcctgtctggcgcaggtgtctttcgcatcccaacagtatgcgcaggatagtgccccctacttgtggatgatcgcgtgcgtgctcgttgcgatcccttcgggtttgattcttctggctcgcaacagttacccgcaagccgtgttctggaccgcatgcctactggtggtggcgctcccctacgattcgctgatcgcgcttatggcgttgacttctctgcttgcgcggagacagggaaccaaagtgacgcttcgatcagtgcttgccgcggcgacaacgacgatctggtcccaggtgcgagacgctttgcatcctgccgaggcttcgatctggcatgcgatcttctccaaaccatataccggagttcggtatggcaataccatggtgatgcttgtcgacgaaagaacgatcatcgcgagcgccgttgtggttgccctgattgcggtggcgatcgccacattggccggattgcatattcgctcgcgcgcccttgcgcgcgtggccgaagcgaaggctcagtcggccaacgagcaggtgagcaggttgcggaccacgcttgacaatcagcagcttgccgatgcgatagccgcggaagcgcatgatacgttggctcattcgctgtcgttgcttgcattgaatgcgagcgctttgcaggccgagtctaggaaattgaaggctgaggccgagcagttgggcaatgccaatgtggctggtatggctggaaagatcgccggcactaccgaggatattcgcaggcaggcctccggcgcgttggatgaggcgcatagtgtgattgacatgcttcgtcatccggaggatgctcgcctgcagttggctgcgaatgatgccgaagcgtcgttgacccgtgactcattgctgcagttgattggcgacgcccgtgccgcgaatatgcggattgatacgtggatcgacgttcaacagctggggcagttagatgagtccatcggcgtgattgcgtatcacgtggtacaggagggattgaccaatgtgcgcaggcatgcgcctggcgctccggtgtcgttgcaggtcgatgcgaaccccccgcaaggggtgcatgtgcacgtcagcaatccgacgatgccgcaatccccctcgcatatggcagacaccaggaagggggccggtcttcctggtttggccaaacgcatacagcaggctggcggaacatgccaatacggttttgaccaacataacgtcttccaccttgatgtacgactaccatgggttgggtgagcaccgaacgcaaccatgacgagcagccgatcaccgtcggcgtgattgatgatgatccgatgatctgccagatgatgcgtctgattttggaggattattcctccggacgcatcagcgttgccttcgcctgcaccaacgcagcagacgccatcgaacatgcgtcgcacaatcctcctgatgtcgtgctggctgatatcgccatgcccggcatggatggcattgaagccactcgtcagctccgcatgcttcccgatcctccgcatgtgcttattctgacgtcgctgagtccaaacaacacggtggaacgcgccatcgaagcgggcgcggaaggattcgtatcgaaaacggacgctccggaagatatcatccgccgtgtggccgacgtgtgcgaaggggagccacagttcaatccggcaagtcaacggcagctcatcggcgatttgcatcagcaccagcctcagtcgcggcgcgatgaggcccgtgccatgctcgacgccttgccggaacgcgaacgcgaagcggtgattctcgcggccgagggcttcaccaatgcggaaatcagcgagaaaatgttcatttcagaacgcacggtcaaagcgcatatttcatccgccgcagataaactctgcatgggccgcgtgcagatggcccgtttggtagaacgagccgacctgccgccacgactatgacatcatgcactcgtacacttgaacacagagcaacgcaatggggggaacgccatgtcaatcagtgcaacggaaaagcctttaggcaaaatcttcacttcggattaccggttcgtaatcccatcattccaacgcgcatatacttggcaaacggaaaacatcgcgcaactggtcaccgatctgcaggacgcatgccacgacccagacacgccgtatttccttggatcgctgatcctcgtccatgatggacagaccaaataccaagtcatcgatggacagcaacgcctcatctcactttccatcatcatttccgtgctccgcgatctggaagacgaccccgaactcgtggaaagcctcaacgacctcatcgtcgagccaggagacaaactacgcggcatcaaagccgaaccacgtctcaaactccgcgaacgcgacaccaacttcttccgcatgtacgtgcaggaaggcgatctggagggactgttcgatctgcgcgacaacgatatcgaatcgcacgcgcaacgcaacatcgccatcaacaccagacaagtgttcgacgaactcgcgaaaatgcccacacaagaccgccgcgcattcgcatcatacctcgtcaacgaagtcaccctcgtcatcgtaaccaccgacgatctcgccggcgcacaccgtattttcgacgtcatgaacatgcgcggagttcccctcaccgcatccgacgtgttcaaagcaagaaccatcgccgaaatctcccccgccgcacgcaacgcctacgcttcacgctgggacgacatcatggatccactcggcgacgacgcacagacgctcgaagaattcttcagcgacatccatctcatcatctcgcacaaagccgtctgcacacaactacttgaggaattccgcaaggacgtgctcaaaccattcgtcaaaaagcagaacgtcatctccttcatcgacgacctgctcgcaccctacgccaacgcatggcgcatcatcgaacacccgaccgacgccaacctgccagacgatatcattggccaactcgtatccctcaacgactaccaaaccaccgactggaaaccagtagccatgtgggcgctcgtcaactccatacgcaacctcggcaatcccgacacacgcatattctccacgccgggcacacacactgccgcagcctcgcgcacgtcgaacaaaaacctcgaggaacctcaactccacgaccttgaacgacttcacgacgtactcgcggccctagaacgcgtaaccggcgtggacagtctcaacaggcaaaccccgctcaaccgacgcacacgcgcagccagcaccattcgcgacctcgataaaaaccacaccatccaacaaatccgaggattactcatcaccgacgaagaccgccgcaacgcgctcgcgcatctgcgtggcgacctgcagaccagtcccgccatgaagaaactgcttctggttcgggccaacgagcagcgggccgggcatcgtatcacccgaccacgcagcctcaacgcgctgccgatcatgccggaacaggtcgcctccgactcatcgtttgcatcatggtctgaggcgacgcgcgaccattgggtcaatcgcatcggcaatcttgcgctcagtcaggctaatgacaagcagatcgcgggattgacatcctatacggaccgtcgtgaccgtatgctgctgtcggcgagttccaaacgcttcccgctcaccgccgagcttgccgacattgcggactgtacgccacaaaccttgcaataccgccaggatgaaaccattcgtctgatcgccgattattggaatatccgttacgatgccgagcgcaatgacctatccacgctcagtgaggagtcgttgcgagtcacggacacgtccacctccccaacatccaaacgcgtgtccatcgcgcaggtgctcgccgctggtctgctcattcccggtgagacgctggtatgggaccgaccgcgcaagggcgaacgttgggtggctaccgtcaccgccgaaggcaagcttcgactggatgacggcagcgagtactccacaccaaccgcagcggcccgtgccgtcggtggcggttcggcgggattgaccgtgtggaagcgcacgtcgaacggtcagaagcttagcgacgtgtggaaggcctatcgcctacgcaagcgctgaaaacgttgttcgttttgatgagtttgccgtttatcgacggtttcctattggcatgcgagccattcgaccgcaagtttcgtacgattcgtaacgttcgttttcgcgagaatatcgctgatacgattgcgaaccgtgccttcgcttaaaaacagtttcgcagcgatctcacgattgtcgtacccctcggcgaccagttgcatcacgtcccgctcgcgctcagtgagattcgcgaaacgaccggaaaaacgattttccccgttatcgccagcttgcgaaacgtgacgctgcgtctgactcgctttattgacatgcagtttccgcaacacctgcgctcccataaccacctgtccggccatcaccgactgcactgcgggaatcaccgatgagacatcctgtttgatcaggtagcctttggtgccgatttccaacgcctcggcgatgtacgattcgtccgcgaatgtggtaagtatgaggattttcgcattcggatgggcgtcgatgatctttcgcgacgcggcaagaccgtccataaccggcatttgcacgtcgatcagcagcacgtccggattatcttcttcatactgacctaccgcggtttcgccatcataggccgtccatgcaatatcggccgtgcctgtcgctttgagaatcgtggacagcgacgagcatacgattggatcatcatcgacgattgcgactcgcatcatacgttctccttcgttgttgcggacgctgccgcatcatcgtccgttttgggaatggacacgaacacccgccacccctcatgatacgggccgcacaccgcggtaccgccgagcgcccgcgcacgctcctcgatatccgccaatccaatgcccgaagcatcacgcatcgtcgccgtacgcgcggcatcatggaactgacgaaaacgagcggaagactcccccatcataccgttgatgtttccttgggagccatcgttccacagggcgccatcatcctgtatgcgcagctgccataacgcaggaaaatcacgcaaggtgatatcgacattgcgcgccatgctatggcgaatcgtattgttcaacgcctcgcgaatcgtcgtggcgaaacagcgtgacaccgcggccggagccgcatcgatgccgttgctcaaggtgacgttcactgtactggaattgtccaaaccatgcgcggatgcctcaatctgcgccacgaaatccgtgccttcgtctttcagatcatgcaccgcgccccgcaccaatgtcatcgcctcgcccaccgtgtcgtgaatctgcgcgaacccttgagccgcctgctcctgaccagaaacctgagccaccacttgggccgcttcggactgcatgatggcccgggtaagcatatggccgacattgtcatgaatctcgcgcgctatgcgtgtacgctccgcgagcgtggccacacgaaccgacgcggcgcgatcttcctcgctttccgccaattgcgagcgcagccggcggatctggtcacgtttggaatcctgaagccgcctgttctgccgggtgagcgtgacattgcgcgcgcacaacaggccaaccatgaatcccaacactacatgcaatgccagcagtacggcgatgagtgcagctcccatatcatccgcatgcgcgcctgcattacggcaacggaccaaggtcgccactacgggaatgatccacacccatcgtgcgatgaccgtcgtgatttgcatcgcatcgtattgcggcatgttcggcaattgcgaacgcaagccggcatggttccgtcccgcacggggttgttcgacgttctgtgatatggcgggcagcatggccgcgttgtatgcggcgaccggcatcatcgcgcaccatgatggcgtgaagcatgcgccgcaatccaacatcaacagtatggcgatggtccatgccgacgagcgcgcgtattcccccaccgcggcacagcatatggccagcaacgcgccgcataccagttcagccgatacgtctccgacgatatacaggtttgcgatcagcccgaacgtgaggaatatggcttgaagcaataatcgccgcatgccttcctccatcgtcgccgcttcttgtggttatgtcttcccagcgtagtgtacgttgccgccgttgcgggccatctttgccacgaaggtgacatttgtcatcttccatatggctgtgttgcgccaggtttatgacctcagacaccatgtcgtctccgtttggtcggagacaatggaatcactatcgtaaacggcggttatcgctgttggaacatgtgaagtaaggagagccgatgagcgagcgtatggaaaggcaaacaggtgagagctccagcagcgcggtcaaggtgtcgaagctggtcaaacggtatggggatatgctggcgcttgactatttcgatcttgacgtgcatcaaggtgagattttcggtttgcttggaccgaacggttccggcaagaccacggcgattaactgcattctcgcattgttgacgttcgatgagggcacggtacgtgtgtttgacgaaccgattggcccgaccagttatgcgctgaaacgccgcatcggcatcgtaccgcagaatgtggctgtgttcaatgaattgacggttgaggagaatatcgattatttctgctcgctgtatgtgcctgacagggcacgccgtcatgcgctggttgaggatgcgctggattttgtgggcttgcgcgattaccgcaggttccgtccgtcgaaattgtcgggaggtttgcttcgtcgattgaacatcgcatgcggtgtggcgcataagccggatctgattttcttcgatgagccgaccgtcgccgtcgatccgcaaagccgcaatgcgattctggagggcattcagcgtcttaaccacgaaggcgcgacggtgatttacacgagccattacatggaggaggtcgagcagatctgcgaccgcattctcatcatggatcatggcaggcatttggccttgggcaccgccgacgagttgaaggcgatgatcgacaccggcgaacgcatcagtgtggaaaccgacgatctgggtggcttgcatcatgaggcgggaacgcagcaggcattggaacagttacgtgcgctgccatgtgtgatgagcgccgattatgacggtcatgagttgacggtacgttgccgtaggggcgatcacaatcttcttgacgtgttgacgttgctgaaatccaatggcacgaatatcgggcatctttcctcccggcagccgacgctgaacgatgtgttccttgaactgaccggcacggcgttgcgtgactgacggaatcatggttcgaaaggtttgacattatgttgcagacattgctggtcaatctgaaattgcatttcagggagaaagcgcagctgttctggctgtttgcctttcccatcattctggcgaccatgttcaatggcatgttcggcaatatcgcggaaagttacgcattgcacacggttgacgtcgtcgtggttaataacgacgattggcgtgcctctccgggcgcgcagatgctggtcgacggcatttcgtccgatactggcgcgaccggtgccgatggcgatcatgcgaaggtcgatgatgacggtgacgccatgccgaaactcatcaccgtcacggaagccgcatctatggaagccgcggatcgagcgctgcttgacgccaaggcgcagggcagactgtccgtcgacggtagtgggaaactgcagctggccatttcccaagccacgcaaacatccgccacggatgtgatggcgtcgagcagtggtctggatatttccctgacggtgttgggcaatatcgtggacttgtacaatcacaacaccgccgtggtgatcaatgccgcgcagcacaatccgtccgcgttgttggatgacgcgttcaccggcagcatcggctcgtcgagtgggttcacgaaggaagtgcagctgacgaatttcaagccaagcggcaccgcacgctactattacgcgttgctcggcatggccgcgatgatggccatgagtttcgcggtgaacgcggtatcgttggcccaggcaaacctgtcggcacttggcattcgccgttccgtcgctcccctgccgaaactgcaacagctgctggcaggttttctttccagttggatctgctcgttcctaagtctgaccgtggccatgctgtacattcgtttcggctgccagatttctctcggcggtcgtgaatgggccggcttgggcgcgtgcttgatggcgtcattcgccacaagcgcgttcggcacgttgatcggcgcaatacagggtgtttccacgagtgccaagcagggattgtgcacggccttggcatgcacgctgtcgctgttttccggtttgtatggctcgttcgccatggatttaagcgatcagatagcgcagcatgcgcccctgttgagcatgttgaatccggcgcaacagattacgaatctgttctacgacattctgtattacgacagtttccgcccgttctttgccacggtgggcgtattggctgcgatgagcttggtctgtcttggtatggcgaccgttctgttgaggaggcaacgctatgaacacttgtaaagcagcactgcgcattctcaaagcgcgcaaattgtatgtgattatctacttggtgctgatcggcacgatgatgttttccatcagctggcagatcatgcgtggctccacagctgccggagcgacgacgtatgagccggaatccgcccgtattgcggtaatcgaccgtgatgacgacgccgagcatgtggctcaatcgttgcgttcctacctcgctttggacggtgagatggtcaccattgatgacgattccatatcgttgcagcaggctgtcgcatcgaattatgttgatttgattgcgattgtgccacaaggtttcgccgagcgttatctgcagtatgcggataacgccacggctacgcaaccgaccatagataccgtcgtcagttatgcttccggagccggatcgctcgcacagctgaaagtcaacgagtttctttcgctgacgcgtaccgcctatctcggcatgccgcaggcacagcgcacgctcgacgccgccatggcaacgacgttggatgctgccaccgccgatatgaaacagtcgcatatcgccgtggtgtcatcggactctgaagacgacggcaccacaccgggctcatcggcattcgcaggcacgctcaaaaccggcttgtatccactgttgctggtcatgccggtatgcacgttcctcgtggtcagcacattcaacgacaacgaaatccgccgcaggctctactcgtcccccgcgcgtctggtgtcgttggaagcgcagcaaatgctgacatgcgggacgttcggtctgctggtatgtgctgcgtataccgcggtgacattcctgttgatggcgctggccggagtgtcctttaccggcctgaatgccgtgaacgtaggcttgtcgttcgtgtcgctgatggtctacacgcttatggcgatcgcttgcggattcctgttggggtcatccggtttcaatgaaatggcaacgaacggtttcgtcaatgtgttcgctctgctggtcatgttcacttccggtatggcgttccccgtggatatgatgccagatcccatgatcatcatcggaaaactgctgcctggatggtggctctgctcatcgatagaccacgtattcggactgggtacggcctcctcgagcggcgtggactacggcgcgtgggcgtcatcaaccggattggtggcaatgttcgcggtagcgttcatctgtctgggcttggccttgggacgcattcggcgagcccgcccgacgttggcctcccccgccacaacgcagttggccaagtagtcgacgccaacactgtggcagccgcatgacgatcgcatacgacgtccacggtctacttgagcatattcctccggtaggctgtgggcgtcgtatgcatgtactgcttgaacgtgcgcgtgaagaatgtcgatgatgagaaaccaagttttttggcgatgtcggaaaccggcatcgatgtggtgtccagcatttccgctccagctctcatacgcacgtcattgacgaattcaatcggcgtctgatcgaccatctcatggaagatctgcgcgcatttcgtacggccgacggaccctgctgaagcaatctcctccagggtgatctgtcgaacgtaattgtgctgcacgtaatcaatcatcttgctcaaaatagcaatcttcggattcttcctgtcgtatttggaagaaccattcttgccatgttcgcccgctatggccgtcagttcacgcaccatcgtataaaaacagctgagcacggtcaacgatgccgtatcatcctttaatttcatattgtcaacggtggcgggatgcatggtctgggcagccggcatctgaccgaatttcgcatcatgcagccgcatcatgcattccagcaacgcggatccatgctcatcttcaggatcacacaccatgtacgggagccgttcgtccgccatcaacggagccacaaagcgttcataaaccatgttcggcatgcacatgcatgaagggttcagcagagtgcaggaaaattcgcaatcggtgccgtcctcggtgaaaccgtaatgcaattggcgcgaattcacgaaaatgccttggccttcttcgagacgaatgctttcgccgttcacgaaataccacatgtgtccacggatgatgtgggtgaattcgaagtcgatatgccaatggcattccgcgcgcatgttcggatactgatgcagcagcgaatgttcggtgaatgagaagaacatcggcgcatcatattgcaccatttccgcgccgttgggcttgcgtccccagttggtgaccggcatgaactcatatggaagacgaccgtcttgcgcaagttcaggctgttccgtttgttcgttttgtccgacctgcacgtcacgaacgtctaatcccatctgtcccatgcaataccccatcagtggatacggtaaataatacgaaaatcaagaacgataatacaacgaaatacagtgtcaacgaataatgatgccgttgaatggaacatgatatgtcacgtcaatcgattgacgtaatacagcagaggaggcagcatggtggaacccaccaatcatccggcacgcgacgaatgggagcgtatgctctccggcgaactgtatgtggccgatagtccgcaacagcaggaagcgaatatgcgcaagcgtcgcctggtgcaggccatcaacacgtccgaatatgacgcgttcaaagaacgtgacgaactgtttcacgaactgttcggcgcatttggagagggtggattcgtggaacccccattcaactgcgattatggatgcaacacgttcatcggcaagaatttctatgccaacatggattgcattttccttgacgtggcacgcatcaccatcggcgaccgcgtgttcttcggcccccgagtgggcctgtacacgccgtatcatccgatcgatgcgacggtgcgttcctccggccctgaaggcgctcgtccgatcaccattggcaacgatgtctggttcggcggcaatgtggtggtcggccctggcgtcaccatcggcgatgatgtggtgatcggtgccggatcagtggtggtcaaggacattccttcgcattcggtggcagtcggcaatccatgccatgtgatccgtgagatcaccgacgccgaccgcgaatattgggaaggcaaggcagcggaatatcacgcttggaaggattcgattcagtaaaacgcaccgcaccatcctcacatcatcatgcaatcttccatcacttggcgcgagtttcttcgacagacgttgacgctcgccctgcccatcgcgtttcaacaactgatgctggcgctgtcatcgtgcgccgacactcttatgctgacgaacgtcggtcaaaacgagctgtcggcagtgtctcttgccacgcagttccagttcattttcagtttgtgtcttaccgcgctcacgcttggcatgagcattctggtggcccagtattggggtgcgggcaacacgaatgccgtcgaacgtgtcttggcgttcatcatgctgtatgccggcggattgtcgctggtgtttttcgcattgacgctactcattccggaaacgttgatgtcgattatgacgaacgatgcgacgctgattgccatcggctcacagtatttgcgggtttcgtcggtttcgtacctgttcatcggtttgtcgcaaatgtatttgtgtctgatgaagaatgtgggtgcggcggttaccggaatgacggtaagcacggttggcgtgatcgtgcatgttgcgctgaacgcggtgctgatctatggttggttcggtttacccgcattgggtattttcggcgcggcgatttccacggtgatttcccgagccatcgaactggtgtggtctgtgcttgtagccagccgcaatggccgcccacgtttgcggttgtcgatgatgttgcatccggatgtggcgttgcagaaggatttttggaagtatagtctgcccgtgcttggcaatgagctggtttggggctgcggtttcaccatgtacaccgtgattatgggtcatcttggtacggatgcggtggcggccaattccattgcgaatatcgtcaaggatctgttggtctgtttgagtcttggccttggcaatgcgggcggcattcttgtcggtaatctgcttggccgcaatgctttcgatcaggcgaaggttatgggcgacaggctctgtgtactggtggcggcagttggcgttggaaccggcctgttgattatcgcggcacgtcctttggcgttgcagtgggcgggattgacgccgcaggccacgcgttatctgtcggttatgctgtttatctgcgcctattatgcggcatgcgggtgcatggccaatctgactatcgccggtattttccctgccggaggcgattcccggttcggacttgtctgcgatgcgagcgttatgtggcttgtcgtcgtaccggtcggtctgttggcggctttcgtgtggaagttgccggtattggcggtctatgctttgctgaataccgacgaatgcatcaagatgattcctgctttgctgcattatcgaaagtatcgttgggtcaacaatgtgacgagacagaccgattccgccgtagtatcaaacgcatgaaaaaccggtatcgacaaagcccgtgtcatactgcattgcacagtgcgacacgggctttgttatttgccgatctcaatcatgtgattatttatttcatgagattgcgcagcacatactgaaggatgcctccgttgcggtagtagtcggcctcgcctggggtgtcgatgcgcacgaccgcgtcgaattcggttgtggaaccgtcgctatgggtggcggtgacacgcacggtcttcggggtgatgccattgttgagctcttcaacaccggcgatatcgtacgtttcggtgccatcaaggccgaggctctcataggactcgcctgcggggaactgcaacggcagcacacccatgccgatcaggttcgaacgatggatacgttcgaagctttcggtgataacggctttgacgccgagcatgacggttcccttggcagcccagtcgcgggaggaaccggtgccgtattctttgcctgcgagcaccaccagcggaacatcatgttcgatgtagtcgcgggatgcttcgaagatcgtggtcggcttctggtcaaggaaatcgtaggtgaaaccgcccggagtgacctcttcccccacggacgcaagcaactggttgcgcagtcggatattgccgaacgtgccacgtaccatgacctcatgattgcctcgacgggaaccataggagttgaagttcttcggttcgacgccacggtcggtcaggtacttgccagcaggactggaagccttgaacgcgccggctggagaaatatggtcggtggtcacggaatcaccgagcagtgcgagcacgcgggcgccatgaatgtcttcgacgggatccggtgtggccttcatgccatcgaagaacgtctgcttacgcacgtaggtggaatcctcattccatgcgaacagttcgccttctggaacgtcaagtcctttccaacgacggtcgccttcgaatacggaagagtaatccttcaggaacatctcacggctgacggtaccgtccaccacggcggcaacctcgccattggtgggccagatatccttcagatacacatcgttgccgtccggatcctcgccaagcggctgggtttcaaaatcgaaatccatggtgccagcgagcgcataggcgatgacgagcggcggagatgccaggtagttcatcttgacgtccgggctgatgcggccttcgaagttgcggttgcccgacagcactgaggtgacggtcagatcgttggcgttgatggcttcggagatttccggcagcaacgggccggagttgccgatgcaggtggcgcagccgaaaccgaccagctggtaaccgagcgcgtcgagatcgtcctgcaagccagccgccttaagatagtcggccacaacctgggaacccggtgcgagcgaggtcttgacccacggcttgggcttcaaacccttggcatgcgcgttgcgtgcaatcaaaccggctgcgatcatcacggacggattggatgtgtttgtgcacgaggtgatggatgcgatcgccacatcaccgttggtgatgtcgaagtcaccgcggaagtcggtggaaacggcaaccggctcctgcatggtcttgtccgtttcgtacgcgggcaaggtttcgacgaatttcgctttggattcagacagtttgatgcgatcctgcgggcgcttcgggccagcgatcgacggtacgacagtaccgaggtcgagttccaggtattcggaatactgcggttcgacgtagtttggatcggtggtgtcgccccacagcttgttcgccttggcatacgcttcaaccaatgcgatctgttcttcggaacggccagtcaagcgcagatagtcgagagtgacgccgtcgattgggaaaatgccgcaggtggagccgaattccggacccatgttgccgatggtggcacggttggccagcggcaccgaggcgatgccatcaccgtagaattccacgaatttgccgaccacaccatgctggcgaagcatatcggtgatggtcagcaccacgtcggtggcggtgacgccttcaggaatggaaccggtaagcttgaaaccgacaacacgcggcaccagcatggagatcggctgtccaagcatggccgcttcggcttcaatgccgccaacgccccaaccgagcacgcccaagccattgacggtggtggtgtgcgagtcggtgcccacgcaggaatcaagataggcaagagtcttgccaccgttttcttcgaccttggtcatgatgaccttggcgagatattcgatattgacctggtggatgatgcccgttcccggcggtaccacgcggaagttcttgaatgcctgctgaccccaacgcaggaactggtaacgttcgccgttgcgctggtattcgatgtccatgttctgttcgaccgcgtcggcgatgccgtacttgtcgatctgtacggaatggtcgatgaccatgtcggactgcacctgcgggttgatgacctcaggatctcccccaagatccttgaccgcatcacgcatggtggcaagatccacaatgcagggcacgccggtgaaatcctgcatgaccacgcgggacggggtgaactggatctcatgactcggctgtgcagccggatcccaatccaacagtgccttgacatgatcatccgtgatgttggcgccatcgatgttacgtaccaggttctcgacgagaaccttcaacgaatacggcagatgatcgatgcccggcagatctgcgatgcggtaatattcataatccttgccgtccaccttcagggtgtcgagctggtcgtcgcgcacagacatgctacctccgagctttttggctgtataacacagctgattattcgtcgcctacgatacagccaagttaattcagctctggcgtgtcttcttaaagtatgggacaatactcggaattttcggcaccaaacgcaaacacaccaagaacacgagtgccgaaagcaccattgccaccgccgtcgcagccagcatctgcccggtcggcaccaccagcgcgaagaaattcgccaccggttttacgagcatgcccccgaatccaattgcggcaaaggccaataccaatatgccacgccacgaatgcaacggctttgccacccgcgcaagcacgaacactcccatcatgagcagaataatcgcgttgacgccacgcagcatcgccaactgcgcacccgaatcctgcacattccacttcatgaatatcggcagcagccacgacgtggacaaaatcgacaatccgaccgccacaccgcagggcacagcaaaatgcagcacgcgtttcaggaatcctggaatataacgacgcgtgttcggagccaacgcaagaatgaatgccggcatgccaatcgtcaatccacccacatatgtgatgtggcgaggcagatacgggaatggtatctgcgtcagcaccacacccaacgaaatcagtgcggaatacacggttttcacgaggaataggcttgccacacgttccatattggccataacctgacgccctcgcgccaccacatcgggcagatgtgagaacttcgaatcgacaagcaccacctgtgccacggccttggtggcgggcgcagcattgcccatcgcaatacccagatcggcctctttgatggcgagcgcgtcgttcacgccgtcgccggtcatcgccaccacatgctcacctgcatgcaatgcctccacgatcgcctttttctgatcgggcagcacacgcccaagcacatccacgttttccagtacttgcgccagctccgtaatgtcagcgggcagctcacgcgcgtccatgaatcgtggttcatgttcgccggtcagatgcacttttcttgcgatcgcgccgacggttacgggattgtcaccagagatgatgcggcaacgcacgccttgttcacggaaccatgcaagcgtttcttcggcgtcggcgcgaatatgttcggaacagcacaccaatgcgacagggcacgatgccggattgagttttggatcggtttcgtaatcgtcgggcgctgcaccgtagattcgcgcgaccagcagcacacggttgccgtcattggcgagatcattgacttgtttgagtatgtcggcatggtcgccgttgatttgggaaagaatgacttccggcgcacccatcgtccacactgcattgccgtcatagatcgaactccacttgcgcgccgacgagaacggtactcgtgcctcgacagtgccgtccgcaaatccctgttcccgtagtccagacagaatcgcttgccctgtaccgttgggctgtccttcgttcgatagatcgaatagagcctgtctgacgtcatgctcgttcacggtgcctcgcatgtcgtcggggccacgaacacccagcaattccaacgaatcgagtcggatggtgccgtcggtgacagtaccggttttgtcaaggttcaggcaatccacacgagcgagagtctccacggattccagctcctgcaccagcgtgttcttacgtgccaaacgaatggctgcgagcgcgaaattcagcgaggtgagcagcaccaggccttccgggatcataccgaccacaccggccactgcggaaatgaccgcggaacgccattcgccggtcgaaatggccacattccagccgccaacagtgcgtacctgcgaccagatgagcagtacgcagagcggcaccaccaggaaggtcatgaatttcagaatcgtgttgatgcccttgtttaggtcggatacggttttcctgtaaaccttcgcccgtgcggtaagtttggccgcgtaactgtgctctcctacggcggtgactttcaccaacgccatgccggagatggcggtggatccagagaaaatatcgcagccttcgcccttgcgtacggtccgtgattcgccggtaagcatggattcgtccagctccagtccccaagtgtgcacgatctgcgcgtccgcgggcacctgttcgccggaacggatccacatgaaatcaccgagcacgatatcgttgtgcggtatttcaacgtctttgccgtcgcggtgcacaagatagtcggaagccaccagaatcgacagtttgtcaagagtacgcttggctttcaattcggtgcagatgcctatgccggtattgatgatgatgatcatgccgaacaccgcgtctctccacgatccagtgatcaataccataaccatggccgcaaagatgatgccgttgaacaaggtgaacacgttggctcgcacgatatcgataagcgaacgtgaggtcgatgccttgaccacattgtccaatccgctttccctgagggcgatcacttcgccttgtgtcagccccgtctcttcgatgaggggcattgttcgactttcgctcatgattgccagcctaccgtcacactcccgttttccggtcaacttcttgtgaaacacaggtaaaaatcagggaattttcagggtatttcatcaaaagacgaactgatggtcattcataccgacatggtgcaaaaccatatcagtgggtaatcgtggttaccagcatttcccggtcgtgaggatcattattagccacggccacagcagcatcgtcgagcggtatcgcgtcggtcatacgatcgttgaccgtcatggtagccgcatacagtttgttgtctttcggcacggcgataggattgagaagcaccactggaacgcccgctgttcttgcggtttccaaagcatcattccagttttcggcattggcttcgttcgcgtcgattcctgcgatgataatgaggtcggccttgcgttgcgccatgtcacgcacgccttgctgcgcggtggattgcgcgtccacagtgcccgagacggtaatgtacaccggcttgagtttaccggattccatggcatccattgccatggaatcggcggtgacatcatccgatccaatcatggcgatggacaggctgtcacgatcctccgtggagtgcgccaccgcagtattgggagattgcgtatcccccaccgcggcattcgacggcacgcaaccagatagcgccgcgcaagacaacgcaatcgcagtcattccaaaaaacgcacgacttgcgaataacggcatgctcactgttcgtgctttctgaacagcgccacagtctccacatgatgggtcatgggataaatgtcgaacgcgcggatatccgccaattcgtagccaagtaacacgagcgtggcggtatctctggcaaggcttgccggatcgcatgcgatatagaccacacttttcgcttcggcttcggcaatctgcctgcacaccttcgcgcgagcgccggcacggggcggatcaagcaccaccacatctggcttggcgagatcattgcgcacgttggcaagtgttttcgccacgtcgcccacacgcgcatcgacattacccagatgaatgtgcctcaaattacgttgcgcgttccttaccgcagttttgccgccttcgacgctcaacatgcgagtgcgctccgccgtcagcgtggccaacggcagcgtgaacagacccgaaccggaatacaaatcccacagacatgcggatttggcaccgtcaagctcgccgcgtaccaaatcgatcacatggttggtcaaagcgatcggcgcatgcctatgcatctgccagaaaccgcctgcatccacgttgtattcgaattcacggccggcgacaatcaccttttccgtaagctcacggcttccagcaaccacctcgccgttcacaagcacggcgtaattgtctgaaatcggcgcattatcgcgaggttccggaacggatagacgaatctgggaacccggttcgaagctcccttcccacacatgctcacgttcggccacttccagcaacgtacggctggccaacggcatggtatcaatcggaacgcgcacatgcgtgcctcgacggtgcatcgacggacgcccatcagcatcagcaatcatctcgatgcgagtacgccaatgcaaacctcgctccgcatcgtcttccgacatacgctcaatgggcacttccacgtcgacgtggccgagtcttgccatctgttcggccaccgacgtgactttccatttcagttgccctgcaagcgacacatgcaccaagtcagcgccgccgacaccaccgcccatggcaaggggtccagctaacgaccatattggatcagtacggtcttcgctcgcttcgagtacttccaccacttcgcctgtccagaagcgatcctcacgatcatgcggctcgtccaatgcgacacggaccagttcgcccggcaatgcgaatcgcacgaacacaacacgtccgtcaatatgaccgacgcaacgaccctggtcggcgtaccgttcaatgcggatggtcgattccatcagtgctcttccctcatttcggtagtttgtgctgcctcagcatcgtcttcagaaacttcctgcatcatcttatgtcggtgcattggcgtcgccacgatcagatacgagacccaaatcgcgagcgcccagaacggaatgcccatcagcagacgcgctgttcccagccagccgacgtgattgccgagatagagcggcacctgcacgatcagacgcagcgcgaacactccaacccacattgcggtgatgatggtataggcgcgattgagcgccttgtcacctcgccaatcggcaagccaggcacgaaaatgttcagtcggtaacgttcggatgaactcgatgaccaatcctaagccaggcacccggaccagcagtgaaatcgtcagcaaaacaacgtaaaaggcgttggtgagaaatccgaacatgtaatagttacgtgcctcgtgactgttccatgcccagatcaggcagatacctactgccagcaagcctgataccgctcccatgacggactgtcgttggcacaggcgcacgatcacctgcagcacggccaacgcagcggacacgccgatggtcagttgcaaattggacgtgatgacgaacagtgccacgaacacgacgcccggcagcatcgattcgataacgcctctcggaccgccgatggcgtcgatcacggaaaaatcgtcagtattaccggcgtcggcaagcgcaccaagaccagttcgttttttcgcttcggtttcagccatacgtattagctatcggttcaagcggctcaacgcacttcggagaacatcggtccacgagacagcgtggtcttgacctcaacctgctggtcggagtcgaatggacccttcggtttgccgggaatctcagtcttctgctcagcctcttccgcagctgccttcgcagccttgcgttcggccggagcgaccggcggatgcatgggaataaggtcgcgtggcgccaacggatcatcgcctcgttccaccacaatatcagcgaagaactggttcaatgcctttgcttcctcaccctcaggatcggtggcagccttgcctgagaagatgccgcgcaacatccaacgcggaccgtcgacgcctacgatgcgggtaagcaccttgcgtccacccttgacggtaaccggcaatgccagttcggtgccgaatacgccttcgacttccttcgcatccttgttggcttcaatcaggtcggcacgaacgtcatcccacaatccgaacgtcttcggtgccgcgaatgcctcaatctccacactggaggaaccgtaggtgatggtggtgccaagaacctgctgggtggcacggttggccttcactcgcaattcaatgcccttcaggaacggcagataatatgatcccatatcgaggtactcgtcgtagtcgggaacgttctcatcttccacgtcccacggaccatgctcgtcaccgcggccctcgtattcagcggaaggctccggaagcgccacgacttcctgagcttcgtcaacattttcagctgcgtcgacagcctcttcgttttctccggcggccgcttcaagagcttccttgctctgatgcttcttcttaccgaatccaaacaatcccatgatgttcctcatttcataacagttgcaaccgtgaatagcctagcacctatgcttaatatgggctgggaatcggggtgtgatattccaattcccagtctgttcacgataaaaagtggcttaaatgtcatacataatgctgagcggcgcatgatcggaccagcgcaggtcgtaggtcggagccttatcgatcacgaatccgcaggccgtttccgccagttccggtgttgcgaactgatagtcgatcctccagccgacattgttgtcgaatgcacgaccgcgctggctccaccatgtgtacggtccttggatgtctccggcgagattacgcatcacatccacaaactccagttctcccaaccatttgtcgacatatgcgcgctcctcggggaggaatccggcatgcgtttcgttggctttggcgtttttgatgtcgagcggcgtgtgcgcgatgttgaaatcaccgcagagcaccgcttgttttccgccgtgtgctgcctcgtcacgcaactgttccatgcgtatcagcatggtgtcgagaaaacggtatttctgcttcattttttccggatcatcggtatttcccgcatgcacatacacgcaaaccacggtaatgacatagccttgtggagtttgcatgtccgcttcgatccaacggccggaatcgacgtcatcctcaagtcccggcaatccatatcgtttgtcgacaaccggcaatgccgacaacagacctacgccggcacgccccttgatacggcaaatctcgttcatacgatgcagttcgctctgatcggaaatacgtcccgccgttgagtattcgaaaccgaattcgtcgaaaataggatcgatttcgttttgcggggcacgcacctcctgcatacaccacacgtcaggtgtgttgcgtccggcccactcctcgatgcctttgcgttttgccgctcggattccgttcacattggaagtcgtgatagtgatcgtcatagcgttctagcctagcttgcatacaagaaaagccctcggcacatgccgaaggcttatcttgatgatgttatcgcatcaaatcagtcaagaccgagctgcagcttgccgccggggatggcgccaagcagatcacgggtgtactgcttctgcggatggtcgaagacctcgtcagtggtggcgtgctccacaagcttgccgtgctgcatcaccacaacctcatcggcgatctgacgcacaaccgccaaatcgtgggtgatgaacaggtagctcaggcccttttccgtctgcaggtcattgagcaatcgcaacacctgatcctgcaccagcacgtccaaagcggatacggcctcgtcgcagacaatcacgtccggatcgagagccatggctcgtgcgatggcgatgcgctgacgctgaccaccggaaagctcgttcgggtagcggaaacgcacggaccacggcagttccaccatatcgagcaactcacgcacgcgggcagcacgactcttcttgtctccaatgccgtggatacgcagtggttcttcgatggaacggtaaatggagtacatcgggtcaagcgagccatacggattctggaacaccggctgcacgtggcggcggaagtcaagcaattccttgccttggaagccggaaatgtccttgccttcataagtgacggtgcctgaggtcggttcaagcagcttcagcaccatgttggccaccgtggacttgccggaaccggactcgcccacaattgccagcgtggtacccttcttgacggaaaagctcacatcgtcaacggccttgaacatctccttcctgcgcggcagcttgaactcgcgcgtcagatgatccaccgtgatgatggattcgccggacttcagggaatcttcattcaccttgtgttccatcacgccgctggcatcgccaccatgctccttgacggagatgatgcgctgcgaggccaacgacggcgccgccgccaccagtcgcttggtgtatggatgctgcggatgctgcagcacttccagagacgggccggattcaacgacctgccccttgtacataaccacgatgtgctgcgcacgctcagccgccaaacccaagtcatgggtgatgaacagcactgcggttcccaacgaatcggtgagcatctggagatgatcaagaatcttcttctgcacggtcacgtcaagcgcggaggtcggctcgtcagcgatcagcagttccggacggcatgccaagccgatggcgatgagcgcacgctggcgcataccaccggagaactcgtgcggatactggcgtgcacgagtggcggcatccggcagaccagcctcagaaagaagacctgcgatgcggtcatccatggtggagccgattacatacttcttggcgatgtaccaagcgtcatcctcggccacgccgaccttgatcaggtcgtcggccacgcgccaacgcgtttcagatcctgggacccactccgactcgaagtacgccacggtcttgtcgaagtcgtcgccggtcttaccgatcttggacagcgcttccttcgccgcggacaacagctcaggaagctccttggagccaaggaaagtttcatcgtcgttgcctttaagttcgacatcggcatcggcgagagccttcgacagcgaggaacgcttctcatgggcgatatccatattgttggcggccagagcctccttcacctgggtaccgatacgccacaccgggttcaggttgctcatcggatcctgcgggacaagacccatcttgttgccgcgcaacttgtcgaaatccctctgcttgtaaccggagatttcctcgccgtcaagcttgatggatcctccgaccacatggcctgtgcccggaagcagaccaagcaccgccatagcggacgtggacttgccggagccggactcaccaacgatagccacccactgacccgggtatacgctgaaagaggagttgcgaaccgcatgtaccggctggccatcatcagtggtgaagtcgacctggaggttcttgacttccagcagcggaccgttggcacgttgcatggcctcgagcttgttttcggtattcatttcagtcatcgaatatccctcacttacactcacgtacggctcttcggatcaagcgcatccttcacggcgtcacccatcatgatgaaggcaagcacagtgatggcaagtgccgcggacgggtagaacagcaccatcggatcggtacgcagaatggactgcgcattggagatgtcgccaccccagctgacggtagtggtcggcagacccacaccaaggaagctcaatgttgcttccaacacgatgtatgtagccagagacgttgtgcccaccacaatgatcggtgccaaggaattcggcagaatgtggcggaacaggttacgccacggcgtggagccaagtgcggtggaagccgtattgaactccagattcttagcttccataacagcgcctcgcgcaattcgcgcaacggatgtccagccgaataacgtcatgaccagaataatcttccaaatggaatcgttggtcttgaacatctgcagcaccacgatggcaccaagcaaaatcggcaaagccaggaaaatatcggtcaaacggctgagaatggtgtcgacccagcctccgaagaaaccgctcaacgcaccgatcagcgtacccaacagcaccaccagcaccgtagcgaacacgccgacgctcagcgaggtacgagtaccatgcaccacgcgggagtacacatcgcagccttgcagatcgaatccgaaaggatgtcccttcgaagccggttccaaggagttctcaagcgtgcagtagttcggattctgcttggtcatcactcctgggaacagcgccacgaagataatgaacacaataagcacagcggaaatgatgaacatcgggttcttgcgcagggtacgccatgcgtcagcccaaaggcttgaagccggtgcggactcatctaccgagtcaacgtccttaagcggcgtctcctcgagaggagcaacatatcgttcctgtcccggaagcgcgtgagaaagattcgtctcgttcatatcagtcattgttcaatcctcccaactcacgcgtagcggattcgcggatcaagcgccgcatagagcatatcgaccagcaggttgcacactgcgaagatcagcataagcagagtcacaatggacaccaccagattgccttcacccttgagaatgctttgataagtcaggtaaccaatgccatgcacgttgaagatggtttcggaaatcatggcaccacccatcagtgcgccaagatcctgaccaaggtaagtgacgacaggaatcatggagttacgcaaaacgtgacgattcatgaccgacctgttgtccatgcctttggcacgtgcggtgcgcacatagtcaagcgcgatattggaagaaatctccgaacgactcaatcggatgatatatgccatagacacagatccaagcaccattgctggcatcagcaggtcgatgaatcctggattggcaccggccgtaactggaagcagacgcaacttcacgcctaagaaatactgggcaaggaagcccgtgacgaaggtcggtacggagatgagcaacagagagataatcaggatcacggtatcgcaccacttgcccttgttcaggccggaaatcgcgccgaagatcacgccgaacacggcttcgaacacgaaagccatcagcgcaagcttgatggtgaccgggaatgcacgtccgatctggtcgatgaccagctgaccggagaaagtcttgccgaagtcaagagtcagcgcatttttcaggaacagcaaatactgcacgatgaacggtttatccagattgtattcggcacgaatctgcgcggcgacggcctcattgaccggcttatcgccaaacatcgccttaaccgggtcgcccggcaacgcgaacaccagggcgtacaccaaaagcgtcgtgccgagaaccacagggatcatctgcagaatgcgtcgcagaagatatctgcccattggtttctccttttttgcttattcattgtcaacctttttcagattattactcataatcatcggggaaggttaacgatttaccccgcaagttttgtggcaacacacaacaaactgctttatattgcagtttcatgggaatcagctgggaaaaatgcttggctaccggcatctacccctgacgcctcttggccacactgatgtcaccctgaaacggtgcgtattacatggaaaggaaggaacggatatgatccgccccttcctgcaattggctcagcgagattcactcacgaagatcggctcacttgccggacttggtcatgttctcgtagaccggcaggttctgccagttcatttcgaaaccggaaacgccggtagcagccacaccgtaggcgttggcgtagtacagcggaacggccgggagatcgttgagcagcacttcctgagcctgctggtacagcttattggcctcatcggtggtctgcgcggcagcagccttggagcacaggtcatcgaactccgaattcttgtaatcgccatcgttggaaccattgccatcagcggcggcggaagcgtaattggccaccaggtagttttcggcggacggataatccggctgccagccgctacggaatgcgccctgaaccttgcgatcggacacggcggtacggtaatcgttgaaagtcgggtacgggttggtggcagccacttcggaaccaagcgtgttgttgatggagttcaccacagcggtgtaggtggtctcgtggccaccgtcagcgttgtaagcgaaggtgagcttgtcatcggaagtccacgggctgatggcattggccttctcccagagttccttggccttcttctcgttgtacttcaggttgccgacgcccttgagggaatcagagtagcccggggtcagcggagaggtaaagtcaacggccggagtgccggtgccgttgagcaccttgtcgcagatgttctcgcggttgatggccatggagatggcttgacgacgcagggtgccttcttcggtaccagcttcgaagtgcttcaggctggacggaatggtgaactgctggatgacggaaccggccttgttgtaggcctgcacggtctcatcggtttcgaaggtcttggtggcggaggccggcacggattccatcacatcgagggcgccggactggatgtcggcgtaggctgcgtcatccttggtgtagaccttgaaggtcacaccgtcgttcttcggggttcggttgcccttgtagtcagggttcttcacgagcacgatctcgttgtcgtgatcccaggactggaacttgtacggaccgttgccgactggagcctcaccgaaggcatccgtgtcatcgtagaaggattccggcagcggagcgaatgcggaatagcccaccttgatggcgaacacggaatcagacttgttcaggtcgacggtgaactcgtgatcgttgacgatcttcagaccttcaagctgctcatcacccttgaggttgtcggtgtcctgcagcgcgtcatagcccttgatggtggagaagaaggatgagccgaccataccgttcttggcgttggccacgtagctccaagccttggtgaaggactcggcggtcacatcggtgccgtcggtgaacttccagccatccttgagcttgatgtcgtactgggtggcgtcatcgttggcggtaatggactcagccacttcgttggaagcattgcctttggcgtcgaaggaaatcagacgggagaacagcagatcaaccggcttgccaccaccggtctcgttggtgttgcccgggatgagcgggtgctgcggttcggaattgtatgcggtgatgatgttggcaccttcagcggcggtgtcgctgccgttggaagagccacagccgctcagcagcatgccaaaagcgcacgcggcggcagcgaaagccagtgctttcttcttcatataatcattctcctattcgatatcacatcgggattatcatcccacaaacggaaacgagccgacctactcaccgacgcatctctatttggcgatagtgcactattcttgctcaattgacggacaacctttccatgcaacccaaaaaacgcacaccttccttgacgacatgacggcggaaaacatacgttttccgccgtcatgtcgaacaatgtatccgaagaataagtcagctcttcgaaatctcgttatacaccggaacgttctgccagttcatgacgaagttcttcactccggatgcggcaacgccattggcattggagtaatacagcgggatggcaggcagatcgttcaacagaatctcctgagcctgctggtacagcttattggcctcatcggtggtctgcgcggcagcagccttggagcacaggtcatcgaactccgaattcttgtaatcgccatcgttggaaccattgccatcagcagcgtcagaggaatacagctggtacaggtagttttcaggagacggataatccggctgccaaccggtacggaacgcaccggtcatcttgcggccggtaacgtcgtttcggaattcctggaaggtcggcaccgggttagtggtcacgtcgatatcgagcgtgttcttcacggagttcaccacggcttcaaagatcggcttggctccgccgtctgcattataggagaacgtaagcttgtcgtcggaagtccacgggctgatggcgttggccttctcccagagttccttggccttctttttgttgtacttcagattctcgttgcccttgagcgaatcggagtagcccggagtcttcggagacgtgaattcgaccgctggagttcccaaaccattcagtaccttgtcgcagatggcctgacggtcgatggccatggacaacgcctgtcggcgcaactgtccttcttcggtggatgtcttccaatgttcaagatccgacggaatggtgaacgtctgaatcacggaaccggccttgttgtatggcaccacggaggaatcggattcgaaggtcttgctgtcggcggacggcaccgtatccatcacatcaaggttgccggcctgaacatcggcataggccgcgttggcatccgtgtagatcttgaacgtcacaccgtcgttattcaccttgcgattgcctttgtaatcgggattcttgaccagcttgatttccttgtcatggtcccaggaatcgaacttgtacgggccatcggaaaccggcgactctccgaaggccttcggatccttgtagaaggattccggcatcggatagaatcccgaataacccagcttggtggcgaacgcggaatccgactggctcaggtcgacggtgaactcgtgatcgttgacgatcttcagaccttcaagctgctcgtcacccttgaggttgtcggtgtcctgcagcgcgtcatagcccttgatggtggagaagaaggaagagcacagctgcgcgttcttcgcattagccgtatagctccaagccttggtgaaggactcggcggtcacatcggtgccatcggtgaacttccaaccatccttgagcttgatgtcgtactgggtggcgtcatcattggcggtaatggactcagccacttcattctgggccttgccatccttatcgaaagacaccaacccagcgaacagcagatcgataggacggccaccgccggtttcattggtgttgcccggaatcaagccattctgcggttcggagtcaaatgccgtaatgaccattcgatccttcagtcgcgttcccagacgtggaagacccacagccgcccagcatcatgccaagcacacaggccgccgccgcaacggcaaacaccttgcttttccttatattcattatgttttccctcattattcggattaccggtcggtattgtttccccgtaccagcttcatctaggtaatacaccctaaatcaagaagaaacaccaatttctgttacaggaatgtaacgaaatatccatggaccgcgactacgcacgaggaaatgcctgaccgtatcgggctttcaattgttcgatggagacatgcgtgtaccgttgcgtggtcttcagcgaggaatgtcccaagagctcctgcacctcacgcaaatccgctcccccgtcaagcatatgcgtggcggcactgtgccgcagagcatgagggctaatgtcgggaacgccggcatcacgcgcgcattcgtgcaccacacgacgtaccatccgctgatcaatgcgtttgccttgtctcccaagaaacagcgcagccgcggactgctcccccaccaacaggggacgcccatcatccagccaccgacgtatcgctttttgcgccggagcgccaaatggcatgactcgttgtttgttgcctttgccggtcactttgaccgttcgattggaaaagaccacatccggcacatcaagtcccaccagttcagccacacgcatgcccgttgcatacaacagttccagcattgcggcgtcacgcagctcaatggcctgctgcttcatggtccgttccttcggctgagacgtttcaccgtcctcatccacgcgttccatcagctgttcagcctgtgattcgctgagcacatccggcaacgtatcaggtattttcggggtcatgagcgcacaagccggatccgtcgtcgtcacgccatgctcatgcgtccacgcgaaaaaaccacgtaccgccacagtttttcgggccatgctgcttttcgcatggtttttcgatgattccgccatccacatgcgaagatcttcgatggtcacctcgttaagatccctgcatctaagccgctccaaggcaagcagacattcttcgacatcgcctcggtatgccttccgtgtgttttcactcaatccacggttggctttcagatatgtatcgaatgcctctacgctcttatcgaacagcatgccgaccagcctttcccgagctcaacagcaagcccgaatccatgaatttctttccattatgtgtccattctccgatagaaaccgaaataccggcacaacttgaaaggagaccaactatgctgtccagtagcgttcgctcagcgaatccgtcgatgatcgtctattcgaaggggagattatgccgattccaaacgaaattccagcaggtgcacgcattgtggtgcgcacctgcgaaggtgtcgatccaaaggaccagcgcatgaaattccgcgattatgtcggtcacgtacgttcttgggacgggcagacattggaaatgacgcgcgatgcggcagccaacggttcacgcccagagcaacgtgtcagcattcccgccgacaccatcgtcactgtcaaaccggttccggaacgttccatgacacggccgcgcccatagcgcgtcacactgcggaacgcacctgtgccatagcttgacggtaaccgtcgaatcgcacgatatgctctcccctacgcgccgactccagaagcatctgctgccatccggtttcgggaattgccagttcgaccgtttcgcaacgttcttcgaagtcaggttctttggcgaaagccttgtattcacggaatggctgcccttgtatgaagaaacgcgccatctccttgtcgtcaccggcagtgggcgagccctgttgcgtggtcatgccgtgcagcacgttggccataagcgtcaaccgattggccatattacgcagcaacgcttcgacattggcggcgtcctcttccaccattgcacgggtacggtttggatcggttagcgcaacacgagtcatgtcccgccatgaaccagcggcgagcgcggctgcgatgttccggttgggattggccaccagctcgttgatcatagctgtggaaatgacgtgtggcatgtgggaaatcagtgccgcgcaacgatcgtgggtcgcatcgtcaagaacgatgagtcggttggaacaatgatccacaatcattgtcgcaacggcgcggaaccgctgatactcggtgttttcatctacggtgatggcccagagcgcgccatcgtaaagcgtcggatccgacgattcccatccggacagctcattgcctaccatgggatgcgcgcccacatagcaatgttccaatccaacggctttaacctgttcccgaaccattgctttgacactgccgacatcggtgagcgtggtgatgtccgtatcgatcagtggcttcaacgcacccaggatttgcggcatggccttgagcggattgcataacacaagcacgtcaggttttgtgtcggcgagcgcggccagtgtggacacacatcgtatgccgtccgctttcgcagtttcatatggacgatcgttatggttccatgcgatgacttcacagccagcattaacgagtctgcgagccagtgaccctccgataagaccaaggcctacgattgcgatacgctgcttcaccacatcagctcctttccgaccgtttcgccgttctgccaatcatctggcagatgctgttcgtcaagccgtacgcctccctgcggcagcatccatgaggtgactggaggattggggcgttctcttcgtgggtatacggccagagttttggcccagtcaccgtgttcggcgatttcgaccagcgcgccatggaagcgttgctcccatggcgccgcatcgagcgtcgcgataaaactgtatgtgcctgtgcgtcctttgattggccgcgagatgaaacttgtcatattgaggcctgcatcgcggaatacgtccagcaggttcgcgagtacgccaggacctgtgacaagcggaataagcgtcagcacggattcgtattccatatcagcttgcgaacgaggctgttccaacagttttccggcttccttgcgtggtgcgagcacaagaaaatcagtctgtgcgccttgataatcctgcacggcggtaccgatgcgcgtcacattgtagagttcaccgcaaatacttggcccgaaagctatttcgtttgctttgatatcgcgacatgcggcagcattggatggcgctggagtcggttccaaatggtgttccgcgatgaaacgtttgcattgcgcgagaccatgcgcgtgtgcggtagccacggtggcgtcttccggattggatcccgcacgcacatatgcgtcgaaagttacgtcgacgcccactcgcgcaaatccgactagatctttggcgtcgatgagcgcgtccagattcggcaccacgtaaccttcgacgttgttttcccatgccacgacgccccatccttcgccccgctgcgcggcatcaaggatttgcggtacgtcatccgcagccaccaattcgaatccttccggctcaagatgggccagtgcctgcgatgcattgactgcggcctgatgggtgaaggtgccttgcggacctagatagaacagctttcgtgcgctcattcaaccccattccttattcttggtgttcccctgaaccttacctcattgccgtggaatcgactgccgattattccaccggttgggcgttatcagatgttttacctcgttcgtctgcgtatcagcagcaaacgcaccatcacgcgtctccttacgcggaggtgtgacgaaccaacgtttcggcagcaccagcatcacaaccggaataagcacgacaccgtacagccacatgtatcctgcctgttcactgaagaacggcatgggatcatctccaccgaatcccacaggaatcatggcgtctcctcccggaccataccccgacatcaccgtccagaccaccagagaggagccgatcaggtgcaatgcgaggcctgagacaccgtcgcgtgatcgagctgaccatgtcgaaatgatcaccatgagataggcgatcgccaatccgtagggaatattcatggatgcgcccatgcgatgggccatggttcccactactccgactatgattccggaaaccagatcgacgaggaaccgtccccaaatcggcagacggtatgaccatggcatcagttgcgcatcgggcgccacgtcttgattcgacccatacgtatcatgcgattgcttcatctgttgcatcatatcccctactatcgctcaccaacctgaaaagaaaaagagatacgcgaggacacgtatctcttttttcatggacgcaataacagcatcacttgttcttctgagcgttattctgctgagccgtcaaacggagagcccagcgggctcaccgtaggcgaagtgagcaagcactaccgtgcttgcgaagccgacagaacaacgtgaagaatcacttgttattctgagcgttattctgtcgacgctgcttggcgcgccacttgtaccaatcctcacggctgagaataatcttgcgcacacggatggattccggagtgacttccacgcactcgtcctcgttggcgaagtccaaggactcttcgaggctcatcttgatcggcggagtcagggtttcgagcacatctgcggtggaggaacgcatgttggtcatatgcttggccagcgtgatgttcacatccagctcgtcaggcttgttgttcacgccgacgacctggccttcgtacaccggagactgcggttcgacgaagaagttgccacgtgcctgcagacgctgcatggcgtacggagtggcgatacccttgcgatcgcagaccatggaaccgttctggcgggtcacgatctggccagcccacggagcgtagccggcggagatggaggatgcgataccggtgccacgggtggcggaaagcagtgcggtgcggaagccgatcagaccacgggacggcacggtgaactgcagacgaacccagccagtgccatggttggtcatgttctccatacggcccttacggtcggcgagcagctgggtgaccgtgcccatgtactcttccggaacgtcgatggtggtgttttccatcggttcgttgatcacgccgtcgatggtcttggtgaccacctgcgggcggccgacggtcagctcatagccttcacgacgcatctgttcggcaagcacggccaaggcgagctcgccacgaccctggacttcccatgcatccgggcgttcggtcggcagcaccttgatggacacgttgccgatgagttcgcggtcaaggcgatccttgatcatgcgagcggtaagcttgtggtccttgccttcggttccggcaagcggggaatcgttgatgccgaaagtcatggagatggccggatcatcaacgtggatcagcggcagcgggcgcggatcggacggatcaacgatggtttcgccgatcatgatgtcattcacgccggcgactgcgacgatgtcgccagggcccgcggaatcgaccggggtgcgctcaagaccctgcgtacgcagcagttcggagacgcggaagttttcgacggagccgtccacacgggacagaccgtaggtcttgcccttttcgagagtgccgttgtagatacgcaccaagccgagtcgacccaggaaatcagaggaatcgatgttggcgacgtgtgcctgcaaaggcgcgccttcctcgtattccggagccggaatgttcttgatgatggcttcgaacagcggttcgagatcttcgttatccggcagaccgccattctccggctggttttcggaagcgtagccggccttggccgcgcagtagatgaccggcaggtcgaacagcgcatcctcatcgagatcgataccctcttcgataacgtcctgagccaggccgagcagcagatcggaggattctccaacgacctcttcgatacgtgcgtccggacgatcggtcttgttcacgcacaggataaccggcagcttggcttccaaagccttgcgcagcacgaagcgggtctgcggcagcgggccttcggatgcgtcgacgagcagcacgacgccatcaaccatggagatgccacgctcgacctcgccgccgaaatcggcgtgaccaggagtatcgatgatgttgagggtgatgccttccggatggccgtacttggcggccagcggaccggtgtactgcacagcggtgttcttggcgaggatggtgatgcccttctcacgttccagatcattggaatccatcacacgatccggaacttcctcacgttcgttgaacacgtgggactgtgccagcatggcattgaccaacgtggtcttgccgtgatcgacgtgtgccacaatcgctacatttcgaatatcgccgcgaaccgccatcgaaacctctcttagtattgctgttctcttgcgttaccgttcggtacatactggttatcggtacttacaaatccgtactccacacaaaccgagccaatcctagcgaaccattacgacagttccggtcccagcgctttcgcccacatacaaagtttgcggttgtcgaatctcaacaaccgcaaacgtatgatctcttgggaccactcaaaataattcgttaatcctcaagttccttaccagtgcgttccggcaagcacaacgccgcaacgcaggccagaatgaaggcgaccgcgaaaacgatgaatgccaccgccttgttgccaccggacagcgtcaggaaccacggcatgagcagcggagctatgatggcagccactcggccacatgccgcagcagcaccggacgcagcagcgcgcaggcgggtcggatagatttccggagtcaccgcatacagtacgccccacgcgccaagattggatgcggacaacaacatgccaaagcccaacaccgcagctacggaacccgcttgcgagaaagcaaacgcggccacggccgacacggcaaggaacacgctcagcgtcttcctgcggccccagatctccaccagccatgcggccaggaagtatcccggcaactgcgcgacggcgatggccagcgtatagccgaacgacttggtcagcgagccaaactggtcggccagcagcgacggcatccatgtgaacgctccatagtaggagaagttcacgaagaaccacgtggcccaaatggctgcggtgcgcgcgatgcactttttgccgaacagttcgcgggtgttgatcttcggcagtggtttgcccttcggggaagccactggctcgatgccacctgcctgttcgaaatagcgtacggcctgttcggcttcgtcctcacgccccttggattccaggaatcgcacggattccggaatatgaacacgcgtcacaatggcatacagcagcggcaacgcgccaatgagcaaagcccagcgccaaccccaatcgccggtattcggaatcacaaagtagccaatgcaggcggcgacaatccagccgacagcccagaaggattccaacagcaccgtcatacgaccgcgttgtttggtcggagagaattcagaaaccagagtggaagccactggcagttcggcgcccaaaccaagaccgatgatcagacgagcgatcaaaagcgcggtcaacgaccatgacagtgccatgccgccattcgccaaaccgaaaatcaccagcgtcgcggaaaagaccgttttgcggccaacacgatcggctacaaaaccacccagcgcagcaccgatcgccatgccgacgaagccgatggacagcacccagcttttctcggttggtgtcagattgaaatgcgggtcagccgcgatggccgccacaacgaaggacaccaagccgacgtccatggcgtcgaaagcccagccgataccggacgccaccagaagtttcctatgcgctttgttaaacggcaggcgatcaagacgctcattgcgtgtcaacgaacccgacgaagcaaccgatgcggattgcacggatgtcatacttcttcctctcatacgaaacgaccatgcctacaaggcatgccgaaaaccagacagaatcgtctgaaaaggaaacaatccgaaaagacgtcagatcgtcgtcaacgcggaaagcacatcatcctgcgtttcccgcacatcgaaatcatggcgatcccgagcatcgctccatgtcgactgtcggagcacatccatggtgtagcgatacaccgttgccggacgattgcgtccgacacgcaatttgtcaccggtgtcctccagctgcccggatgcgagcatcttacggcggaaattcgccagatcgatgctctgaccggcaacggcctcgtacacgtcatgcagctggctcagcgtaaacctctcgcctaccaatctggtgacgatctgcggatattcgattttgccacgaagtctgctgagggcgtagtccacgatgtcgccatggtcaaatgccaactcaggcagatcatccacaggaaaccatttgacattgtcgtcgatactctgcccgagttgcccgttaagatcgtcgaccaacgcccaatagacgatggataccatcggcagcccgccgtgtgagcgcgccggatcgccgaatgtatacagctgttcaagataccgtggatgcaacgatgtcgtggattccagcgcaacgtaggcagattgctccagcgagtggtcagccctcaaaccaccaccgggcaacgcccactggccaagaaaaggctggcgcacgcgccggaccagcggtatccacaaggtggatcccgcactggttcgagcatgttcctgcgttccgtgggaagctggccccaaagcgagaatgaccacggaaacgcccacctgcggcggctgtttgcgccgttctgagacattgcccatgatcatcgcgacctcacctctccgatcttttgtcgatttgaattgttccggaatcacagtgtagcacttatagtcaacatgactataagtgcagtgtttcaccacaccgcttgaatttcaacccacgtatgcccttcaacgaaaaaggccccacgaaggagccctatgcgtcttatgcgacgatgccctgagcaatcagctctcgggcaacctcacgatattccttcgcggtcttatggttcggcgcataaatggtgataggcgcggccgcaaccgtggaatccggaagtttgatggaacgtgagatgactgaatggaagaccttgccttggaatgcctcataaatacgctgcaacacttcatcacaatgcaaggtatgcgtgaacatggtgacgagcactccgtacacttccagactcggattgatgcgggattgtactttttcgatggactgcatcaacaaggccacgcctcgcagtgcgaagaactcagcagccacgggaatgatcacgccatcggcagcggtcagcgcattcaccgtaagcaaacccagagaaggctggcaatcgacgatgatcacatcgtattcatccttgacctgacgcaacacgccagccagcacctgctcgcgcccaacttcggtgaccaactgcacttcagcggcggacagatcaatgttggccggcatgatatcgagattctcgaaatcggtatgtcgaatcacatcatgcacatccatgcgaggattgaacagtgcggtgtacaccgtatcttccacggtattggcgttgatgcccaaccccaccgtggccgcaccctgcgggtcgaaatcgacgataagcacgcgacgcccatactggctcaatgcaccagcgatattgatggaactggtggtcttgccgacgccacctttctggttgcacatggcgatgatcctcgccggaccgtgcgtctgcagcggctccggagcgggaaacgtctcataatcacgtccaagcaaatccgtaggcataccgtttaccttaccaacatccttgtgtcaattttcactgtaatccatgctagtccattgtcaccgttcaaaacggcagcaacaccatcatctggcgcgcggatgagacatcagatatgtctcaatcaggttttcaggactgatatgcgtgtaaatctgtgtggtggtaacgcttgcatgaccaagcagctcctgcacggtacgcacatcggcaccgccctgaataaggtgcgtggcgaaagagtgccgcaaggtgtgaggatgcagcggcttatcgatgtgcgcacgctcccccgctcccctgatgatttcccaaaccgactgtcgcgacaatctttttcctcgtttattcagaaatagggcacgccgttccacgggacctttcgatttggattccagcttaggacgccccgcatgcaaataccggatgatcgcttcgcacgcatagctgccgacgggaaccagccgctgcttagagcctttgcccataagtcttgcgattctgccgtccacatcgacatcatcgagattcgcaccgcacgcctccgacacgcgggcaccggtcgcatacatgaattcaagcaatgccttgtcacgcaacatcaccggatcatcgggaaactccgacacgacaccatcatgctctctgttttgagaaacggggatagagtccagcagtctagccacctcatcaacggtcagcacatcgggaagcgtgctcacgcccttaggggcctttacctgcgcggacacatcatcgacaacaatatgttcgttcactgcgaaacgatgaagcgcatgaatgctggccaaccggcgtgccttgcttcgagatgactctcccgactcgtcaaggaagacgatataacgttccacatcctgtgtcgtcacggccgcgataccgccaacgccttggtcggcaagccactgacgatacttcttcaaatcggcgccatacgccgacaccgtcgccttcgacagtcctcgttcaacgtcgatatgagcgaggaattgccgaattgtccgttcgaaatcgtccatcaccctccttccagcagatcccatccggctcatcgtataccactgagcggtcccctaccataggtcaaacgagccctgccatgcaacgcaggaacccccgcccattgctggagcgagggttcctgtcaatcacgctgaatcagcgaagaagctcaggcttccttcggagcattcacatcagccggaagagcggccttggcctgctcgacgatggccttgaaggtctccggatcagagatggccagctcggcgagagcgcgacgatccagttcgatgccagcgaggtgcaggccctggatgaagcggttgtaggtgatgccctcagcgcggacagcagcattgatgcgctggatccacagcttgcggaagtcgcccttgcgagccttacgatcgcggaagttgtaagtaaaggagtgaagcagctgctccttggccttacggtacagacgggagcgctggccgcggtagccggaagccctctcgagaacgacgcgacgcttcttgtgggcgtttactgcgcgcttgacacgtgccatatttgattcctcagctttctattaagtcttcttattcgctctcgctatactcagcgaccgagcagcttcttcatgttcttgctctgggaagtagccagaacgccgtcggccttcagtgcgcgacgcttacgagcggacttgtgctcgaggttgtggcgcatcgcggagccagcgtgcatcagcttgccggaaccggtcacgcggacgcgcttggaagcggcggaattagttttcatcttcggcattgctgccctccttgtttattacttcgtttcggaagtcttcggtttgtcggatgccactgcagccttggcttcggccgccgcctgagcttgggcttcctgcttggccgccagacgtgcagcctgacgggcctgacgctcggcacgggactgatcaccacgacgacgctgctcggactgggtgtgaaccttcttgcccttcggtgcgagcgtcatgatgatattgcggccttcctgcttcggagcgaattcgacggtgccgtattcctccacttcgctggcgagacgctgcaagagctcgacgccaccgatcggacgggactgctcgcgaccgcgcagcatgatggtgaccttgaccttgtctccaccgttcaggaagcgcacaacatggcccttcttgacttcgaagtcatggtcgtcgatctttagacggaagcgaatttccttgatttccgcagtgctctggttacgacgagcctcacgagccttgatcttctcgttgtacttgtacttgccgtaatcgatgagcttggcaaccggaggcttcgcgttgggcgccacctcgacgagatcgaggttcgcttcctttgccaggttcagtgcgacggaagtcgcgatgactcccacctgttcgccgttcgggccgatcagacgcacctgggagacgcgaatctcgtcgttaatgcgtggttcgtcgctgatgatgactccaatcctcatgttccattcgacggaatgctcccagatcggcagtttttcaaagtctcgcatgttcacggcaagccaaaacacccaattcgagggcgcaacaaagagccataccacagctcttccactgccgtttcatacggcaccagaggcttatgcctgaacccgaggccctgaaaggcttccaggtggagatatcccgctttcttgatttctcaagccttgtagataataccacacaccgcgaccacagcgtgtcgcataatgaaaccttctgaaacatcttctttaatcattccaacgccatattacactgaccccatatgacagataattccaacacatgcgtgattttcgcggctggcgaatactacagcgatacccccatcgttccgtctggagcattcattatcgcggcggacggagggcttgaccatgcacgcgcacttgatatgtcgcctgacgtggtggtgggcgatttcgattcgcttactggagaacgtccgacacagggtgaacacaccattgccctacctccagaaaaagacgatccagaccttctgtcggcactaaaaatcggctggtcacaccatgcgcggcttttccatatatatggcgcgctcggcggacgaatcgatcacaccatatccaatatccaactgatggcattgctggctcagcatggtgcagtaggttttctgcacgggaacggctccattgtgaccgcgatttgcgatggagcactcgatttcggcgagaacaacgtcgaaccaggacgtatggtttccgtattctcccattccgacacctctcttggcgtgagcgaacgtggactgaaatacgagatagatgacatgacgatgaccagcacacgtgtcaacggcgtcagtaacgaattcctcaacggagccgccgcccatatcggcgtcgaacatggcaccttggtggtgactttcccttcggaagccccactaccagcagtctcttggcaccacacatttgagggtgacctcggatcgttggacaccaaagtatcttcagcgcttgccaagcacgaactccaatcccgctaatcgcaaagcgaagaaaatcacctttcgtctatcacgttcatctcgaaaagatgatgtgagcgttcacggaaaaacacgacgttttctgaaacacacgcgcgagtgcgttgccttaagtacaggtgacgcactaaagtgggtgacgttggtaaacaatggcttctgtgtgcccagcacacgcgtggcctaccctaaagggagaattacatgacagttaagattggtattaacggctttggtcgtatcggtcgtctggctttccgccgcatcttcgagctgcaggctcgtggcggccaggccggtgacattgaggtcgctgcaatcaacgatctgaccaccccgtccatgctggcctacctgctgaagtacgacagcacccacggcaccttccgtcatgacgatggcaccccggttgaggtcacctccaccgaagactccatcgtggtcgatggcaaggaatacaaggtttacgccgagaaggatgccaacaacatcccgtgggtcaagaacgatggcgttgagttcgtgctcgagtgcaccggcttctacacctccgctgagaagtcccaggctcacatcaacgctggcgccaagaaggtcctgatctccgctccggccaaggacgagaccaccccgaccgtcgtcttcggcgtgaaccacgagatcctgaaggcttccgacgtgatcgtgtccgccggctcctgcaccaccaactccatggccgccatggtcaagctgctggacgagaactggggcatcaaggctggcttcatgaccaccatccacgcctataccggcacccagatgatcctcgacggcccgcgcttcccgaaggctcgcaacaaccgtgccgccgcaatcaacaccattcctcactccaccggcgctgccaaggctatcggcaaggtcgttccgtccgtgaacggcaagctgcagggccacgcccagcgtatccaggttccggatggctccgtcaccgagctgaccaccgtcctgaacaaggaagtcaccgctgacgagatcaacgccgcattcaaggctgccttctcctccaccgacttctacggctacaacgaggatggcatcgtgtcttccgacatcatcggagacacccacggtggcgtgttcgatccgacccagaccgacgtcaacaccgttgacggcgtgaccatggctcgtaccgtttcttggtacgacaacgagtacggcttcacctgcaacatggtgcgcaccctgctgtacttcgctgagatctccgagtgaaccatggcggagcaatccgcacagttcactaagtagaacttggtacaagggctttcgtctcacggcgaaagcccttttgctaaccgacacaaatacgttttagagtgaatcgatatgggcaagaaaaagcatgagaagggcgccggctccacgccggcaacagtgcaactcgaacaagcgggaatcccattcaaaacatacgaatacgcacattcgaacgaccatatggatgacggttatggggttgaggccgccaccaaactgggcttcgatgaacatcaggtattcaaaacgcttatggccgacaccggctccgaacgtgtggtgggcgtggttccagtaagcgggcacatggatctgaaggcgctggccgcagcagtcggagccaagaaagccgctatggccgatccaaaagtcgccatgcgcgaatccgggtatgtggtgggaggcatctcaccactcggtcaacgtacgcatcacaaaaccgtgctcgacgaaagcgcgctgcaatatggcgaaatactactgtcgggaggcaaacgcggcttttcgatcggcatcaatcccaatgatctgctcaaggtgcttgacggcatagccgcacctatcggcacctggtaatcaccggtaatagaagccggtcagcaggctggtttcttacgaagctcactggggagcacgaaatgcatgttctccttaatggtttcgatggtggtcacatcatcgaaaccacgctgttccagcgcttcgataacgcctgacaccaattcgtcaggcacggatgctcccgacgaaatccccacggattcaacgccttcaaaccacgcaggatcaagctcggacgcatcatccacgcggtaggcctttccgtgaggaccattcggcacgccatcgaagcgcgtgttcagcccctcctgcgcaacctccatcagacgaacggaattcgacgaattcgccgaaccaacgatcaccacgcaatcagactgctcggcaaccaacttgaccgcggcctgccgattcgatgtggcatagcagatatcggaattcggaggcatctcaagccaggggaaacgctctttcaacgcagcgatcgtgcccgccgtctcatccacgctcaatgtggtctgcgaaagcagcaccaatttcgcatccgaagaaaactcgagcgaatcgacatccgattcatgttcgatgaggtgcacatgttccggggattcaccgaccacgccaacggcttcatcatggccgttgtgtccgatgtagatgatctcgtacccttctttgacgaaacgcaacacttcacggtgcactttgctcaccaaagggcatgtagcatcaacgatatgcatgccccgagctgaagcttcagccttcacctcaggagacacgccgtgcgcagaaaagacaatcggaattcccgcggaagccgcggcatcgggaacctcatccaattcctgtacgaacaccgcaccctgagccgacaattcctcaacgacatgcttgttgtgcacaatctgacggcgtacatacaccggcggcagaccatcattgcgagacgtattggcagctttgagaatcgtctgcacagtcagaatcgccctgtcaacgcccgcgcaaaagccacgtggatccgccagtacgatacgcttggtcatgatggccgcctttcgtcacttcgtgaaaacctcatcaatactaaagcatgggcggcacgccggagaaacggcatcgccatacggcataaaacaggtagactgtggtgttagcggtaacgctaccgttaccggaacatatccaacggcactatggagtgactatgacctgcatcaatctgcctgcccgcaccggacagcaattctccatctcccatggcgactatgaagccgtcatcaccgaactcggcgcaacaatgcgcaagctgacctataagggcgaagatctgacggtcgcccttggtccggacgatctggtgacctgctgccacggccagatcctcattccgttcccgaatcgcatcgagggtggcgagtacacgttcgaaggcaagacctattcgctgccgatcgatgagcatgaccgcaacaccgccatccacggctacggataccgctcgttctggaagctgatttcgcttgccgaagacgcagtgaccctcgcctggcgttcccccaacatggtcggctacccgtttgatctatatgtcaccgccacgtacagcctcgccgacgacggcatgcatctgaccgtcagcgcctacaataacggcgacacgaacgcgccgtgggctttggccattcacccgtggcttgccaacagcctcaacggctatggcgacgaaatcgacgagcacaacgccaagtgcagccttacgctaccggctcgcacgcatgtcaccgtagataaaaacctcattccgaccggcaccgagccggttgacggcaccaaatacgacctgcgcgaagacaccctacttaccgagcagccgttcgacgatgcatggaccgatctggagcatgccgaagacggttccgtcacggcagtgttcacccgcgccgatggcaagaaggtccgtgttggcggcgatgaaaccatcacttcgttccaggtgtgcaccggtaccaagttccccgcattccagcatcctgccggcgttgccgtggagccacagaccgcctacgccaacgcgttcaacacaggcaacgagctgatcgtgatcaagccgggcgaaaccaccagcacctcgctgttcctcggtatggccgagtaaacatgcgagtgagcgtgatcgagtgatccagtcggttaaaccggctgattccggtcatataaaaacccgacggataagtctaagtggccacctatcgaacaccggatttggcaaacgtctcgctcgtgtgcgataatcccgaaggcttattaatcgtaagtaaaggagtccaatcatgggcatgcgcggacgtaagcgcaaggatcgtcgtaagaaggccgccaatcacggcaagcgtccaaacgcctgatccctgccagcgtgaataacgctacagagcatcgaaaaccccgctgaatcgttatgatcggcggggttttctcatactctcatcggcttgctcaccgctctccacaacaatggtcgagcgttgcctcaaggcggtcgataagactctgcggagcatgctgcggacgcagatacgcgcgcatggccgcgatcaatgcccgttcacgctcgtcacagcaacgttcggggtcgaagcaatcaccggaggtgctaacgcgcacgctggtatgcgtcacctgtgtcacagtgccgtcctcgctggtggcgacagtggtgatatgccgttcgatcgattcactcatgctctgcccttccctgccgtggcatagccacgttccttcgcatagttggcaagttctcgtttcaactgcgtacgcgcgcgattgagacggctcatcaccgtaccgattttcacaccctgttcgtcagctacctgctggtatgacttgccatcaatcgcagcatcgatgaacacctgacggcgttccggcgaaagcttggcgagcgccgccatgatttcttcaggcgcataggcgtccaaatattcctgttccgccgatttgagctcttccgaggaatgttccgaagccgaataaatgtcccaatcgtcatattcaccggtggaatcgttggcccgctgcggtctgcgtttggctttggcatactggttgaaataggcattccgctcgatggtcgtcatccatgcggcgaaattcgttccctcctgaaaggagtcgaacgccttgaatccccgttcgaaagtatcctgaaccaaatcttgagcgtcgtcgggattgttggtaagcttcatcgcctgccggtacaacgcatcgaccacaggcatggcgagtttttcaaaacgcgtccttttgcttgccatggtttccgttcgtacttcagtcacagcttcattgtaatcacatcgacttccacatgccatgcacatagctgaaggtagaatggctgttcggtatccgaagaacagggagaacatgaaatatggctttgactctggcatcagcagcacgtctgctcaacgagcatggattgctgcgcgaaatcatccaaggagacgcctggacgcttgacgcgcagaccgtcaacggattcgacaagccattcggttcaatcacctacgacaccaggcaggtcgtatctggcacgctcctatgctgcaaaggccgtttcaaagcggaatatctcgatggcatcgatgatcgtggtcttgccgcatacgttgcggaaaacgacttctccacggcgacgaaagttccgggactcatcgtgaatgacgcgcgcaaagccatgagtctgctgtccgcggcattttatgggtacccacaggaccagctgaaagtcgtcggcattaccgggaccaagggaaaaaccactaccgcctacctcacccaggccatgctcaatggctgctccggcggcaaatgcgcattgttctcctccgtcgataattgccttgacggacatacctatgtcgagtccgatttgaccaccccggagtccatggatgcgttccgtatgatgcgcgaagccgctgataacggcatggaatacctggttatggaggtttcgtcgcaggcgtacaaagtcaatcgcgttttcggacttactttcgacgtcgccgcattcctcaatatcagcccggaccatatcagccccatcgagcatccgacattcgaggattacttccactgcaaacgccagattgtgaagaattgccgttccctggttctcggcacggcatgcgcacacgccgatcttattcgtcaggatgctgcaatcgccgatattcccgtcaccacgtttgcccttggtgaagcatcggccgcggatgtgaccgcatggccggaatccgccgaccatagccgattcgccattgcggtggaaggcgaacggatcggctctctcagcctgcaattggatggtgatttcaattatgcgaacgccgccgcggccattgccattgcgcatgccgttggattcgatttccacgaaaccgccgcgaaggaagcgctgcgcaatatggaaccggtacgtatcgccggtcgtatggagcatttccacgatacgaagtcaaataccatcgccatcgtcgattatgcgcacaattatgcttccgtaacggcgttgctcgactatgtcggccaacgctacggcaaggacgatcctgaggtcacgctggtcactggatccgcaggcaataaagcgtatgatcgcagatcggaaatcgtcagggccgcgcagaatcgcgtcaaccatctgattctcaccttcgaagacacggatgacgagcctgtcgaacacgtctgccaagacatgctcgacagtgtcaccaatcctgatctggatgcgaggatcattcttgatcgtacgaaagcagtggaatcgaccgtagcaatcgaccgcaggaatcctaaccgcctccacatcatccttatcatcggcaaaggcaacgagcgctggttcaaagaccacggcaaacatattcccttcgaaggcgacgaccatattgtgaaacgtatttttggacttgcctgacctgcagcaacagccaaccatcatcgagtaatcaccaaccataaggaacaatccaacaatcatgatcactcttgaattcaccgacgcagccaccatggaacagcaggctgtgcaggcgggtcttaccctgcccatcgaacagaccgcggtatgggccaaataccagaacaccattgacggacgtacgccgtggggtgcgtatgtggtgaagcaggacggcgctccaatcgcattcatcgcactcatcgattacgaaacccatggctaccactatttgaggtccgttcatggtcctgcttggcttgacaagccttccgcgcagctggaagcacaggttcgtgacctgcttgttgaggacgtacgcaaacgcgataaaaacgttgtgttcctgcgtatcgacttgtggaatttcgagggctcgttcccagtgctttccaccgttccttacaacgagaccgtgtatgtggacatcaccggtggcgatgaggcgattcttacacgcatgaagaagcgtggccgccgcgacgtgcgtaaggcgttgagggagagccccgccgtttgcgccgatgagaccgcgcaggcgatggctgatttttccgaatactacgaggtcatggttgacaccgccaaccgtgacggattctcccccgctccgatgagcgactatgtcgatatgatcagcaatcttggtcctgatcatgcacgcgtgttcgcggcacgtatcgacggcaaggtcgtggcatggtccatcgtcaccatcaacggcgatcacgcggtctattactatgcgtgcatgcgtacggaaatcatgcgccagcatgttcccgacaaactgatttacgttgtatgttgcgcacttggagagcagggctgcacagtgcttgatttgatgggcatcggcaacgatttcgcgccttcattgaagagtctgaacggattcaagacgaaattctccgagaatatcgtacaggtttcggcaggtcgtgatattccggtcaagaaggcattctatcgttcgctcacgctgctgcagtcgctgcgtcgcaaactgcgcaagtaataatcacgcctcacgacggatagcgcgaaatatcgtacgaaggaggatgcagcgaatcgatatcgctgcatcctcctttgcattgcatcacagatcgttggatcgatggatcgtcagcaacaaccgacgatccatcatcgccatgcatatatgcgattaccgcatatcttcagaagatgcagcatccgcatgctcaacttcgggagcatcagcatcttcatcttcagcaagatccggaccgacactgccgaaatcgttgatatcgaaatcaggattggcgtcggattcgaaatcgagatccgcctcgtcctgatccttacgcggttccggctcaacagcctcctggaagacacgttccgacttcggcttcttcaaatcgggattgactttctcttccagcatgagacgcgcatcgccagccgtagtgaagctaccgcaaatcagcacaccgtgaccatagccaacaccaagctcatcatcggcgtcaaccatattaacagcctcctgaatggcatccggcagttcaggaacacacgtaaccctttccgcaccaaacacgcgttcagcaaccgttttcaggtcttccgcgggcatcacacgatcacgccacgagttttcagtgacaaccacatggctcagtaatggttcgagcacgcccaaatactcttcgacctgcttgtctcccatcatggcgatcacgccgacgagttgctggaaatcgtaattttcctcaatcgcggcacgcaacgattctgccgcattcacattatgcccgccatccagaatgatcgttggcgatgtgcgaatctgctcgatgcggcctggaatcctcaccgtgctcaacgcctcagccacaagatcaccgtcaagcgcaccgttgacgggaatcaccacttccgccgcgcacagggccgcgagcgcattatgggcctgatgttcgccgaatttggcgatcggcacttccgcgtacgtgccattcggcgtacgcagggtcgcaacctgaccgccgactgccggaatgcgggtcacaacttccgcttcgatgccatccctcaccagattggcatggttctgcctcgccgcttcctcgataatcggcatgacggcctcttcatgcggttgacgcccgatgaccgcggtgcagcccggcttgataatgccgactttttcggatgcgatctgttccacggtattgccaagccatgccatatgatccatgtcgatcggtccgataatggccgcatcggcatcgagcacgttggtggcatcccagcggccgcccataccgacctccacgatggccacatcgaccggagcgtcggcgaacttccagatggccatggcggtgagcacttcgaagaagctcatttttggcttgtcgagttcttccatcttcatgtcgaccatggctacaaggtctttgatttgatcccaggtatcaacgaaatcgtcgtcggaaagctgctggccgtcgatggcgatgcgctcgttgacatgttcaagatgcggtgacgtgtataaaccggttcgcatgccgtaggcacggcagatcgcctcggccatgcgcgcggtagatcctttgccgttggttccggtgatgtgaatcacacggaacgactgctcgggatgtcccatgatgtcgaggatcatcttcatgcgttgcaggtcaagattggtggtattgcgctctgatgggcggctcatgatgtcgcgttcgacgtcgatcatgctttcattgttgcgattcggatgttcgaatgacatattctttcggattcctcccctaccttgggattgctcactcaatctcccttattctatgtgcttgcatgaacgttgcgcggcgcaaaaagttataggatggtttgcggtaattgcgtaagcatggacaaccatattcaggagatgtgatgaacgaagtcattaccgataaagacaaggagtatgaagccatggagcagtccagcgctcccggccctgatcaggcgatgagcgaccgtgtgaacaatcgttcgctgcgcccgcgttccgaggcgttcaaggagttcatgaccaccggttgggatgataatgagccggttattgaaccgttggagtcttcccattacattcaggctcgtcttgacacgctgggtaaggcttttcccggagagcgtattgtgatcccggccggtcagccgaaggcgcgcaacaacgactgcgattatgcgttccgtccggatacgacgttttcgtattacaccggtttgggtgaagactacgaagccggtgccgtgctggtgttgaatccggttgatcccgattctccggaggctgcggccggcaagacgcatgtgccggaattgtttgtggctccgcgtgcgaaccattacacgcaggactttttcatgaatgcccattatggcgaatattgggttggacctcgtgccggcttgcaggagatgactgcaatgaccggtattgagaccaatgacattgcgcagttggctgacgcactgagcaaggatgtcggttctgaagctggtgccgtgcgtgtgcgtgtgattcgcgaggctgatccgcagatcaccgaaatggtggaggatattcgcgaggcgaatggcttcgccgatccggatggcaatacgcatgccgatgacaagcttcatgagtttgccgccgaggctcgcatgtgcaaggacgaatatgagattcgtgaaatgcgcaaggccgttgccgcaaccaagcatggtttcgacaatattctgcgcaagctgccgtcgtcgctcgacaagcctcgttcggaacgtatgctggaaggcgcgttcaatgccatttcccgtgaggaaggcaatgaggtcggctacgatacgatcatcgcttccggcgctcatgcgccgattctgcattggatgcgtaacaccggtaccgtggagtccggcgatctgctgctgattgatgccggtgtggaagtcaatagcttgtatacggccgatatcacgcgcacgttcccgaccaacgggaagttcactgatttccagaaaaagctgtatcaggcggttttggactcccagcaggctggttttgaagctgccaagccgggtgccacgtattccgacattcatcatgcgtgcatgcgtgtgatcgccgagcgtctgcatgattggggcattcttccggtcgatgtcgaggagtcgctttctccggaaggacagcagcatcgccgttggctcgcctgtggtgtggcccatcatcttggtttggatgtgcatgattgcgctcaggcacgttatgagtcgtatcagggtgctgcgattcgtcctggcatgattttcacgattgagccgggtctgtatttccgtgaggatgatctgttgattccgccggagtatcgcggcatcggcattcgcgttgaggatgatgtactgatgactgaggatggtccggaatggatttccgccggcattccaaagcagatcgatgaggtcgaagagtggatggccagcatggctgccgaaggtgcaaaggcctgatatgccaacgcctgaattcattctcgagttacgcaagaaagtcggtcacgatctcctgtggctgatgggcgtctccggctatgttgaagacgagcaaggtcgtgtgctgcttggcaaacgttccgataccggcgagtgggccctggtgtatggcattaatgagcctggcgaggaacctgccgacacggtggcgcgtgaggtcaaggaagagactggcgtggatgttatcgtcaccgatttggtgtcggtgaagtcttcccgcaaggtgcttacgtatgcgaacggcgacaacaccatgtatatggatcacctgttcgtgtgcaagcccgatccgaatggtaatgccgaaccgttcgtaggtgacgaggaaagcctcaacgtgggttggttctcccctgatgacctgcctcagcccctggccgacaccacagtggaacgcatgggctacgtgcgtgagtacctcaagaacaaggcgaacggcgacgcacacgcgcaattctccttcaacggtgcgattcgctgaatacagtcacaattgaatatataaactaagagctggtgtgacgctcatgaaccgtcacaccagctcttgtgcatgtcaggaagccacgaaactcacttcggaatcaaattcctttggcgagcaactcgtgcagctgggcgcgatgttttcgctgttcacgtggatcaggcaccggcagcgatgccaacaacttctgcgtgtagggattctgcgggttattcataacctgatcggcatcaccatgttccacaatctcgcccttatgcatcaccataatgcgatcggccagcatatcgaccacggcaagatcatgggtgatgaacaggcatgcgaaacctatttccgcctgcagtttcttgaacagctccaacaccttcgcctgtaccgacacatccaatgcagaagtcggctcgtcggcgatcagcaggctcggcttaagcgccagcgctcgtgccaaggaggcacgctgacgctgaccgccggaaagctcatgcgggaaccggttcatatatgtacgcggcaactgcaccatttcgagcagatctcccacatagtcgctcgcttccgacacagacgagtactttttatgcacgatcagcggttctgccacattctccgcgatggtcatcagcggattgaatgaactacccggatcttggaacacaaaaccaatatcagcacgcttgggtttgaattgacgttccttgacaccgttcatttccacacccaacacgttcagggagccgccggacactttctgcaaacccgcgatggcacgaccggtagtggatttgccggaaccggattcgccgaccaatcccagcacttcggaacggtgaatagtgaaatcaataccattgaccgccttgaaatcaggctgcgtcaaatgcccaggataggtgatagtcagtcccttggcctcgacggcaatgggttggtcatgccaatccttgctgcgttcaatcaccttgccctgctcatcacgaacgaccagtttctgcccgatacgcggcacggccgcgagcaaccgcttggtgtaatcgtctttcggcgagtagaagatctgttcgacacttccctgctcgaccacatgacctcgatacatgaccaccacttcatcggcgatatcggcgatcacacccatattatgagtgataatcagcacggaggcgccgaattcgtcgcgggcaagacgcaacaagtcaagaatttctgcctgcacggtcacgtcgagtgcggtagtcggttcgtcagccagaatcagacctggattgagcaccaacgccatggcgatgacgatacgttgtttttggccgcccgagaactgatgcggatagtagtcaattcgagtttcggcatcaggaatgcctacttttttgaggatatccacggacttggcacgaagctccttcttgtctttcatgccgtgagcgcgaagtccctcttcgatttgccatccgatggtatacaccggattaagtaccgaattaggttcctggaacaccatggccgcttctgatcctcgcatacggcgcagatcttctccggaaagagacagtacgtcaagctgctcattgccttcacggttcgacagataaatcgcgccggaagtggttgccgtctccggcaacagcttgataatcgaacgtgcggtcacggattttccggaacctgattcgccaaccacacccaccacggttttgcgtgggatggtgaagctaatcttgtcgatggctttgatggatcctgcgtcggtcatgaaggaaacgctcagatccttgacttgcgcaagattggtttgttcgtcactcattgcgtcactcttcttccttggagccccattcggaggcggtaaatgacgggtcgcgatccgtaacggtcactggctgatcgctggctcccattggattcttggcggccgcgagctcggctatcacctcgttgcgaacgcccggcttctggctgggatcaaccgaagtatcttcgatggatccaaccacctcaccagcggatttgcgtgcacgcagacgcgggtcggcaaggtcattgagggattcgcccaccaaggtgatacccagaacaatcaatacgatggcgatacctgggaacactgcggtccaccaaatgcccgcggttacatccgacacggaacgattcagatcgtaaccccattcagcggctgcggtaggttcgatgccgaatccgaggaagcccaatcccgcaagagtcagaatcgcttcggacgagttcaacgtcagaataaccggtaacgttctggtggagttcttaagaaggtgcttggtcatgatgcgccatgtcgacgcgcccaccacgcgagcggaatcaacgtaagcggattccttgattcgaatgacctcggatcgaatggtacggaaatactgcggaatatagaccacggtgatggagatacccgaagcgagaatgccactccacagaccagactgaccgccggaaatcataatggccatcagaatcgcaagcagcagcgaggggaaagagtagatggcgtcggcgatcatgacaagcacacgatctacccaaccaccgaaatatccggaaaccaaaccgagcaatacacccgcgaaaatagaaagcagcacagcgatcacaatcgcaatgaccgcggtacgagagccccaaatcacacggctgaacacgtcataaccacctgcggtggtaccccaaatatgctcggatgagggtgctgcctgggccgggaatgaaactccattggcatctttgagctgcgcatagccgtacggtgcaattacgggcgcgaacaaggccacgagcaggaagaacgccgtgagcaacaggccggtaatcagcatgcctttctgccagccgaccgctacgcgaagctccttgatgatcggaatcttggcccagaacggagctttcctgttgactttgagatcgttcagacgagtgtcacccgggacggtgacgttatttgctgatgcagtcatgtcagtacctcactctcggatccaccaacgcggcgataacgtcaacgatgaagttgacgacggccacgatgatggcgatcagaatcacaatgccctgcacagctacgaagtcacgcgctttcagatattgggacaacatgaatccgagtcccttccattcgaaggtggtttcggtaagcaccgcgccggcgagcatcaatgcgatctgcatgcccataacggtgatgattggaataagagccggcctccatgcgtgcttgctgatcagacgcttttcggagacgccacgcgaacgcgcagcctcgacgtagccggaattgtaggtggaaatcacattggtacgcaccaaacgaataaacacgcctgcggtgagcaatcccaacgccagcgcaggaagcacggcgtgacgcaacacgtcggtaagcacgctcatatcacccagctgcagtgcatcgataatgtagaagccggtcggagagacgagccgggtgaactgcatttccgaagacaacgagcatcgaccggatgccggcaacacgttcagccaaatggcgaaaatgagtttgaggaccaatcccaagaagaacacgggggtggcgtagcacagaatggcaaaggttcgaatgcccgcatcggcagcgtgatcgcgtctgcacgcagctacacgacctaagccgatacctacgatcaaagcaacaatgagcgataggagcgccaactcgaaagtcgctgatccgtaatgaacaagaatgctgataaccggctgattatcagtcaatgtagtgccgagatccccatggagcaaacccccaaggtaatcgatatattgcacaataagaggacggtcgtagccggccgcatgaacacgcttttgcaactcgtcaggggtaagacgaccacccaatgccgcagaaataggatcgcctgtagctcgcatcacaaaaaacacgacggtgacgagaatgaaaacggttggaataatgagcaggaatcgagtcaggacgaaacggaaaaatccgcctgacaaatgattctttttggcttgtttcggcttcgcctcctgagagacggccggagctgctgtgtctgacacgcgatgctccttgataagaagcctgtacggctttgatttacaacaatatcgaatcactgcgccgtttcaggcagataattcgggaaatggggacctccggccatagaccggggatccccagtggttttctatgcaggctgcggcaggtcatgccgcacatccgcacacatcacgccttggtgacagatgcgaaacggaaacggaaggaagcgtcgagcacaacacccttcacgttggcgccggtaactgcaacctgcgcaccctgcagcagcgggatggtggacaggtcttcggtttcaagggtctgaatcttcttgagcagatcctcacgggcgctttcgtcggtttcaccagcctgctccataatcaaatcgttgatttcggagttggagtaagcgttgttcacgaagttgccgtcacggaagaacggagacagatagttatccgggtcggagtaatccgggaaccagccgagctggtagaccgggtaggatccatcagaatcctcggtaacaacacggtctttgttgtactgggtccattcggtggactgcaggtcgaccttgaacagaccaccctcctcgagctgagccttgagagccgcatactcgtcggcggaagaggatccatagtggtccggattgtactgcagcttgagctcaaccggagtggaaacgcctgcgtcctcaagaaccttcttggccttgtcggcgctcggcttgccgttgccgtcaccatacgcggtcttgaaggtgtcttcgtggccaactaaaccgtccggaatgtaggagtacatcggggtgtacgtgtccttatagaccttggtcgccaactcctcgcggtcgatgaggttagcgacggcctgacgcacagccttggccttgtcggcattcggttcgtcggacttggtgccgtacggctggatgttgaagttgaagaccaggaagcgttcctcaccgcccggacccttgacgaccttgaccttggagtccttggacagatcatcgatgtcggtcggagtcagagaacggtaggccacgtcgacctgtccctgctgcacggccatcttcaggttggaagaatcggcaaagtacttgacctgaacagtgctgttcttggccggggtcagaccctgataagagtcgttcttggagtagcctgcaacctcattggccttgtaggaggtcagaatgtacggaccggcgaaagccttctccttgatgatggtgtcagcatcagtgagcttgtcggcggagaagacctcttcgtcgacaatcggaccggccgggctggaaagcacctgcttgagggtcacatcgttcttgactttggaatggaacaccacagtggtgtcatctggcgtatcgatggattcgatgttggccagcaacgaactcggaccattctcatcgttgatcgtgttgacacggtcgaaggagaacttgacatcggacgaagtcaggtcgtgaccattggcgaacttcaggccagacttgatcttaacggtgaactcagtgccgtcgtcactccaggtaccgtcatccgcagcgatgtccggagacagttcagaggtgttgtagtcctgcgcatacaggaacgggaacacgttgatttgaacggcataggaaccgttgtcataggagccggcagggtcaacgctagtaaccttgtccgtggtgccgacggtaatgacatccgcatcccccgatgcggaaccgctatcctttacgccgccgcatgccgcgagcgaggccagtgcggcaatcgagacagccgcagccataatcttcttgtgattcactatggaatcctttctcttcctgctgtcgtaattggtactccaaaacgacgtgccataagggtagggcacactttgttagcggaacatttcacggaagctcattttgcgacatcaccctttctcgatccaacgaaaactcagcaatcacaacggttttgcagttaatttttttccgaaaagagtgtgtcaaataatgagacagcgaatcccatattgagaatcgacggtcctcgtgacacgccgaaagacggaacttgcatcaactaattaacggcgttaatatatcaactagttcaacgaagggtccgtgcactggcgcaaggaggtgtcatgagtagttacagcgctcagcaatcatcgatttcagaaaacaatcgttccagaatcctgcaatacctctaccacaacggcatcagctcacgtgcgcaaatcgccaaagccatcgaactcacacccgcggccattacgaaaattaccgcaaaactactgttccgagacgttatcgaagaaaccggagacatggaaggcgataagaatcgtcgttccatcggcctgaatctcaattgcgcgaaataccatgtcgtcggcgtgaaattcgcacgaagcctggtgcagatcgcagtgttcgacctgaaatgcaatcgtatttccctcaccgacctgcccaccgttgacgaggagcatattcccgaaacggtagaacagatccgggccaccgtacgacagctcattgcggacgattcgagcattgtagccgtcggcatggccgttcccggtccgtatctggtggaggaaggtcgcaccgcgctcgtctcatccatgcagggttggcggcaggtcaacttcatcaaggagttcagcgaagcgttcaacgtacccgtattcgttgaacaggacgcacgcgcaggcgccttggcgcagttcctgttcaacccggaactgtccgagggatcgctcgcctactatctgcttggcgagggcatcggcctcggcatcatcgacaatggttcgatctattacggcgcgcacggcacggccaccgaaatcggacacatctccgttgacgtcaacggcaagccttgcgactgcggcaatatcgggtgcctggaacgttactgctcagccaacgcaatccacgaacggctcaacgaacagccgagcattgtgcccggatgcgaggcaatgacgcacgcgcaggcatgcaccgcgctgttcgccaaagctgcggcaggagacaaagcggccatggatctgacttccgaggtcgctcgatatatcggatatggcgcggtcaatatcatcaacgccttcaatccgacgcatatcgtactcggcgacatcatctcccaagccggacagcccttgcttgacgaggtcaaaaaagtcgttcgggaacgtaccatccccgaagtcgggcacgataccaaaatcaccttgtccaacctcccaacggacgccaccgtcagcggtgccgcggccgtggccatcaccaattttctggaacatccttcgatgttctttgacgtcgcatagcacgccacaaccaaagaaaggaacaccatgtccaagccaatcgtcatttctctcggcgaaatcctgtgggatatgctccccaccggcaagcgtgccggcggcgcacccgtcaatttcgcataccatgcgtcccagaacggcgcgaaaagcttcgccatcagcgccgtcggcaacgacgagctgggtgccgaactgctctccgacgctcacaaggccggcatcaacacgctggtgcagaccaacgaatacccgaccggcacggttgacgtggccctgaccaacggcattccggaatacaccatcgtcgaaaacgtggcttgggaccacatcaagctcaccgacgagctcgtcgaagccgtgtccaaggccgacgccgtctgcttcggcaccttgggtctgcgctcccccgaatcccacgacaccatcgtcgaactgctcaagcacaccaaggaaggcgctctgaagttcttcgacatcaacctgcgtgcgaacttctactccaacgaactcatcgaagaactgctcggctatgcgaacatcttcaagatcaacgacgaagagctgatcatgatgcgcgacatgttctccattcctgagtgcaacgacgaagaggcatgcaagtggttcatcgaccgcttcgaccttgagtacatcattctgaccggcggcgccacgttcagcaccatcaccgccaagaatggcgaggtttccacgctgctgacccctcacgtcgaggttgccgataccgttggtgcaggcgactccttctccggttccttcaccggcaagctgctgagcggcgcaccgctcaaggaagcgcatcgtgcggctgtgaacaccgccgcctacgtgtgcaccaaggaaggcggctggccaacctaccctgcggaaggcgttccggattatctcgccgaagccggcaagtaagcccagattttcctttcatcatcatcaacgaggccatgtctgccatcatggcctcgtttttcatacccatattcaatccgcaattggtgcaatcacgattgtcacgatatacgcacctcaacgaagaatgatgccatgaacgacaccagcaacaccacagacgccgcttcacaatccgatattccgcagtcagtttccgatttcatgcggcatatcaccgacttgtgtggcggcgaacacgcaagatgggccgaaaacttcaacgcaggattcgccaatacactcaccaccaccgtgagacggcatgatgacggcacgacgtttctgctgacgggagacatacctgccatgtggctgcgcgactcctcagcgcaattccgaccatatctcgccgtagccgtagacgatcccgagctcaccgcgcttattaccgggcttgttcggcagcaattcaggttcatcaatatcgatccatacgcaaacgcgttcaacgaaacacccagcggcgctacctgggatccgaacgatcagaccgattcgttcggaccatggctgtgggaacgcaaatacgaggtggactccctgtgctaccccattcagctggcgtggctgttgtatcgcaatacaggaaccaccagccatttcgatgatgcgtttgtaagcggcatccgtcgaatccttgacgtgttcgaaaccgagcttgaccattcgaattcgcattaccgcttcttccgtccgaacgacgatccgcgcgacagcgtgcccaaccatggtgccggaggaccttttgccgtcaccggcatgacatggtccggattccgccccagcgacgacgcctgcgtctacccatatctcgtgccgtccaacatgttcgccagcgtggtcatgggatatgtgcaaaggattttcatcgacgtgcttgacgatcgtgaaatcgccggtcgtgccgcggcgctgcagcattccatcgatgatggtcttgcccatcacgcaaccatccgcaatgcggccggaaacgctatctacgcatacgaagtggacggtctcggcaacgcgttgcttatggatgacagcaatgtgccgaatcttatgtcggcaccttatctcggattctgcgaagcggacgatccgctgtatctcgaaacgcgcaatactttgctgagtcaggagaatccttactatttcgagggtgactatgcacatgccatcggttctccgcatacgccagaaggttatgtttggccgatcgccatggccatgcaaggattgacaagccacgccaaagccgaaaaagaacgtattcttgatcaacttgtcgccgccgacgccggcacgcatctcatgcatgaaagctttgacgcgaacgacccgaactcctatacccgtccgtggttcagctgggccaatatgatgttctgtgaattggtcatggattatttcggtattcacgtcaagctgtgagtggctatcagtttaagctttggcttcgctcacagcgcaagaattacggtagatgatttgcacttattgacattccatgatatcttgaaaagtccggtcttgcaccgggtgcttgataattcaagattggggatgatcggtttcgacggtgacctgttcgtcgcagggaagcgtgccgagaacgtagggtccgctcgtggatgccccctacaaaagaataagtgctaaatctaaccgcactgagttcgctctcgctgcctgagcttcgcgccaggattaaccagtgagcagccgctccgttcactccttctcgtctttggaaggatgctgagcgtcgtttagaagacttgctttgtcgactgagccacagggccggcaagggacttttactgtagatatgcccgccatcagttgtctgcgatatcgatgggagcagaaaaaccgccgcacggccagcagactacgcacgtagaagactgagggttcggttatcggaccggggttcaattccccgcatctccacgagttgaaagccgccagaaatggcggcttttcttgtatttccaacggttttcgaagattcctgggtttactccaaattacccccgatgtgccggatgttctaaaaaaatgtgggcaaaaatccctcctccggcttgcttaatctcttccaaattccatctgtctaccaccctaaacagcatgcaaggtacgtttttaggtactcctcttcacaagacaacctcgtcaaatcaacatacgaaaaatccagctctcccccatcacaaatcatcagaatcccaccatcaaattccgtgtgtcgatttgcattaaccgcttaagtggttaacatagttaatacatcaacctagttatcacgtcacagcagacgacgtcaaggaaggacttgatcgatgacctgcacttactctcccgaagcctacgtgttcggctccgaagaaaaccatgccctgctcgaggcggaaaccaacgagctcctgcatttcggacacaatttccccgccccgcagggtggctcctactggctggacgataccggcaatccggatctgacccaaaacatccacacgtggatcacctgccgcatggcgcacgtgtattccttggggttcctgcacggcgagccgggcgccgcagaactggttgacaaggccatcgccggcctgcgcggtccgctgcatgacgatgaaaacggcggatggtatccgtccatttccgcagacggctccacccatgaagcaggcaaggtctgctacgcccacgctttcgtgattcttgccgccacttccgccaagcttatcggccgcccggacgcggacgagctgctcgaagaggctctggcaacctacgacaagcatttctgggatgacgagatcggtctggccgtcgatacttggaacacggaattcaccgagcttgactcctatcgcggcatcaatgccaatatgcacaccaccgaagcattccttgccgttgccgatgtgaccggaaacgaggaataccgcgagcgcgctggtcgtatcatcgatcatgtggtcggatgggcagccaacaataactggcatattcctgagcatttcaccgccgattggcagccggatctcgaatgcaaccatgacaagccggatgaccagttcaagccgtacggcgccactccgggccatggcatcgagtgggcacgtctcatcacccagtatgcgttgagctccaagcagcgttccgaagaaggcaagcagcagcttatcgaagccgccgagaacctgttcgctcaggcacttgccgacgcctggaacgccgaaggcaccatcggtttggcttacaccaccgattggaacggcaagcccgttgtcaccgaccgcatgcactggacgcttgccgaatccgtgaacacctcggccacactggccaccgtcaccggcaagcaggtgtacaaggattggtatgcgaccttctggaagtacattgacgaatacctgatcgaccataagaacggttcttggttccaccagctgaacaaagacaacgaggtcatcggtaccgtctggccgggcaagtccgacctgtaccatgccacgcagtgcacgctgattccgcgtctcgatcccgcggtctccgtcgctcctgcgttgaaggccaatccgaacgcctgacggcctccaataatcgaacttctccttctctcctcctattcgcgaagaaccccggtaccgcaaggcaaccggggttcttcgtatatcaacgcgactatttgatgattggacgcaacggcgcagacacgtcgacgttatgcttgtctccgatcacattcggatcattgatgattttatcgacgacagctttcttcaacttgaggccggatgaatcgccccatacgatcacacggtctcccccattgatttccgtggtgatggaatcctgggtttcggcagtcaccttggtgatggagttgcgcatcgattccggcaatgagctgaggatcttcaacgcctccttgatggaacgattgctcagacttgtttcgacatccttcacttcaatgacgggaattccttccacggaagctccgctgacggaattcaatatacgccccttgctgtcgaccgcggtcatgctgtcctcgcctgtcttgagcatcgcagcaggcttttgcgccttgatggtcacttcaagggagtcgggcagttttttcttggattgcgcggaagtgactcccggaatctccttgattttcttttccacgtcattgttcgacacgagaagaatcgattttcctgcttgctggcccgcaatatccaacacctgagactcactcacccattcgttggcgccgacaacgctaatattgccggactcgagacggaataccgatgagaagaaaaacagccataccaacgcgcctgcaacaacaatgacagcagcggaaacgcacgcgcgcatggcgacgacacgcgcgttcgccttgcgtcgttctttcagacgcgcactgaaatcaaccaccttcgggcgcgttaccacgcccaacgtgcctatggtttcctccaatgtcttcgaaacgaaatcctcgccggcaagattgcgcgcgtccacgaaatcgcctgatctcgaacgactcacgctgcctttgttgccactctcaaccgtattttcctgcgtcttcttcccggaagaagacgcgcgtcccgctccaccagcgacggaacggcctttcggctgaacctgctttccggcatcgctgtgtttccggctttggatggttctaccatgcgacgtctgattttcaggcgtcgttgcggaaccatccgaacccgtacctgaactgatgacccttcgcgtcatcagccctcacaatcccaacgatgagcctgaagggagtgcagcatcacctcgtccatctgtgtgatgtcgcctgcgccaacagtgaagatgacatcgccatgatgagcacgcatcgtcatcatctgtgccgcggtatgcatatcctccactccgcgaatccaatcctcggcaggcgtgtggtcaagcttaagcgcctcgtccacaatggtggcggagctaatcgtcggatagtcctcctgcttttcacgtgcggggaaaatgccggtgacgatcacatcatccgccttggccaatgcttcagcgaattcactcgcaaagaacatggtccgggagaacaggtgcggctggaagatcacgcgaatcaccgactgcgggtacctgcggcgcgccgcatccagcaatgccgaaatctccgtaggatgatgcgcgtaatcatcaacgacagtcacttggccgaccataccacgcacttggaaacgacgggcagctccaaggaacgacgtggcggcttgggcagcgttctcgacatcgacgcccaacaacgcagccgcaataatcgcagcggaggcattgcgcgcgttgtgaatgcctggaacggtaagcgtcaccggaaccatacgctcatgttcgcccaacaatcccgcgggcatgtgtaaggtgaaatgttcggcaccgctttgcgcgctttcgctttccgattcgatatgcacgaacgcggcaccgttcaaatcacccaacgaaaccgtatcctgcgtcgcatacacgaccgtacgcttggccgtctgcggatcgagagcacgcaataccgcaagattgccttcatcatcgccgcacatcaccaccgatttttcggcatgctgaacatgattgacaaaagccgcacgatagttttcctgcgtgccgtaatggtcgagatgatcggcttcggagttggtgacaatggcgatttccggatgatacttggcaaagctgccatcggattcgtccgcttccgccacaagaacgtcgcccttaccagcatggcctccgtcaatcgtcacaccatccttgccttggatggatccgccgatggcatagcttggatcggccagatttccctcaccggcatgggtgaggatatgggccagcatggaactggtcgtggttttgccatgagctcctgcgaccgtcaccgcacgttttgcgttcatcagcaatgcgagaatgtcgctgcggtgcacgatgcgttcgcctgcttcgtatgctgcgacgatttccggattgtcggatttgatggcgctggagaatacgacggtatgtttgccttcgacgttttctgcgcgctgcccgaattcgacggtaatgccgattccctgcagacgatcggttttggcgctgggttcacgatctgaaccgtccacttcaacgccctgttcgtgcagcatttcagcgagcacgctcatgcccgcgcctccaatgccgatgaaatgggttgcccccaaatcattcacgccttcctgcggactgaacgacgcatgggttggatcaagaacgatggtaccggcttcacgctggttgtcagacacgactgctcctcttgcatgttttttctagcttgttccattatggtctcacccatggtctcgcatatggccgatcatgggtgggattttggaatgcgacgaacgcacctgccgtcgccgcagcctacttttcgtcaatcatggaaagcacgcgcttggccatgacttcggcggcatctcgaataccgtattgccaggcgttgtcgccatacttggcaagcagatccgaatcggcaagcagcttcggcacatgctgtttgacccattcggcggtgaattcgcgatcagccaccatcagaccgccttccgcatcgacgacaggctgggcgttgaatcgctgctcgccgttgccgattggcagcggaacataaatcgcggggagtcccaaagccgtcaattccgatacggtgccggccccagagcgacagataatcaggtcggcgcaagcgaatgcgagatcaatacgttccaaatacggcgcaacacgataatcgccatcattgccatggtccgggccaagctcgccaagcacctgttcgccggcgctcaccgacaccaatgaacgcacttcatcatctttgcctttcccagtcagatgaatcacctgggcgtgttccagcagctccctagcggaagccgccaccgcacggttcacgttcaccgcgcccagcgaccctccagtcaccaccaccagtggacggttcggatcgacaccgagttgcgctgcggccgattgtcttgtggcaatgcggtcatgttccatgccatgggctatcgctgcgatttcggcacgcaatggcaatcccacacgctcggcttcaacacccttgcgtggcttcaagccggtttgcgcataggcggtgccaatcatggacgcccagcgagctcccaatttgttggccattccggcacgggcattctgctcatgcatcgcgatcggaatgcccatcttgtgcgctgccgcatatacgggagcggacgtgtatccgccgaagccgacaaccacctgcgcctcatgacgggtgagaatgtcacggactttggccgtttcggccttccactgcgcgggaaacttcagcgctgccatattgggcctgcgtgggaaaggaaccttctcaatggtttccagttcgaaaccggcctggggaaccaaatcatgttccaagccgacgacagtgcccaccactgcgatatcggcgtctggttcaagctcgcgaatcacatgcgccacggcgagcagaggattgacatgacctgccgtaccaccgccggcaagaacgatatgcttctgattgctcatagtgtacgagcttagcccacggcaccccagtacgccgcgcgccataccgtcgcacacgcggatgctcacatttcatctacgtttgcacaccgcaatacgcggtagcgtatgctgcggtcgcagccgacactcagacccgctgcatctccgcttggatctgcggctgctgcttcatcatgctgatggttacgcctgcagcgcccaaacacagaatcaacgacgaaccgcccgcggacacaaacggcaatggcacacccatcaccggaaacaatcccaccacaacgccgatgttcacgaatgcctggccgacgatccacacggtaatgctggccaataccaaagtgatgtacctgtcctgcgattgcaaagccaccacgagcatgcaccatccaagcaccaagaacagcagaatgacgagagaggcgcctacaaagcccgtttcctcaccgatgatggcgaaaatgaaatcgttgtgcgcttccggcagatatccccatttttctccggaattgccgatgcccactccaagcaaacctccggaggccatggcgtatttgccatgcaccgcctgatagcagaccccctgcatgtcggatgcggagcaagtttggtatgtggccatgatacggctgagtcggttcggactggtgataacgagtccgccaaccaaaaccgcaccgccgcatgccacgatagccaaccatttgccaggaaaatctcccaacagcaacgcggcacctgcgatcgcgaacagaatcatggccgtgccaagatccttgccactcacaaccaacagcaatgcaagaccaagccacgcaatcaacttgagatatgccttatatggtccgactttgtttatctgcttctgcgcgtagatcagttctcgcggcagccatatgcacaacgcaagcttaacgacttcggcgggctggaaggtaaatccaaaaaggccgatccaacctttgttgccttggacatcgatacccaagggggtaaacgtcagcgactgcaaaagcaaagcgataatcaggaagacgaaactgaatttcctgatgagctccgccggaatcatcatgcaggcaacacccacgataagtccaagaacgcagaatcccccctgtttcagtgcttgggaccacggagactgtccgttggcaatcatgtttaccgaagagctggaaaacaccatgatcacaccgaaaatggtgagaatgatcaccgcggttctgaacccatgaaaacaccaaatcggattaagcagacttcgcagaccgacataaccatgaaaatcgtcgacctgctttccgacggcggccttctttttctgacgactactatcaacctgcctggttttaggcttttccatgctcgttcacccaacgctgagcctgctgtgcgaactggtttccacgatcggcatacgacttgaactgatccatcgacgcacatgcaggcgccatcagcaccacatcaccggattggacatactcgcccgcggcatcaaccgcccgttccataatgaccccattatccgccggatcgatgatggtcagaggaatgttgggagcgctcgtcttgaacgcatccagcatcggctgctgatccctgccgatgatgaccgcggctttgatggtatgcgcctgatcagccaccaattgctcgaaactgctgcctttggccagtcctccggcaatccacaccacggatttatcggcaaaactattgagcgaggccttggccgcatgcgcgttggtcgccttggagtcgtcaacgaaacgaatggctcccccatccgccgtagtggcggtggcgacggtctggatacggtggccacctggagtgaactgcttcagggatgcgatcgccttctccttatccgcgccaagtcccaacaccaacgccaatgcggtcaatgcgtcggcgagcaaatgcggatataccgtgccatccggctcggtcagatgtgtgaactcggcaactttggcaacctgttcaggcttgcccgcctcaccgcccgcgatgccggacatgtcgacgatccagccgtccttcacgccaatctggccatcttgcggttccgacaatgtgaatccaaccctacggcagccttccgcggtttcggctgcgaatgccagcttggtcacgcgctcatcatccgcgttgtacaccaacgccttcttggcatggtggaagaccttcgctttatcggacgcgtaattgtcgataccgccatgccaatcaagatggtcgtcagcgatattggtgatcgccgcgcaatccaactcaagagaatcggtgaaatgcaattggaaagaactgagctcaacacacagcacatcatttgccggatcgactgcggcatgggacaccgctttgccgatattgccgacagcaggtgcggtcaaaccgcaagccgtcaacatctccgaagtcatttccgtagtggaggtcttgccattggtaccggtgatgccaatccattgcgcaggatgcccagtggcatcgcaatccacccgcagctgccaggcaagctcgacctcgctcatcaccggaatgccacgacgttgcgcttcgagaatgaacggggtcctcggattgaataccggagaagtcatcaccaggtcgacatgatcccaatcaatgtggtcgaaagagtgcagatcggcatcaggcttcttctcatccacgcccaacaccttttcggcgcgggaacccaacacctccatcatgctctggccagaaactccaagacccgccacaatcgcggtcttaccgctcatatccatatccatcatccttcgatcgtcagaacctcatacgccttaatatcacagtcatattgcgttcattcgcaacggcaacagaccgagcatcgactgtcacaagccggaacgggcaacccaatcgccatagaaaagcaccaaggcgaccagcacgaacagcagttcaatcatccagaagcgaatcacaaccttgacttcgggccatcccttcaattcgaaatgatggtggatcggagccatcttgaacacacgcttatgcgtcatcttgaaatagccgacctgaatgacatcgctcaacgtttccatgacgaacaggccgccgagaataatcgcgaggaattccgtatgcgtggcgatggacatggcagcgaacaggccgccaagcgccaacgaaccggtatctcccatgaaaattgaagccggattggagttgtaccacaggaacccgaagcatgctaccgccgcgcaagccgcgataatggtcagatcaagtggatcagataccgcgtaggtaaagccctcatgccccgatcccttaaggtggtagaactcccaaaaagcgatcaccgcatatcccatgaacgcaatcatcgaagagccagctgccaaaccgtcaagaccatcagtcagattgatggcattggtccacgcggtcatcaggaagttcacccaaatcacgaacagcacgatagccacgaccttacccgcgaattcgaaactgaagaacggctcctcaatgaagctcatgccggcctgggcactggggaaaccggaattcgtaggcagaatcaacgccagcaccgcatatatggtagccagaatgaactgaccgatgaacttgcccttaaccgtcaatccctcgctctgcttcttacgaaccttcgcgaaatcatcaataaaaccaagcaatcccatcgacaacatggcaaacagcaccagcaccgcagaccacgacggagtctcaccccgcgtgacgaagcggtacagcgccgacgagccccagcccaacacaaccgccaaattgatgaccacgccacccaacgtaggcgtgccacgcttgactagatgggatttcggaccatcctgacgtatgtattgcccataattcagcttgtgcaccaaacgaatcagcagcggggtgcccacgatcgtcacaaccagcgacaccacaattccgatgatgagcgaaatcacctgatgttctccgtttcagtcagacattcttcagataacgtcgtttattcgattattcgaatcttgccaaatattcttgttctattgtgcagccagggcctgccaacgttcggccaaagcgctcaagccggaagcgtgggagcccttaagcagcaccacagcgcccggatgttccacggcgagttgcgtcaccagacgatcggcctcgtcaatgtcgtgcacccaatcaatatgggaagcacatcccgcagcggatgcaccttcagccatggcaccggccagagcgtccaaagaggcatcggatgtgctgccgaccgtcagcaacgcgtcaacgtcgccttccaccgcataccggccgatgccagcatgcaaatccttttcatccggaccaagctcaagcatggcacccaacaccgcaatacggaacggttgggtctcagcacccgccttccaacgcaacaatccgtcaagccccgccttcatggaatcgggattggcattaaacgaatcgtcgatcaaggtgaacgatgtttcaggcttgtgcaccgtggaaacagccatacgatgaggactgatggccgtgacgtcagacagcgcggacgcgacctcatccatcgacatacccaaatgcatcgctaccgaagcagccgccaacgcattcataacgttatgctgaccgcaaatgcccagagtgacctcggcatgctcgccatcaccattgtccaaaatgaagctcggatggtccaattcgtcgcaatgcacatgttgcgcgctgattgccggcttgccgtcattgttctgcggaagtccgaaccacatcacgtcgcccggagcgatggcgctcatcgcagccacatgctcgtcattcgcgttcagtacggaaagaccacctggaacaagaccacggatgatttccgatttggcttgtgcgatgcgttccggcgagccgaattcccctagatgcgcgacgccgactttcaacacgaccgcaatatccggcggcaccagcgacgtcaaattcgcgatttccccaacatgattggcacccatttccgcaaccagaaagcgagtttccgcatgtactttgagcgaagtcagcggcagtccgatttcattgttgaacgatccgaccggcgcaatcgtcggtcctatgtgcgccagcaacgccttcatgagatccttggtagtggtttttccgacggaaccggtgatgccaatcaccgtaaacggcgtttccaacgcacgccggcgttcgatattgtgcttggccaacgcgcccaaggcaagcaccgtatcttccaccacgatctgaggcactccggcaccgtcgatctcatggtcgactattgcggcaacagcgccctgagcgcctaccttcgacacataatcgtggccatccacgcgttctccggcaatcgccacgaataccgatccttcaacaatctgtcgtgaatcagtgaatgtgctggtggccacaggcgtatcaatcgccgcggtgccggcaatcagccgtccctgaaccgcctgggcgatttcctccaagctcattggcatcatggtcgggctgctcactctgatttctcctctgtgttgatgtactgcatattgttcacgttgtttacgattatcactattcgacgtccgcatccgttccgatcgagactagttcagatctcgagatacacgcaatgcgcttttaatattggctttacgtacgccggccgcaagcaccatggcgatggacaatgacaacgcgctgctgtccgtctgcccgtacgcctccgtcgcttgcgctgcgagcgcatcggattcctgcgtacgacctgcgatgtgggtctgcttgccgacagtgcatccaaaccgtgcgaccgacttgacgatctcagcctcgctgagacccttgtcgtcgcagccaagcacatcaacattcaccgactgcaacgcatcgtcattcaacgtttcctcgctgagcgcaaggatcacagcggcggcgccgtcttcggcgcacacagccatcgtacgctgcacgtcaagaatcgacaatggatagttcagatcaaggaatcgttccaacgattgcgaattgccggcactaatcacgccgaccggattgccgagcatgtgcaggaaatccgcgagatccctcacaccctgttccaccgtttgcgtattgctgccagccacggcgaacaccgccagcgaatcggatgggctgcccgccatctcgctggcaagcttgcccaactgttgcgcagtcggttcggcataaatcaaaggaatctgaacgccatccgtttttcctcgcaacgcatgcggcaccaccgcaccatacgcaccaagcgcttgcacctgccgtaactgttgctcatccacctgcatggacggcatgaacaacgctcccggccgcaccgaatcgatgtcgtcggcaatggacgtgaccgtcacttcggtagcgaacgcgggatcaaggtcaaagccatatctgctggcaagcagacccaacgtcattcgcctattcatggattcgctgaccgcgctcatctttccgcccctccgttcttcatgctcacacactcaccaagtcactggaatagcatcagttcgcggacttgacgccggcacttcgtacttctgcataaggaattcaccaatctccgcagtgaccgggcctgccgtcagaccaccataaacgccttgcggatctttcaacaccaccgtaacgacgaaacgaggattatccgcaggaataatcgcagaataatcgctgataatcgacgacagacgtccgtccgcaccggcaacttccgcggtaccggactttgccgcgacacggtaaccatccactttgacgaactgggaatagtggtcggacacggattccatggcattcatcacctgtgaggccacctgctcgtcaatcacgcgcgtcgcttcgccttcaggcttctgctcttcggaatgcccttcggcatcgctgatcgccttgatgatgcgctgcggctttttgacgcccttgttggcgatcacggcaaccgcgttcgtcaactggagcgcattggtcgtatacgcctggccgaacagcacggtgttctgggttcgcagatcccattgatcggccgaatacagcagaccatccgcttctccgggaagaccaagcccattgtcttgtccgataccgaatttgctgatgaactcatatcgctgctcgttagacatcttctccgcggcgatgatcatgccgacattcgacgattgctcgagaatgcctgccagcgtccaatgctcatcgccgtgggtcgtcgcatcgctgtaggtctgcccgttcgtcgtaatgtggtccggcaccgtgaatttatccgatgcctggtgcaatccaagctgaatcatgcctgacatggtgaaaaccttgccgatggaaccgggttcaaacgtttcgctgacggccctggaaaccgtcattttcgcctggtcgctgccggcttcgatttcgtcgctatcggcgagcgcgagaatgtcccctgtttgtgtgtcctgcaccacggcgactcccggtgaactatatttcgtgcagctttccttcagcactttttcgacgtaccactgcacgtcatggtcgatggtcagtgtgacattggagccgttgaccgcgtcttttgattcggtcatggttccggggatttcgacgccgttgttgccttgttggtagacttggtacccgtcttcgcctgtcaacgtcttgttttccatctgttcgatgcccgctacgcctttgccttcaccgtcgacacctcccagcagtgcgcccatcagggttccgttggaatagatgcgctcgttgctgagttccgcgtagacgataccgcccagattgagtttggagatcttgcgcttaacggccggcgtcacatcttttttgagtaccgcatattggcctgttcccgaaagcatggcacccaattcggtggcgtccatgtccagtaccggagcgaggagtctagctaccgccgcagctccggtagcacctaccggcttgccatcgatctgatggcagttgtctccggtctgtttggtgcaggttgtgggagtgaaggcctgtgcttcctcggggttgccgatgatggtgtagcgctccacgctttgcgcgagaatcgagccgttcgtgtccatgattttgccgcgccgtgccttcaaagtcacggtaatcgtgcggctttgcgccgcggcctgcgccatggttttgccattgatcaactggatgttggccaattgaataaggcaagccgtgcccatcaacgccagaatgacgccgatggccatggttttcgtaagcagtttcttgtggaaacgtgcgtaagtgcggtgaaaaggattcactgagcgtcgtctccgcttggctggtagccgttcagatcaatcgttagagcgcctttttggggcaccatgcccatttcctcggccttgctcggcagcgaggcttcaagttcgtcaagcttggcctggtcatcttccacgtcttgggtcaggcgggtaatgttcgactcaatctggttcgcctcgaaggaatgctgcaccatttgggtacgcagcgttaaggatcccagaagacatccgccgaggaacaccacggcgataaccagatgcaacaatggagtgcttctggtgcgcgtccatgtgatgagctgttcgaatcctcgcttgacgctgttgccttcggcccgcgttcctttgacgacgtgcaattcagggcgagtggtgccagcggtttcggtttggtcccggcgtcctgcgggagccgcgtttgatgcgatcgttcttggtgcggccacgttcagcccctccttccttgtcgtttcatgcttgcgtaatcattgccttggtcgaatcgttttcgccagcgttcaggaattggtctggtcagttccactgcgcgcagtcgcacagaggccgaccttggattcatggcgatttcttcctcggccgctttgatggcgcctcgcgtcagttctttgaagaacggcatcatatccgggggtattaccggcatatctgcgggcacgtcagctttcagaccttgattcataaatgttttgacggtcttgtcttccagcgaatggtacgactccaccaccaaacgtcctcccaccgcaagatggttggcgatctgcggtagcgtccccgccaatttgtcgagctcgccgttgacttcaatacgtaatgcctggaacacacgtttcgcgggatttcccgcaggacggtgcgcttgcggcacaacctcatccaccaatcggttgagctgccccgatgtggtcaatggttcgatctcacgcctacgcacgatttcgcgggctatctgcttggagaagcgttcctcaccatatgtacggaaaatgcgtaccagatcagcgaacgaatattcagcaagtatctgttcggcggtcaatggctgggtcacgtccatacgcatgtccaaaggcgcatcgtgagaataggagaatccccgctccgtctcatcaatctgcaaactcgacaatcccaaatccatgaacacggcgtttacctggtcgatcccctgatcatcaagcacttgcgcgaaatcgtcgaatgcggcgtgcacgggtatgaagcggtcggcaagaccttccatccgcattcgctgcgtggcgagcgaaagcgcctccgtgtctcgatcgatgccgatcagacgcgcttgcggactcgctttgagaaaagccgtggaatgccccgccaaaccaagcgtgcaatccaccgcaatcgaccctggcctcgccaacgccgggaccaccagatccacgcagtcgcgcagcaacactggctgatgtatggtcgttacatctgtcatcagaattccaccgccggtaatacgtcatcggcaatatcggaatatccctgctcctgctcggcgagatattcctcccatgcctgcttgttccaaatctccgctcgggtccccacgccaatcaccacgatgtcgcttcccaaattcgcgtaatcgcgcaacatctgcggcacgagcacacgtccttgcctgtctggctcctgatcaaccgcgccggaaaggaacacacgcaaataatcacgtgcagccttgtttcccatggatgtgcgctggatctgcaatgcgatccggcgaaattccgattggggcaacagatagacacatcgctcctgaccacgggccatcaccatgcccggtcccagctggctgcgaaattttgcaggcaatgccatacgtcctttggcgtcgatttttggagtgtatgttcccaacagcagcggaggcagtccagccatcacaccgctcgcttgcgtcgaaccatcgtcggagaagggctcggtttcaacgctttgaaccatcgccacacctccttacatgatgcgcgggaacacctagacccaaaactctttccccactttaccccacgcatcaccataaatccccacataaatggaaaaaatcagcaaatgctgaggttgattttccccacattgaacgaatggcatcaaatcaactaccgtaaattcatccttgcttcgctatgtcgcactcgccctcgtcggttttcgtagaagcctcggggtacattggagtgcctaagttttgtgaggaagggattgcagatgtcaagttattccgcccagttgcgtgaagaacaacaggccgtcagccgcgcgtacggccgcttggatgatctgcgggcccaagctcgtgcccgtctcgacaccgtgcgtgctgccggctcgcacggatcgcccacgcaacgcaccgaacgcgattccttcgccaccatgtacgaggatcgcctcacccagctgcgtgccgtcgaagatcgcctggtgttcggcagactcgacgatgtccacggtgcgcacagatacatcgggcgtatcggactgtccaacgaaaaccacgagccgatcctcaccgattggcgagccgacgcggcacgtccgttctacgaagcgacgccttccaatcatggcgatatcgtaatgcgccgccatatcacactcagcttccgtgaagtggtcggcgttgaagacgaagtgctcgatgtgcactccgaccaggtcgggcaggcgtcttcggacggcactctgaccggcgaaggcgcgctgctcgcatcgttgaacgccaagcgcaccggcaagatgaccgatatcgtggcaaccatccaagccgagcaggatcgcattattcgcgccgacctcaaccaggccgtggtggtgcagggtggaccgggtaccggcaaaaccgccgtggcgctgcaccgtgcggcatatctgctctacacgcatcggcgaatgctcgaacgctccggtgtgctcgtggtcggaccgagctcaaccttcctgcattacatcgatcaggtgctcccctccctcggcgagaccggagtggtcagccgaaccatcgccgatctgatccccggcgtgatcgcgacggcgcatgacaacccgttcgccgcgaaattgaagggcgaacgtcgtatgtccaaagccatcgccaatgccgttgccgcacgagaacgcgtccccgcatcattgccgtcgatccgcatcaacggattcgcagtgcccatcgtgcgcgcggatatcgaacaggccatcaccgatgccaagcgcacgcgacagcagcacaacaaagcacgcgaaactttcgtgcatagcatgttgatcgccatgcgcaaccgttatgtggacaagcttgattacgagccggagcaggcggagttgacggatgtgatgcagcagttgcgcatgaatgacaccttgcgcaagacgttgaatctcgcatggttgccgatgaccggcgaatggcttatcgaccaactgttctgcaagccgcagcagcttcgtcgcttcgcaccatggcttgaggaacgcgatatcgaagcattggttcgccccaaagggtcgccgtttaccgtcagcgatattccgctgctggatgaagccatggaactgcttggccccgaccccaaagcggtcgcccgccaaaaggcgttggacgccaagcgcgccgaggaggagcagttcgcgcaagatacgctggctcaagctggcatcggctccggcatcgtcacttcgcagatgttggtcgacaatatcaacgggatggacgcggaactcaccgcgcagcgcgccgccgcagaccgtgaatggacatatgggcatatcgttgtcgatgaagctcaggaactcaccgccatggattggcgcatgctcatccgccgttgcccgtcgcgttcgttcaccattgtgggcgatgttgcgcaaacctccgcattgggcggcacccgttcgtggcggcgtatgatggatccgttgttcggaccccacaattggcaactcaacgaattgacgattaattaccgcaatccgaaggaagtgtcgcagctcgcctgtgatttcgcggcaacggagggattgtacatctccaccgtcaatgcggtgcgtggcgtgccggattcggtcaagcgcctcactctggccgacgacagtctgattgccgatgccgtggcacagcagaccgtcgatctggtccgcgcattcgtctcctccgatggcaccggacgcgtggccatcatcgcacctgacgatatggtcaagccgttgcgcaggcgggtgtacgaacagcttcgcgaaacattgacggcgaaggagttcgaccgtctcgatgcgcagagctcttgggatgaacaggtcaccgtttgttccacgcaaatggtgaaaggcttggaatacgacgcagtgatggtggtgcagccgggaagcatcgaggagaatgccccctcacgcattgtggccgcagccgatttatacgtcgccatgaccagaccgacacaacgtctgcttatagtccggacaaatgcagacgaaaaactgctcaagctataaggtagtaaccatgcctaaagcattgttacttgaaaatattcatcctgacgcggcacagtcactgcgtgaccacggcttcgaagtcgagtgcctcaggggcgccctcaacgaagatgaactcatcgacgccttggaagacgttgatctgctgggcattcgctccaaaaccagcgtgaccagcaaagtcatcgacgcacgtccgacgctcacggccgtcggctgcttctgcatcggcaccaatcaggtcgatctcgactatgcgggcaagcacggcgtcgccgtgttcaatgccccatattccaacactcgctccgtggtggaactggttatcggcgacatcatttgcctgatgcgccgcattcctgcgcacacccatcatatgaagcacggtatgtgggacaagtctgcttccggctctcatgaagtgcgaggcaagacgctcggcatcatcggctacggcaatatcggatctcagctttccgtcatcgccgaggcacttggcatgcgcgtggtgttctacgacattgaagagaagcttgccatgggcaatgcccatcgttgctccacgctgaacgaactgctcgaacagtccgatgtggtcacactgcatgtcgatggccgcaagtccaataccggtttcttcggtgaggaccagttcgcgcatatgaagcaggattcgatcttcatcaatctttcccgcggttttgtggctgatttagacgctctgaagaagcatttggactccggccacatttcgggcgccgcagtggatgtgttccctgtcgagccgaagaagagcggcgacgagtttttgacgagccttgcggatgaagacaatatgattctgaccccgcatattggcgggtctacgcttgaagcccagaagtccatcggacagttcgtctcacagcgtcttgaggattattggttcaggggatccaccatgttgtccgtgaatcttccgcagatcacactgtctgatattcgttcgaacttccgcatcgcgcatcttcacgcgaatttgcctggcgtacttgccaaggtgaaccgtgtgctcggagaagagaatatcaacatcgcggcacaggcactgggcaccgaaggcgaaatcggctatgtggtcaccgatgtggcccagcgccccagccagaaagctttggacgaactcgcagccatcgaaggcacgatccgtatgcgtgtgatcagctgacgatcccaatccggcaaacgccactacgatacgaatgcattgtgggggttccaatcacttattggctggaacccccacaatgcatgaaccctaatgccgtttgccgtaatcgcccagttttgcgctaccaagtccatttcagccaaaacaaacgcattatcatatgcgttcgcaaccgttcgaacctacttcagcgcatcggccttcagctcgtcgatcgcgttctggaaatcctcaagattctcaaaattctggtatacactggcgaatcgcatatacgcgacctcatcaagatcacgcaacggtttcaaaatggccctgccaacctcgtcggatttgacttgagccagtcctcgggcacgaagatcctcttcgacctgctggccaagagccttcaaatcgtcttccttgatcggacggccctggcatgccttgcgaacaccagaaatcaccttgttcctatcgaactgctcaacgttgccggaacgcttcaccaccaacaacatagtggtctctagcgtggtgaaacgcttggagcatttcgggcattcacgcctacggcggatggaatggccgtcatcgctgatgcgggtatcgaccaccttggtatctggattctgacaaaaagggcaatgcatggtgtcaagaatagcctgaaccattgaactaggccaatcttgcgcgggttcatacctcgtcgggaacgataagtctttgaccggcccgaagcgatactgaatccagattattcagtcgtaccagctcgtccacagtatccgcaacattgccaccatcaggcgtaatacgcgcagcgtacccccacaacgtatcgcccggctggacggtatataccaccaccggcgtcgctccgggatctgactgcgcgcgtgcaggcatcatcaatccagccaaacaccatgtgagcaccatcagcatcatgattacggccagtcgatccgcccagactttgaaatcaacgccatgagccttcggcacacgatccatcacgccactccttctcgaacagctgttctatcgaacgcatgttctgagtatggcacaaatgttcgataattgcagacacacctcgaacagatgtttgattttctcggcgtttcgcgttatgcttgcctaagacctgaaaggagcccaccgtgagcaccgtcccattcacgcccaaaaaggatgccgagcgtccggatgaaagcacgctgaccgaccgtcagcgcaaggtgcttggcgccatcaaaaaacatctcgtcgagcaggggttcgctccctcattccgcgaaatcggcgaagccgcagggcttaaaagtccgtcatccgtcaaacaccagttgcaagtgcttgacgacaaaggcttcattcgcatgaacgcgaacaagggcagagccatcgaagtcgtgagtttcgacgatgacgaggtttcgcccggcaaagtagcgcaggtcatcccattcccgagccaatctgattccagcggatccatcatggcttcccgcgatgtccccttggtgggacgcatcgcggcaggcgtgcccatcaccgccgagcagcatgtggacgatgtgatgcgtctgccggaacgtctcactggcaccggcaatctgtttatgcttgaagtgcatggcgactccatgattgacgcggctatctgcgatggtgattttgtggtggtacgcgagcagaacaccgcggaaaatggagatattgtggcggcgctgctcgacgatgaagccacggtgaaaacgttccgcaaggatcatggccatgtctggctcattccgcacaatcccgcctactcccctatcgatggcacgcatgctgagatcatgggcaaggtggtcaccgtgctccgcaaaatctgacgttagactattcaacgccattgagatcgcgcccacaaagatgaagccataaacaaagactccatctttctgggcgcgattcttttccggtaaacgcaccggtcatttaagaatgtttaggaatgcatttcggatttgctggtcgaactgtatccttccggttcgagttggaaggtggtatgaggtacggatacggggaaatgttcgcgcaggcaatcttgtagttgtgcgagtatttccgccgcttctttcatggtgagtccttgttcgaccacaacatgcgccatgaagatcggcatgcctgtggatacgatgctcgcgtggatgtcgtgtaccgccacaacatgcggcacttgttccaagtgggaacgcacttcatcgagatcaagaccgttgggggtttcttcgagaagcacgcgaaccgcgttgcgcaacagtttgatggctcgcgggatcatcatgagtgcgatgatgccacctgccacagcgtcgaatccggcccagccggtgcagatgagcacgcttgccgatacgattacggcaacggaccctaaagcgtcattcatgacttcaaggaatgccgctttcatgttcatgttgtcttcgctttgcgatgcgaggataaagattgatccgatattggccgcgaggccgagtatgcccatgaagagcagcaatcgcacgtcgtttacttcgtcggcagatccgccgaaaagtctcatgccggcttccacaagcgcatagatacctacgatgaggaggatgagggctccgactgccgctgttagcacttcgagccttgcccagccccaggtgcgtttgttgctgggcttgcgttgcatcagtattgcggtgacggttgatgcgatgagtacggacatgtcggtgagcatgtgtccggcatcaacgagcagcgccaacgattctgtgatgaccgcgctgatgacttccgctatgaataccgtcgaggtgagaccgagcgacatcatgagccgtttttgatgttccgctcctgtgttcgctatcgatccgtgcgcgtggtcatgtgccatatgcttaatctttcagcccgattaagaaacttattgaaagtgtttctcaataccattttcattgctctcaaaacgcaagaaaccccagccataggccggggtttcctttatttctttttgcagtctaacgactgatcaatcgcctgtcaatacccaagcaaccaaaaagcggcaacgcagctggcactccgttaccgcgtttttatcagaagccgaactgggcagcggtttccttcagcgtctctgcggaacgcgtaagggctgcaagctcgcggtcggacaccggggtgttgatggcagtgttgacgccggaacggttgaggagagtcggcacggacatgcagacgtcggagatgccgtggaagtcgtggagcatggagctcaccggcaggatgcggttggagtcgcgcatgacggcttcgatgatgtcaacgccggacatgccgatggcgtagttggttgcgcccttgccgttgatgatcttgtaggcggcgttcttgacgtcctggtgaatctgctcacgaacttcggcgtcgagcggagcgtgacccggcagcggggtccagtcgcacatcgggacgccaccgatggtggcggaggcccacagcggcacttcggagtcgccgtgttcgccagcaatgtaggcgtgcacgttcttgacgttgacgccggtctgctgggcgatcaggaagcgcagacgtgcggagtcaaggttggtaccggagccgaagacctgatttgccggcagtccggagatcttctgggcaacatgggttgcgatatcaaccgggttggtgatgagcatgtagatggcgttcggagcgaccttcacgaggccaggaatgatggccttgagaatgttgatggtggcaccgaccagttcgagacgggactgacccggcttctgacgcggacctgcggtgatgacgatcatgtcggcgtcgcggcagatttccggatcatcggagcctgcgatggacacggtcgggaagaagctggagccgtgctgcatgtcgagtacttcggcttcgacgcgttccttggcaatgtcttcgagcacgatctcacgtgcgacgccacgctgagcggcagcgaaagcgagagtggagccgactgcaccggcaccgatgatagcgagctttgtgggcttgattggtgaatccaccatgtgcttacctctcttataagaaagaatgtcccgctggtagcaggttttctcttagaatttcatctttactttatccacacagcatgacgtttcaaggcgttataacacgacttgcaaataatgaaaagtgatatgcatcacaaaagatgtgagcgctcacaaacgctgtgtccgctgcgttgcactgttttgcaaggttttcagccgattgactgttccacgatttgcgcagccaaatgatcgtccgcttccgcttcgagcatcataccgtcgtcacggtattcgacgttgatcactttgccgtattcacgtacgcgcgacaccagcgaaccggcagtgtatggcagcaacgcctcgacatgcacgttcggcgtcggcagcatggattccacctgcatacgcagctcgtcgacgccttcgccggaaaacgccgatacgatgtacgcttccggcatcaacgcctcgatacgctcgcgtgtggcctcatccatacggtcggccttgttgaacacgataatcgtgggaatggtttcgacgccgtcgatgtcggaaagcacatcatcgaccgcgtcgatttgcgagaacgggtccggatgcgagccgtccaccacatgcacgatcagatcggcttcggaaacctcctccagcgtggatttgaacgcttcaatcagctgcgtaggcagtcgacgcacgaacccgacggtatcgacgtacgcatattgacgtccatctttggcacgcgccctgcgcactgcggtgtccaatgtggcgaacagcgcgttctccaccaattccgctgatccggtcaaccgattcgtcaacgacgatttgcccgcgttcgtatatccaaccacggcaacggtcggcaatccgaaacgacggcgagcgccacgtttgacgtcacgcgcgggagccatctgttcgatctgtttgcggagtttggcgatgcggcttcggatcacacggcggtccatttcgattttcgtttcgccaggtcctcgcgagccgatgcccgcgtctcctgcggcgcggccgcctgcctgtcgtgacagtgatccgccccagcctcgcagtcgtggcagcatgtactggagttgtgccagttccacttgggctttgccttcgcgtgaggtcgcatgttgggcgaaaatgtcgaggatcacggcagtgcgatccacgaccttcactttggtggcgtcttccaaggcgcggcgttgacttggcggcaggtcatcgtccacaacgatggtgtcggcttcctcttgcgccacgattccggcgagttcgcgggctttgccggagccaacgtatgtagctgcgtccggcttgatacgatgctgcagcaggccgtcgcataccacggcgccggcggtttcggcgagcgcggcaagttctctcaatgattcttcggcctgtgcctgtgtggtttcacggctggaccacacgccgacgagcacgacgcgttcgaggcggacttttcggtattcgacttcggtgacgtcttgcatttcgccgagtccggacacatgcttcaacgcattgcgggattcgcgttcctgccattgttcgtcatgggattcgttgaaatggttctcgccgttggtatcaagcagcacttcggactggtcggcgagcacgcctgacacgtcgttggcgctcatgctatgctcgatgtcgttttcttggctcaatggcacctctcacggttaaactatggtgtctttattatcatcattctctagagacatgggtatcgggcattcgccacgtggatgagcgtggcttgcgtgatgccggaggcgagcgtttgcaaggagtgggtatggcacaggccgaacagtatttcgcggctgatccgcagtcgaaggatgtacgtaagaggctgcatgttgtgttgcgaggcaatgaggccgatgttgaggtttccaatggcgtgttttccggcaatcgcgtggatttgggaacgtccgtgctgcttcgtcaggctccggagcctcctgaggagggtacgttccttgatctgggttgcggttggggtccgattgcgttgacacttggttttgcttcgccgaaggctgatatttgggcgttggacgtgaatgaacgcgcgttggatctgacgcgtcgcaatgccgagctcaatggtgtgaggaacgttcatgcggtcaccgccgatgagatcccttcggatatgacgtttgatctgatttggtcgaatccgccgattcgtgttggcaaggatgtgctgcatgagttgttgatgacgtggctgccacgtttgaatgcgggtggtgccgcctatttggtggtgcagaagaatttggggtcggattcgttgattccgtggcttgccacgcagcttggcgatggttatgaggtaagtaagtacgcgagttcgaagggcttccgcgttatcgaggttatgaaggcatgaaattcgaatatccttcccaactgccggtttccgctgcacgtagcgatattgccgaggcggtgaagtcgagccaagtcgtgattgtgtctggtcagacgggttccggtaagaccacgcagctgccgaagattctgttggaattgggccgtggatcgcatggcaggcagattgtgcacacgcagccgcgtaggctggccgctcgtaccgtggccgaacgtatcgccgcggagatgggcgtgcgtttgggcgacgaggtcggctatcaggtgcgtttcaccgatgagagctcaccgaagacccgtcttcgcgtggtgaccgacggtattctgttggcgcagattcaacgcgatccgaaactgatgcaatacgatacgatcgttatcgacgaggcgcacgaacgtagtctcaatattgactttctgctcggttatttgactgcgctattgccgaaacgacgtgacctgaaattggtaatcacgtcggcgacgattgattcggtgaagttccaggagcatttcgagcacgctttgcatacgaaagtgccggttatcgaggtttcgggacgaacctaccccgtgcaggtcgtgtatgagccgctgggcaccgctccggcgttgatgcgttccgtacccggttttgaaacgggcgcgatgccgggcgatgccgactatgaaacgttgtcggccgctcctgacgcgaaggattcccgcgagccgaacgttgacatgccgacggcggtggcgcgcgcctgtgccgagttggtgattcattcgagtcatgaccgtggcccgcgcgatattctcgtgttcgcctcgggcgagcgcgacattcatgattttgagaatgcgctgcgccatcattatggtccgcgtgccattgatatgcgtcgtcctgatgcgattgagatcgtgccgttgttcgcgcggttgtcctccaaggagcagcatcgcgtgtttgagccgcatgaccatcagcgtattgtgatcgctacgaatgtggccgaaacgtcgttgacggtgccgggcattcgttatgtggtcgaccctggcaccgctcgtatttcacgttattcgaagagcgcgaaagtgcaacggcttccgattgaaccgatcagtcaggcgagcgcgaaccaacgttcgggtcgttgcggtcgtattgccgatggtattgcgattcgcttgtattctcgtgaggatttcgagacgcgcccggaattcacggagcctgagattctgcgcacgtcgttgggtgcggtcgtattgcatatgctgtcggtgggtgtggctcgtaccgcgcaggatgttacggatttcggctttatcgatccgcctgatatgaaggcggtgtctgatggtttcaatgagttgaccgagttgaaggccgtggcgcgcaagcatggcgaggttgtgctgacgcatacaggtcgcatgcttgcacgcattccgatcgacgtgcgtttgggccgtatgatcatcgaggctgcgaagtcgaccacgccgaacacgttggccgcagtgctggtggtggtcgcgttcctaagtttgcaggatccccgcgaacgtccggatgagaatcgtgaggaggccgaccgcattcataaccggtatgccgatccgtccagtgattttctgaccgcgttgaacttgtgggatcgcgtgttccaagctgatggcgagccgagcaattccgcgcttcgtaggatttgcaagactgagtatttgagttggctgcgcatccgtcagtggaaggatctggtcacgcagttgcgtgagatgtgcaaggaattcaagttcaaggttggcgatccgattccggcttcgcgtccgccgcttgagattcgtcagcttccgtcgaatcagcaggctgcgcattcgttgtgttgttcgtgggatgcgcagggtattcatacgtcgatgctttcgggcttgttgtcgatgatgggcatgcagatcgtgcgtgaaccgaaggcgtctgatttcgctggcttgaagggcgctgcccgtgcgcgtgccatgaagcgtgcgcagaagatggcgaagaatgattatcagggtgcgcgtggcacgcatttcgcattgttcccggcttccgcggtcgccaagtcgacaccgcaatgggtgatgagcacggagttggtggaaacgagccgcttgtgggcgcgatattccgcccagatcgatcctgcttgggctgaaccgttggcgggttcgttgacgcgaaccacgtatgcggatccgcattggtctggttcgcgtggctccgcggtggcgagcgcgaaggtactgttgtatggtttgccgatagtgcaggatcgtacggtgcagtggggtcgtatcaatccgctggaggcccgtgattttctgattcgtcagggtttggtcgagggcgatattcagcagcggttctcgtatgacgatttcattgcgaagaatcgcgatgtgctggaggacgccgccgacgatgcgagtcgcacacgtcagatggcgcaggcggtcagtgatgaggatctgttcgatttttataattcggtgattcccaatactgtcacgtcggttgcggatcttgcgaaatggtggaagtcaaagcatgatgagcagccggatttgttggattttgatccggagaaggtggagcgtcttgctgatgccgagtcagtgtcgttggctgattatccggatcattggcatacgttgggtacggacggctcccctatcgatttgcggttgagttatgtgtatgatccgcatgatccaaacgatggcgtgaccgtgcatgtgccgttgaaggtgttgtctcgtttgacaccggaacagttcacgtggaatgttcccggattgctggatgagttgattgtcggcatgatcaagtcgttgccgaaaacgttgcgcgtgcagtttgttcccgctcctgatacggctcataagattcgtgcgtggattgatgagaggtatccggatctgcctggttccggtaaccagcagaagccgaatcttgctcctaccaatgcggagggtgtggccgcgtggccggatttgcctcatacgttcacgcaggcggcaatcagcatcgttggcgcgcagattcaccctgaagtgttgactggtgaattgtggagcaagctcacgccgtatttgcgcgtgacgttctctgtggagcagcagttgcctccgagtcgcaagagtcagcatggcaggcgtcatgcgcggggccctgtcaaggtgcttggctcgggcaaatcgttggtggagttgcagcgcaagtttgcggagcaagccgaggcttccgcacggcagatggtaaagaagcaggcggaaaacgctggaaatcagggcaagcttgtggagcaggccaatctgctgcataaggctggtgccactaccgaagctcgttccaccatgctgtggcgcggtgcacttgatgttttgcgtatgccgagcgagcgtatttcgtcgcgttggttgggtgcggaggcgttgatgttggcgtccgcaccatatcagtccacgaaggatcttactgaggatctgcagttggctgcggtgaagcgtttgctgccgaatgttgacgaattgccggatgatgaggcgttggcgaatgcggtgcttgatgtgcgtgaagtgttcgaagataccgtgtatgcggttgcgcatgatgtgatcgctattttgaagcggtatgcggaggttgataaagccgtgtcaggcaaggccgatctgccgatgttgagcgttttgcagtcgattcgtgagcatatcgccacgctggtgtatccgggattcatcggcaagactcccccggatgcgttagcgtcgattgaacggtatctgcatgctgacgtgcttcgtttaggtaaggcgaagaacgacaagaatcgtgatgtgcgttgggcttgggaggctgatgaggccaagcagttggccgacaaggccatggcgaaggccgaacgtgagcctgcaggtccgcgtcatgaggcgttgatgaagcaggcggtcaccgcacgttggatgcttgaggaattctacgtatcattgtgggcgcaggaactcggcacgccgaagccgatcagcctgcagcgcatcaagaaagcgttgagctaacgcatcatcatctttcgcattccattgccgtcgatactggcggttttccagtatcgacggcaatgggacctaatgaaatcatcctcagccgaaccatggttagcacactctagcgttgcttgaagaaacggaacaactgcgtttcacgtatcgtcataccgacgagcacgcttgataccatcactccagcgaatatcgcacatggcgcgcgcatcgcacccaaccatacggtcattgaatcggcgatgctcatgcgaacgcaatacgcgcccaacagcgcggccgaagaggcacacgccaaaccgctccaaatcaacgtttccacagcgatttccagcaattgcgcacctttggactgccctgaatgcaatgcgccagcatattccaatctacgacgacgcacgccgaacgcgccgagcaccagccccacagccaatcccagccacggcatccaacgagtcatacgctgcccgtacgaagcctgcgcatcgtaatgcgaatcgaaactcttattcacctgcgtcacgccagcattggatgacgaacccgacgcaaccagcgtggaaaacaacacatcctccgtctgcccgctttgcggccactgtctgacccaacattcgtcgaacgtgccattcgacgcggatacaggcacaaggagagcgtaggcgaatcgcgtgtcacgaccatcgttcggccaatcaaacacgcctgcgacgctcatcgttccctgttcggtctgcattacactgcctttggtgagaccaaaatccttggccacgtcggtagatacccacacgccggacacatcggttttcgtgttcctggcgatcatcctgatcatgcctggcgtcacttcatacgacgatatatccttgccgggcgtggcaagcggcacaatctgttgaccggcacgcatcgcaccggccaaggtgcccatcacaccgccgccagcgtcggcgagcctgtcacatgcggctccgtccaccgttcccccaacgatggcgccaacgtcggcataggcgttgatgcgttgtagcacctcggtttcgagccccaccacattggcggcctcatatccgccgagcaatgtagacgcgaacaataccgctgcaaacataagcagcgcatgactcactcccgcgccaatattgcgcaacgcttcggaaagcaccgatcgtaatcgcataatcgcctactcgcaggtgagattgttaagtccgctgccgatttccacattggagatcgaagcgatgtctccgctgtcggcttgcacgaggctcacgccaagttcgcctcccacgatcgacactttcacgggagtgttgccatgattgttggatgtgggcacgatgcagccggttgaaccgttgatgccgaataccgcaccggctggaacgcgcagcactcgcatccgttcgctcaaggccagagtggcgtccaatcccgcttttttggattccacgtccacggattggtagctgtcgttcgcttcgacttgttgcaggaacccggcatccgtgatttcagtagtattggctggcaatgttcccgtaatgccgaatatcgtc

SEQ ID NO: 844 - DNA, 91253 bp, Unknown
  gut microbiota DNA sequence
acgtggcggatggccagaaccgggttgccgtaacgtgcgaagatgacttcgccctgttcggtgagcttgaaacggcacttcacggagccgaccggctgtgcgagtacggcacggttagctgggccgccgccgcggccgacggcaccaccgcggccatggaacagggtcagatcgatgtcatgcgattccgcccacttggcgatgcgttcctgtgcggaatgcagggccagggttgcggaggtcgggccggcgtccttcgaggagtcggagtagccgagcatgacttccatcttgccgccggtggccttcagacgagcctggacctccggaatcttgatcatttcctcgagtacgtctaccgagttctgcagatcctcaagctgttcgaacagcgggatcacgtcgatggttggaacatccttgggatgggagaacgccagacggttcagctcgtacacgtccctgatgttttgggcgctcttggtgaaggagatgatgtaacgacgggcggccttgatgccgttgcgcttctggatggaaccaagggcgcggaaggtgtcgagcacctcgtgggtcatcggttgcagttcgccacgctcaccgtgcagaccatgttcgcggatatcctccagcgctcgggaatgcacgacggagtgctggcggaactccatctcgaccatatggaagccaaaggtctctgcctgccagatgaggtcctgcagcgggccgtaggcggaacgtttggcgttggcttcggcgagggagcgctgcacggtcttcaggtcggcgatgtaatcctcgcaggagtggtacatgagatcagcatcgcggtcgatggtggccttcagacgatcggccatgaccagcatgacggcacggtgcagctccttggtggagatcagtgcggccttgtcggtcaggcgctcgctcatttccttctgatggttccacaggctcttgagctcggcactcggcggagtggtctcagcttccatcgtcaggttcttgccaacgcggcgggtctcgatttgcaacgcgcccagcacgtggtcgctgaacttgcgggccacctgacggctcaccttggcggtgacattcgggttgccgtcacggtcggagccgatccagcttcccgggtggaagaacgccgggcataccggcggcacgaggccagccttatctccgaggatccaatcgtcgaaacgacggtacacctgtggaatggtatagaacaacgtattgtcgaaaatatcgagaatggtttcagattcctcaaccggagtcggcttcttcagtgcgatcggagaggtgcggaacagcgcgtcaatctcgttgaagagtcgacgggagttttccttcttgtctgaaccgccaagcagcttgtgcgttgcgagcagctgggagatgcgacggattttgccttccacggctttgcggcgggcttcagtcggatgcgcggtgaacaccggatggaactcgagctggtcgagcagttccttggctttggccggacccatttcgttaatgagctggtggtaggcgcaggtcatttcgttcactgggtcgacggcttgggtgtcatctacggcggcctcacggctgtgcagcacggagacacggtagttctcctcgcataggttggccagatggaagtaggtggtgaaggcgcgggccagcagttgtgcctcatgcacatccgttttatcgatgatgtcgacgaccttctgcagatcatcctgattcggattcgtatccgtcagaatgccggagaagcgttcggcgctagcgttcagtgcgtgttcgcgcacttcatcgaacttggccagcagcttttcatcgaattcgccgagcacctcgcgaagaatctgcaaacacagatccatttcctctttgagggaagcgggaagatcacgctcctcggggcctttggtgccggtgccggacgagacgatagctgcgtcggcaggcgtgatctgttcgttttctattgtcatcagacctccttctccaaaccatcgggttgcccggtctgtcggtccttcgcggcacctccgcgattgttttggccgtctgttgcgagcccacagccctaagttcggtcggtaatgcacgcccattgtatgctcggcaaatcgacagtttggttacggaaacaccggaaatgtccgcatcgtggtccagtggtgtccacaaggtgaaatcgacggaaatttcgaaaatcctccgaccagcccacacgttagacctgaacttgtgagcgcacaatacgaacatgaacatgagacgaatttcgatagcgcggaaaaaagcgcttcggccgtcagcaaattccatacacactccattccgctcgatatggaagatatcgaacgggattgggacaagccggtcgctgaagcgggaatcgcagcaaaagccagcgtgatcgtacgcgtcggcatgctcgatctcggcgcgggcaccggaagcttccgcgtacgcgaaatgatgcaccgcatcgcctatccgctaggcgtgcacgtgcgcgccgacgtgaacctcaccgacatcgaagcctcctgcaccgacggcaaagaccgtatcaccgaagtcgtcgacctgccaaccaccggcgtcaacacggaacgcatttggctgctcgaacacttcgctgactggttcaacgtgaacctcggcaaaggatcgatgtaccacagccaatccgacgtgtccgaagggcttatgcagcatctcgacaagcgtgatgcgtcgcaggtgtcggctgacctgtcgaagcgtcttcgcgaacgtcagaaagccgaacagaatcaggagggatctgatgatcccgtgctcgacgcgcttgaaatggtgacggaacgcgccgaagtgaccgataccaccgcgcagccgttgcacttgcgtgatatcgaagcggcaagcgagcagcataatcgcggtgaacgtgaagccgaacgtgaaaccaagcgtgaaactgccggtacggccaacgttacgtcaagcgaatcgaccacgaaaaaagcgcgcaaaaatcgcaatcacaagccgccaaaaggtcaatacgccgaacatttcgaccacgtcggaaaagaagcggaccaatcgcaaggcatcaccgttcgccaagcccacgaacgactcgacatgatcgaacgacgcaaacccctgtattcgccggcgttcgcgggattcgcctcggcctgcgcctgcgcatccttcgtgttcctgcttggtggcggtcccttcgacatgatcggcgcgttcatcggcgcgggacttggccactggctgcgccgccgcctgttcgcccaccatctcaaccagttcttcgtgacgttcgtatgcgtggccgtcgcggcactcgcctgcacgggcaccctgcgattgattggtattttcgagcccgtcgcattgcagcatgatacggcttacatcggtgccatgctgtttgtgattcctggattcccgctgattacgggtggacttgatatggcgaaaattgattttccgtcaggtattcagcgcgttgcgtacgtgttgtgcattattttgatggcgacgctcgcaggctggatggtcgcttcgatcgtgcatttgaatccggaaggattcgagccgttgggactcaatccggttgtcaattgcctgttgcgtttcgtgttcgcattcatcggcgtctggggcttctccaccatgttcaactcgccgcagcgcatgtgccttgtcgccgccaccattggcgccattactgacaccttgcgtttggaaatcgttgacatgggcgttcccgccgaagccggcgcattcatcggcgcactgctcgcaggcctgcttgcctccgcatggcgttctgcggttcatcgcagctggctcgccccgcatctcggctacccgcgcatctgcctgaccgtgccgtccatcgtgatcatggttcccggtttgtacatgtatcaagccatgttccacctcggccaattcgacaccttgaacgccctcgactgggctttccgcgcgttcatggtgattatctgtctgccgatcggcctagccatggctcgcgttatcaccgataagtcttggagatacgatatttgatccgtttcggcatttgggcgcgtaaatgagataaatgcgattgtcgcaatgttcgaccggtacattgggacaatcgcatatttttttcagaagagattcgaaagaaattcgtttcgacagagatttgaagaaagagattcgaaagaaattcggctagcaatctaagaagagagaattcatggttaccaaagatttttgggtgctgctggcgatggtcatctattttgtggccatgctcaccatcggcttcatctactccaagcggtccaattcctccactcgtcagtatttcgcgggtggtcgaggcgttggtccatggctgacggcattgagcgccgaagcctccgatatgagcggctggctgctcatgggactgccgggcgtcgcctacttcaccggtgccgccgacccgctgtggacggccctcggcctggctctcggcacctacctcaactggaagctcgtcgcacgccgtttgcgccgctactccgtggtggcaggtgacgcgatcaccattccggacttcttctccaaacgattccatgacaaacgcaatatcgtctccaccatcgcggcgctgatcatcctcgtatttttctgtgtgtatgtcggtagctgcttcgtgacggtcggcaaacttttctcgaccctgttcggctgggactaccacctgaccatggtgatcggcgctgccatcgtgttcgcctacaccgtgatcggaggctatctttccgtggtcgtgaccgacttcatccaaggcttgctcatgttcttcgcgctggcagtggtgttcatcggttccgtcgcatccgtcggcggcgtcgacaacaccgtcgccttcctcaaaggcattccaggcttccttgacggcacgcaaatggccacgccgattctgaacgatgccggcgagcagattgtcaaggctggccaggccatgttcggcgctcctaccgaatacggcgtgatcaccatgatttccatgcttgcgtggggtcttggctatttcggcatgccgcaggtgctcgtgcgattcctgtcaatccgcagttccgaagagatcaagaagtcccgtatcatcgccactacatggtgtgtggtgtcgctggcgtgcggcgtgtgcatcggtttggttggccgtgcgatgatgccgacgcagttcgtcacgcagtccgcggcggagaacattttcatcgtggtttcgcaggcgctgctgccgagcttcatgtgcggcatcgtggtgtcgggcattttcgccgcgtccatgagttcgtcgtcgtcatacctgattatcggcgcttccgcggtcggtgagaatattttccgcggattgctctatcgcaaggccaccgatcgtcaggtgatgatggttgcgcgcatcacattgctggttatgttcattttcggcattgtggttgcgttcgatcagaattcgtcgattttccaggttgtttcgtatgcatgggccggtttgggcgcttcgttcggtccgctgatgctctgctcgctgtattggcgtcgtaccaataaattcggtgcgattgcgggcatgctttccggtactgcgaccgtgctgatctggcataatttcatcaagccgcttggtggtgtcttcgctatttacgagctgcttccggcgttcatcatctcgctgctgttcattgtggtggtgtcgctgctgactccggctcccgatgctgaagtgctgcacgagttcgatcattatcttgatgatcccgatgaccgcaaggtggatgacgatttggtcgcagcggaaatcgcttccggcgaaaagcgcgcgaaaatctaatcaaacataatgtggcacatgccactcagacgagacaaaggccggattgtgcaatacgcaatccggcctttgtcgatgctgaaacgctgtttaaagcgtgattatggcgtttctggagctttagtagcgcatgcccatggcgtcgcgcacctgctccaacgtttcgttggcgatggcgttggccttcttgttgccttcggcgagcacgtcgcgcacgtaatccatatccttggcgagttcctcgcgacgggcgcgatgcggctcaaggaagctgttcaccgattcgatcacatacgccttcagcgcgcccgcaccggaatcgccgatctcctcggcgatctccttcggatcgcgaccggtgaccaaaccggcggtcgtcagcagtgcggaaacctgcggacgtgcgatcggatcgaacgtgatgcgacgctcggaatcggtcggactcttcttgatgagcttggcggtctcctgcgctgtggcgcccaacatgatggaattgccgtacgacttgctcatcttgcggccatccaagcctggaatctccggcgcttcagatagaatcgcggccggctcggggaacaccggatgcttcttggcgtagcgttcgttgaaacgacgcgcgatggtgcgcgtgatctcgacatgcggcaggttatctttgccgatcggcaccacattggccttgcagaacagaatgtcgcatgcctgatgcaccggataagtcagcagcaggccggtcagcgcatggccggaagcttccatttccgacttcaccgtaggattgcgatgcagttcggcctcagtcaccaatgacaggaacggcagcatcagctggttctccgcaggaacggcggaatgcgtgaaaatcatggtcttttccggatcgatgccggcagccatgtagtcaagcaccaaattgagcacattgtcttcgatatgcgcggtcgtgtcacgatcggtgatcacctgataatcggcgatgatgatattcgaattcacgccgcgattctgcatggcgacgcgctcacgaatcgaaccaaaataatggccgagatgcagacgtccggtcggacggtcgccggtaagcatggtgaacttgcccggattctgttcgattgcggcgagcgttgcgtcggaacgcttcttcgctgcgaggaagctcgcgctcatttcattgccgacagcggtgatctgctgctcctgggtttcgtccgtcatacgtgtccttttcttaagaaaatcagcgattttatcgtaaaagtctgagccgacaacgaaatatggcacagcaagtggtactctcttgtttgatgaattgatagcacagtaatcctcagggggtcagatgggccgcggacgtcagaaagccaaacagcagaaaatagcccgaaagctcaagtacctgaccaccgacaccgattatgatgagctcgccaaggagctcggtgcccaggagcctggttcgggttcttttgatcctttcgccgatatcgaagcaaaatattctcacgatgcggacgctgaagatgagattcctgaagatgctcaggagtccgcgcaaaccgacgccgaggacgacctcgacgagtatgcaaagtgggccgcagaggcggcggcgaaggccacgagcggagagttcccggcagccaagtccgccgcgccgaagccacacaagcccatcccgatgccgatgcccagcgcactgaagccgaagaagcaggactgattggcatatcaggtactttgtgaaaccgcgatgcggatatgcctgctaggtgtatccacatcgcggttttgctatgcgtttttgcgcctgtgacggtcttctcgcagcctgtcacaccaacggcagcaagctactcaaatcgtcgcgttcgccaacggccgtgatgcgtcccgcctccttttcctcctgccagctggtgatgcccgtggcgagtctcatccacacgtctggttccagttcgatcacatccggcggtgtgagattatgcggatcggatgccggtccgtcgagaatcttgatggcaccccacggcgcgacacgaacttccacgcccgccccgggcgcttttttctccagcagatgcagcgagtagcgcaccgccatcgcccacagctggcgtggcaatcgtggagagaattccagacggaaatcgcgggccgcgtcggtatttgcgggaatattgtcggcgatcatgcgatgagacgtttgcagccattgcgcaaatgcgtcatgccccttatgcagatcttgttctcgaataacagccatacgtgttattttgccgtttgcgagcgactatgatggggtgttgcagacaacgtagtcacaactgaataggggtgtgaagagagggaaaatacctgcgattcttgacagcgttcgcaatgttgttgcatgtcgtttgcatgttgctcgcaacgtttttgcagccggtttgcattatttctgcaaacgaatgcttgcttgtaattgcttgaaatttcatctttttatgattacgtagtatgctatgtatgagaacgtatgcatgatgttacttagtgttcatgcggccgctaatgcaaggacgctggggtaaggcataatgttcctggagagtaatccgtcaaagggagtcgattaatgactgaaattaccgcaccgaagtccgcggtcaccgcggagcagttcgcagacgagatccgcgagcagctgaagtacacccagggcgtcaccgtcgagcaggccaagccggccgacgtgtacgtcgccgcgtccgccgcagtgcgccgccacctcatggattcctggttcaagacccagtccgacatggtcaacggcaacaccaaggcagtcggctacctgtccgcagaattcctgatgggcaagcagctgcgcaacgcgctgctcaacgccggtctgaccgagcagttcgacgccgcggtcaaggaactcggcttctccgtgcaggacgtcgtcgacgccgagcacgagccgggcctcggcaacggtggcctcggccgtctggccgcctgcttcatcgattcgctcgcctcgctgggcgtgccggcattcggttatggcattcagtacaagtacggcatcttcgagcagaagttcgatgaaaacggcaagcagatcgaaaccccggactactggctgaccaatgaagagccgtggggacacatcgattacaaccgcgaccagaaggtttccttcggcggcgaagtcgttgaggaagatggcaagaaggtatggaagccggcttggtccgtgcgtgcggtgccggtcgactacatggttccgggctacgcctccggccgtgtgaacaccctgcgtctgtggaccgccaagagctacgacgagttcgacctgctcaccttcaacaagtccgagtaccttgacgccgtcaagccgcaggttgaagctgagaacatctccaagatcctgtatccggaagattccaccccgcagggcaaggcactgcgtctcgagcagcagtacttcttcgtgtccgcctccatccacgacgccatccgcgtcttctacccgggtcaggacaagccggatctgaccaccttcgcggacaagatcaccttccagctcaacgacacccacccggtcatcggcattccggagctcatgcgcgtcctcatggacgagtacggctacgattgggacaccgcctggaccgtcaccaacaagaccttcaactacacctgccacaccctgcttccggaagccctggaagtgtggccgtccaagctcatcggcgaactcctgccgcgtcacctcgaaatcatcgagaagatccaggaccagttcgcagccgagctcaaggccaagggcgtcgacgaagccaccatcaaggacatggccatctacaccggcgactccgtgcgcatggcctacctggccacctacggcggctcccacgtcaacggcgttgccgagctgcactcccagctgctcaaggacgtcaccctgaagaacttctccgacgtgtatccggacaagttcaccaacgtgaccaacggcgtgacccctcgccgcttcgtcaagctcgccaacccgcgtctgtccgacctcatcaccgaaggcctcggcaccgacaagtgggtgagcgacctcgaactgctcaagggcctcgaaccgctcgcagccgatgacgaattcgtcaagaagttcgccgccgtcaagcaggccaacaaggttgacttctccaactacgccaagcgcgaatacggcttcgacatcgacccgaacaccatgatcaacaccatggtcaagcgtctgcacgaatacaagcgtcaggcactgaagatcctcgccgtgatcgcacgctacgccgacatcaagtccggcaggatcgccgccgacgatgtcatgccgcgcaccatcgtgttcggcgccaaggccgctccgggctactacctcgccaagcagaccatccagctgatcaacaacgtcgcccgcgtcatcaacaacgacccggatgtcaagggcaagctgaacgtctacttcccgtggaactacaacgtgcgtctcgcacagcacctcatcccggcaaccgacctcgacgagcagatctcccaggccggcaaggaagcctccggtaccggcaacatgaagttcgctctcaacggcgccatgaccgtcggcaccctcgacggtgccaacgtcgaaatccgtgagcgcgtcggcgctgagaacttcttcctcttcggcatgaccgtcgacgaggtggatgccctctatgccgaaggctacgatccgaagaagtactacgaggccgatcctcgtctcaaagccgccatcgacatggtcgcggacggcaccttctccaacggcgacaagaccgtgtacgaagaccttgtccacgattggctcaccaaggactggttcatgaccctcgccgacttcggcgcctacaccgccatccagtcggaaatcgaggccctctacgcccagccgctcgaatggaaccgcaaggccctcatcaacgtggcgaactcgggctacttcagctccgaccgctcgatggaggattacctcgagcgcatctggatgaccggtccgctcaagtaatgacggggcgttatctgcgttgtggaaggcttgacgtatcttcgtacgctttcgccttccacgccttgtgatactgcgctcgtcattactttcgcttcgcacgggccatatgtgacgtgaattatcgcgtgatgtatgactcgtagcgttagatagggcgtgatgacgaagggacgattccgttttggaatcgtcccttttcgttttccagggcaaaacaaaaagccctgcgcgtggggcgcagggcttgaaagaaagagaaatcaggcagcttctggggtggcgggagcgacctcggcttcgccatcctcggcatccttggtcaggccaagatcgacaggagacgagctgttctcccatggctcctcccacggatcgtaatccggattctgctgcttgtacacatacagaccgacgacaccggcaagcaaagctccgaagagcagtgcgaagaacttccaaccgttagaagacttgttctccatgacggatcctttcccaaatatcggcgaacattggctgacctgctcgttcaagccaactctgttcactatattaattccttgaatgtgttgattgggtggatttacgcgccgaggattcacaagaatgcaatcatttgcaatgatttcgcagattcgcggattcgcacgttccagtagggttgaaacatggcttatcaacgtttcagtctgtttcccgattccccgtcgttcaaagacttcttctctgcacgttccatgcgataccgttggcgtaacggcgatcctgtgatcaccgttacgatcatggcgatatgcgtcgcggtctggattgccgaaacactattgaaaatcgcctggccggccggctgcaacgcattcgtcggctcaggcgcattcatgcccgcgctggcgactcaccgcccatggaccttcattacgtcaatgttcctgcaccagccggcctccctatggcacattcttttcaacatgctgaccttgtggtgcgtcgggcctgtattggaacgcatgatggggcatctgccatatctcgcgttatacgtgctgtcaggactcggcggaagcgccggcatgatggtctgggcactgttctcgcaagacggttggctgacatccgcatacggcgcttccggcgcgctattcggcctgttcgcggcaattctggtggtataccagcgcattggcatcgacattcgatccatgctgatctggatgctcatcaacttcctgatgccaatcatcacgccgaacatcgcatggcaggcgcatgtcggcggattcatcatcggaggagtgttcgcctggctgttggtttccggtctgcgtgcgttgcgcggcaaaagtctgcagcagcgcacgctgatgtacggcgtaatcatgttggccgtgattattgcgattgtcgttgcatgcaatatgagcaatccacttcgcgcaaacccccttcttggcatgttctcctagttggcaggaaggagaaaaacagatttggggaatcgcagacacacacttatccacaaatgtggataagtgtgtggataagtgagggttgagctgtgggtaagtcggggataactcggtgcattatccacaaggatattcacaaaacggtgaattccccggcttttcaacggtggaaaatgtggataacccgactgtgcatagtggaaaaatggggaaaaacaccatcctatatattgtggacggtcataaaactgcctacaagatatagacgctatccacattcgtccacaataatccacgacttatccacatcgtgtgaaaccagaaaatccccagaatgacgacggatcaacacaacgaaatcaggtacgtcaccaatgacaatcatgaatgacgagacgcgcgaattcgtggcgatgcatcgcaacgaggacgtgcgcgaactggcgttgaaggccaaacgtgtggaagggctcgacctgccgttggcgctcgaccagattgccggatggcagatcgcacgcaaaaaactgccacaatgggcctcctgcgagggaatcgtataccctccgcacatttccatggaacagtgctcatcgcagttcacagcccaatacaagtcagaaatcgcacaaacactgcttgcgccggccgcaaccgtgcgcgccagagtgtccgattctggagaatcggacaaccaaaccacgaaaagtgagccacagttgtccgattccgccgaatcggtcatgcaaacggcaaaaagtgcgttccagttgtccgattctccagaatcggacacgcaagagatgaaaatgggcgcgtggatgtccgattctccagaatcggacacattggtggcgagaagggcgatggtggatctgacgggcgggttcggcgtggacttttcgtatctggcgcgcggattcagccaagccacttatgtggaacggcagcggcatctgtgcgatctggccgaacacaatatggccgcactgggactcgaccaggcgcgcatcgtgtgcggcgacggcgtggaatacctcaggcagatgggtccggtggacttcatctaccttgatccggcccgccgcgacgagcatggatcgcgcacttacgcgatcgaggattgcacgccgaacgtgttcgaattgcgtgacctgttgctcgtcaaatcgcagtacacgctggtcaagctttcgccgatgttggattggcgcaaggcggtcgccgatttcgacggggccgtacgcgaagtgcatatcgtggccaccggcaacgaatgcaaggaactgttgctggtattgggtcagcaggtgcatgaggaaccatccgcgccgcgcgtgttctgcgtgaacgacaatcagcggatcgactatgattccgccgcatatacgcagggcctgcgcattggcggcaaaccgctgccggaggcgaaaaactacttgtatgagccgaatgcgtcgattatgaaggccggttgcttcgatctggtggaggaacgattcggtgtgacgcaggtcggtccaagcagtcaccttttcgtgtcggcaacgccggttgccgattttcccggcagaggattcgcgattgaagcgatcggcggcatgaataaaaaggatataaaacgactgctgaatggcacgaaacaggccaatatcgcggtacgtaacttcccgcttaccgcaccgcagctacgcaagaaattgaagcttgccgacggtggtccggtctatctgttcggcactaccatgcaaggctgcgatcatgtgctgctgcgcacgtcgaaaatctgaaaaacaaaccggaatcgaaaaaagaaacaggcgaaccgggattggcaaggcggtcgcgaaagaccgcgtacgtttgcgaaagagcgtgaaacctacgaagaaaacctacgaaaagattgcgagataatcgtaaaagggcatgtgaaaagggcgtctgaccgcacgttgtacagacgccctcaaatcgcaggaaaggcgaaactacgctttagcgccaccacatggtcatgatgaatccgatcatgatgatcgcgaatgcgatggccagattccacgcgccgatgttcggaatcgggtagtcggaagtcaggtagtagacgaccgcccagatcagaccgatgatcatcagcgcgcagaacagcggcacgaaccagcgtggattggacttggtgcccttgatggtttcctccacgcggcgggtgttctccgcctgacggttcatcatgcgctgcatctgcgggctcagggagtccttatcggcggtagcgttcagcaccgcttcgacgcgatccatcggaatgtcgtgatcgtcatcgtcgtcggaatcagcggattcgtcagaagtggaatcgacggtggtttcctcagcggcatcctgaacggtttcgttgctctcttcaacggcagcggtgtcgtccgtggactgcagatcgttctgatcgtccgcggtggtttcgtgcagctcttcgtcagccatcagcatagtctcctttaataggctaaaagtcataatagtgggtagactcgaaagcggcgaactcacagcgcaaaactgttcataatcagagcaaatgcttaatgggaatcaggaaggtccgcatggcgaagcacaccggcaagcacaccgcgaaacggtcgaaagcggccggagtggcggcattccttgtgctcatgttctccggattcctgctcgccacgaacctgcgcgtgaaccgttccgtcgtggtgaccaacgacaccgccgaactcgtggaacaacgcgtgaaaaaagtcaactccctgcagacggaagtcgacgcgctcagctcccgcgtgaacgatctgagcaaaaccctgaacagccaggacgacgccgaccagcaagacagcgaaagcgccggcaacggcaccatgctgcccgcggtggaaggccccggactcgtggtgacgctcgacgattcaccactctgggaaaacatggtcgattccagcggctccacctccaacatcaacgattacgtggtgcaccagcaagacgtcgaagccgtggtgaacgcgctttgggcgggcggcgcggaatccatgatgatcatggaccagcgtgtgctgttcaattccgcagtgcgctgttccggcaacgtgctgcttttgcagggcaaaaagtattcgccgccattcaccatttccgcgatcggcccggtcgagacaatgaaaaaggcgctcgacaattcgcaggaagtgaccatataccggcagtacgtcagcgcgttcggcttgggatggcaggtcgacgaaaaagaaaaactccatttcgacgcgaccgacgcattgcaacagccgctgcaatacgcgcaggcgatgaacaacgaaacagacggatcgcaggaatcgcaagaggggaagtaaccgatgaagcacgtggcaccaaaacagcgtcgcaaaagcgtggtctggacgatacttggcatcctcgccgaactcatgctgaccgcggcggccgtctgcgcgctctacatcgcatggcaaatgtggtggacgggcgtgcaggccgaacacaaccaaatcgaaacacgccaatccgtatcatggtccgaccccggacaatccgacagcgtcaccattgcgcaagcgcaggaaggcgacccgccaacgcaaccgcaaagcgcacaggaaggcgagctcatcgcccaggtctacattccgcgattcggcagccaatggcagcgcaacctcgttgaaggcacctctctcaccgaactcaacaagcacggactcggccactacaaggattcgcaaatgcctggtcaagtcggcaatttcgccttcgcagggcaccgcaacggctacggacagccactcggcgacgtcgacaaactgcaggaaggcgacccgatcatcgtgcgcacgcaggattactggtacgtctaccactacaccagctacaaaatcgtgctgccgaccgacatcgaagtggtcgccgccaaccccgaaaaccccggcgcgacgccaaccaaacgcatgctgaccatgaccacatgcgaaccgaaatactccacgccgacacaccgctggatcagctacgcggaattctcatactgggcgaaggtgtccgacggcatcccccaggagctcgcctccaccgactccaacggcaaagtcaaattcgtcaacaacgaaaaatcgtcgatcgtcgcatccgtcagctcactcaaaccgtggattctcggcgcgctcgccgcatatgcgatcatcttcctttccgcgctggtggcatggcgttggccgtatctcgccgacgtgcgcgcaggacgccgcgaaaagccggaattcagcttgtacggcggattgatgcgattgcagccgggtgtgcttccgattcgacttgtgctcatggcgttgctgattttcgcggcggccgcatcgtgctttgaatggctgttcccgtgggctgcgacgaatattccggcattgcaggaaatgtcgaattacacggccatataaagctgtattcaggtgccttccggcggtctgccggaaggcttgctggcagttttgctggcagttttgctggcagacgtgaaagcgattgctgcgatctgcgattatcacgattgctgcgattgctgcgtgagacgcgcgccgcgtcacgacatgttgcgcacgtacactgctatgcaaacgcaaatattcgcgcaacgtaagtattcgaagcattcgaacgccgacattccgacgttgataggagcatgatgaccgattccgcacgcattttggtcgtggacaactacgattcgttcgtttacacgattgtcggctatttgaagacgttgggtgccgctgtgacggtggtgcgcaacgatgcgatcgatccgggcgaagccgatgtgatcgacgaatacgacggcgtgcttatttctcccggcccgggcgctccggccgattccggtgccagcgaaggcatgattcgcctgtgcgcggagcagtccaagcccatgttcggcgtgtgcctcggcatgcaggcgctggccgaagtgttcggcgcgaccgtaagccatgcgccgaccatcatgcacggcaaaaccagcttggtggagcatatcgacgatgagatcttcgaaggcgtcgccaatccgatgaccgccacccgctaccattcgctggccgtggagcccgattccgtgccggaagagctggtggtgaccgcgtggacgcaggtcgaccacatcgtgcagggcatcaagcattgcagcaagccgatgtatgcggtgcagttccaccccgaatccgtgatgacgcaggacggctaccgtctgcttgcgaactggctgaaggtgtgcggccaggagaacgccgtggaacgttccaagggattgcagcccaaggtcgcggcctaaggtcgcagcaagaagacgtgggaagtgcgaaaacgcatggtacaagcgatggtacaagcgtggaaacgtaagtcgcgcaatctcaatcgcaagaaaatacaaaatcgtaagaaaacacgaatcgcaaaagaacataagaccgtaatgaggaaggcccagctggcatttcagctgggccttccttgtgaatgatggcggttatctcgaccgatcagttgccttcgggagtgttgttgcctccgtcggtgttgccgccgttgccgccgttgttgccgttgttgccgttgttgccgccattattggtgctggacgacttcgtggtcaacgtgatcgtggctccgctgtcggactgggtgccggcggtcggtgacatgtctgtgaccgtgccatcctccgggccggaaaccgtgacctggaaaccgtagctttccaacaggctcttggcgcccgcatagcccatgccgaccacgctgggcacgctgatctgctgcttgccggtagacacccaaatcgtgaccgcggtaccggcctcgaccgtgcttccaacacccggctcgacgcgggtgacggcgccggaagcgatggaatcggaatattcgctttcgatggtgatctgcgtcagaccggcctgcttcagctgctcgataaccgtgtctttcggctgtccgatcagattgtcgggaatcttggtcatgccggacgaaatgtacagcgtgatgatcgtgcccttggtctgctttgaatgggcggcaggatccgtgcttaccaccttgtctttttcgatggaggcattgtcgaccgtgcgcacgttacccaccttgaagccggcggcctcaagaatggatttcgcgtcatcctggctcttgttcgacacatccggaacggcgaccgactgagggccggtggagaaccacacggaaaccgtggagcccttggcgaccttcttgccgcccgtcggattctgcttggtgatggtgcccttcggctcgcttgaatcggaatcctctcgggcatcgagcttcagacccttggccgcgagctgctcttcgacgcgcgcctcggaaatattcgccgtggcggtgaaatcaggaacttccaccatgtcggcggtggagccgctcttgttcagcatgaagaacacacccagaatgaccagcagcgccaccagaccgcccaccacggagccgatgatgatctgcttcttcttacgcgccttagcggcctcggcacgctgttccgcgcgggtttttgtggatacgccgttctgtgggttcggtacggcctcgaactggcccgtaacgggattgaacgcctgcgtcgcggcggtttcaccggcaggagtcatggccacggtgttcgcgtccatttcggcctgcttgcgtgccttcatattggtcagatcggtcaacggattgaacgcggccgccatcggcacgccgccgttcatgaacgtcagcaaatcgttcttgaattcggaagccgtggcgtaacggttctgacgatccttcgccatcgccttcgcgcaaatcgaatcccacatcttcggcaagccgggaacgaccgaacttgggggagtggcgacctccgaaacatgctggtaggcgatcgcaaccgcggaatcgccggtaaacggcggccttccggtaagcatttcatacagcacgcaacctgcggaatacaggtcggaacgcatgtcgacgctttcgccgcgtgcctgctcgggagacaggtattgcgcggttccgaccacaccctgcgactgcgtcatcgtggcggcggaatcgtcgagcgcgcgggcgatgccgaagtccatgaccttgaccacgccctgctcggaaatcatgatgttgccgggcttgatgtcgcggtggatgatgcccatgcgatgcgaatactcaagcgcgttgagcacgcccatcatcacctgttcggcgtcgcgctggctcagagcgccattcactttgagaatgtcgcgcaaggtctggcccttgacatattccatcaccagatacggcagatgttcggtctggccggtttccgtggcgacgacctcttcgcccgaatcgtagatgttcacgatattcggattgttcatctgcgccacggaatgggcttcgcgacggaaacgctcaaggaagatcttgtcgttggcgaagtcggcgcgcatgatcttgaccgcgacggtacgcccaaggcgcgtatcgagcgccacgtgcacttcggccatgccgccacggccgaccagttggccgagctggtaacgtccaccagccaaagaggtaggcatgttgatgttcatccctgttccttcccatcagtgctcaaggagatatgaggtctgctgaccacgcgtcgcggaagtcttccgcctgtaggcaccaccatcgtgtcagccaattgtgtctgctggtcgagcagacggcgttcgatgcgggacaacgtgcgcgacaccgtcaacgcgtccttcggacggtcaagcgggtctttggacagcatcgacatgacgaattcacgcagctgcacatcgacggagtctggcagcggcggaaccggattgttgacatgtgctgcggcgatgtcgaccggcgtggcacccgtgaacggacgatgcccgcacaggccctcgtaggcgacgatgccaagcgaatagatatcggattgaggcgtggcatgctggccctgcgcctgctccggggaaatgtactgtgcggtgcccaccaccatgccgtcctgcgtgatctgctcctgattggtggagtaggagacgccgaaatcggtgattttcacctcgccggaatcggacaccatgatgttcgcaggcttcacgtcgcggtggatcacgccatgcgaatgcgcgacgaacaggccacgcgcggtctggatgagaatcggcagcagacgggtcggctccatcgggccgttctgctcgtggaacaggtcggccagcgacttgctgggcacgtactccataacgaggaagccgatgccgtcatgttcgtaatattcgaacaacgcagcgatattcgggtgtgcaagattggcggaattatgcgcttccgcacgcaggcgaagcagcttggcctcctgcgtgacgcccaagtcgccgcgcaacgccttaatggccacgggacgacccaactggatatcatagcctttccatacttcgcccatgccaccctgggccagacgggcatccaacctgtagcgtcggtggatgagctgtccttcaatcagtttcactctgccagcgcctcctgcatcatcgccttcataatcggacccgccgcgaacgagccatacaaatccacattgtgcaccaccacggcaacagcgatcttcggatcgtccgccggggcgaagccgaccacccagccgtcgatggacgtattgccgtcaccgatctgcgcggtgccggttttcgcagtcacctgcacgccgtcgatggccagattcgggttctccttggtgaccaccgcctccatcatctgcgtgagcttgttggcggtgcccgaactgaacgcgcggctcatcacctgcggcttggtctgcgaaataacagacaggtcggaggaacgcacgcgatccaccagcgtcggctgcatgaccttgcccccgttcgccacggcggccgccaccagcgcgttctgcagcggagtcaccacggtgtctccttggccgatggacgccaaagcgagcttgtcgtcggtcgtgtcggtcgggaacttcgacgccacgctcatccacggcgtgcccgtggaatcggatccgtcaaccgtgatcggactgtcgaaaccaagcttcttggccatggacgacaccttgtcatcgcccaaagccacgcccagctgggcgaacgcggtgttcgacgaatacgccatcgcgtcttccaacgtgatcttgccgtccgaaccgtcggcctgcgacaccgcgttcgtcaactgtgtgaccgtgcccggaagcgtgtagctcgatccggccggaatctcggtgtcggtctggtattcgccggtttccagcgcggccgccgccaccaccgttttgaacgtggatcccggaggatacagctgcgaggtggcacggttgagcatcggattcgactcgtcttgcgaaagcgtggaataattgccgttcgcttcggacgtgtcgtggctcgccagctggttcgggtcgtagcttggcgtgcttgccatggcgagaatacgaccggttttcacttcgatggccacggccgcgccgtcattgttggcaagaccgttgtaggcggcctgctggattttcggatcaatggacgtttcgatggtcgcgcccttgttttcctggccggtgaacagcgatttgaaccgctgccataccagctggtcggattggcccgacagcagcgagctacgcgacgcttcgataccgttccagccgcgttggctgatcgagaagaagccggtgaccggcgcgtacagttcgccggcggtataggaacgctggtaggagaacgcgtcgttcgaagggtcggatttggcgatgacggagccgtccgaagcgaggatcgcaccgcgcggagcgccatactcgtggtagagggcgcgggtgttgcgcgggtcgttgttgagctggttcgcgcgaatcgccgtgatgatggtggtggacatgcccaggatgacgaacagcgccaccacgatggtgaagagttggcggagtgacttattcatgcttggctcccctctgacatgctgtccgatacgttcggagtgcccgatgggggagcgggtggtacgactggcgtgcctgaaaccggcgtctccgtggagatgatttcagtggcctgcgcggaggcctgcgcggaggcctgcgcggaggccacgcttctgcgggcgcggctctgcttgcgggcgcgcagcgcctgcatcgcctcatattggaacgtgtcgctatcgatatcggattcgggtttgttcgccgagttggaaatcaccactaggagtgctgccaacatgtaattcgctatgagtgaggatccgccggcggccatgtacggaagagtcaaacccgtaagtgggatgactaacgtgatgcctcccaccacggtgaacacctggaaggccatggtgaacacgaggcccgatgcgagaagcttgccgaacccatccttgattttcatcgcagtgatcatcccggcggcgatgatgagcagatagagcatcagaatggccatcagaccggtgaggcccagctcttcgccaagtgccgcgtagatgtagtcggagttggcgatcggagtgagcgacgggtgaccttgcccaaggccggtgcccatcaagccgcctgatgccaggccgaaaatacccgtgacgagctggtaggatccgccgtactccttgttgtactgcgccgagtcgaacgggtgcagccaggcgtcgacgcgcgcgccgacatggctgaaaatattggccgcggcgaacgcgcccacggcgaacgcgatgaaaccaatcacaatccaactggtgcgccccgtggccacgtacaacatggacacgaacatggcgaagaacatcaacgacgtgcccaaatcatgctgcacgaccagcacgcccatcgacacgatccacaccacgatgataggcccaagatccttgatgcgcggcagctgcaggcccagcaccttcttgccaccgaccgccagctggtcgcggtggtcatacaggtaggaggcgaagaaaaacgcgaggaacagcttcgcgaactcgcttggctggaacgatcccaaaccgggaatcttcacccaaatgcgcgcgccatactgttcggaaccgatcaccggaagcatcggtgacagcagcaacaccaaaccgatcaccatgctgacgtacgagaaccgcctcagcacacggtaatccttcatgaagatcaccagcagattcgccaaaaccagcgctatcgacagccaaagcaactgtttgaacgcgacggacgtgttcgaatcctggtcgatgcgggcgatcatcatgatgccggtgccagtcagcaccatcacacaacacatgatcgcctggttggcatacggctggaaacgcagcggcaatccccaggaagtcaggaacaatgcgccgacaaaagcgagcatccacaaataattctgcggaaaaccgccggtggtgcgttcgaacatctggaagaacgcgacgccgcaaatcagcatgctgaacagcagcaggccgaattgcttcagacgggttgccatcatgactggtcaccgcctgacttgtttgccgaagcgtcgtccgatttgtctgatttgcccgacgacttgtcggaagtcgtaccagaggatttgttgtcggattcgccgtttgccttgtcttgttccttctgtgcggcttcgtcctgctgttgcttcaactgctttttgatcagtcgcgtatgcgttttcgcctcgccgtacgtgtcgaaggaaatgccctgcgcaagctgttcctgccagcttggcggcagttcgctcgtcttcatatgggtgtcggtgacggcgtgcgacagctggaagccgaacaggcttgtcggcacgccttggaaaatcgccacttcgccgttgtcgtcgccgatgtagtacttggtttggctccaacggtaggttgcgaacgcgccgcccgccagtcccagcagtaccacgatggtgacgatgatggcgatcacacggttgcgtcgggtgcgcgtgcgcttcgttttgcgctgctcgatatgctcgttgcggatggctttggcgacttccggatcgttcggatcggcggaaatgcggccgtcgtccttctgtacgacggggatttcaccggtgtcgggattggtgcggtcgccgttctcctcgcgtaccgtggacggttgcgccacgcgctgttccggaggattgtcgtcctcgttgggattcttgccgttgcgcagtgcggcggcacgggcggccggcgacttcttgccctcgcgcagtgcgggagcggatgcgaccggctcgttgatgatgtcggcgatcggttcaaggcttgcgctggccgcgccgccaaccaatggcgtctgatgcggcaggtcgaacgcgtccgcgtcaagggcgagcgtcgcgtcggcgatgaccgcggtgacgttgtcggtgctgccggcacgaagcgccatcgaaaccagctgttgcgcgcactcctcctgatcggagcaggcggacagcacctcctgcaatgtggaatcctcaagcacgccgcacaaaccgtcggagcagagcagccagcggtcggccggatgtgccttgcgtatggcgatgtccggactcgaatcgatatcgaaatcacccagaacgcgcatcacgacgttgcgctgcggatggttgcgcgcctcggcctcgctgatgcggccggtgtcgatcagatgctgcacgtagctgtggtcggacgtcatgcggatcagacggccgtcatgcagcagatatgcgcgggaatcgccgatatgcgccaagacccaatatccggccaccaatgcgaccgacgtgacggtggtgcccatgcccgcgagacgacgttcgcgcttcgctttgccaacgatcgcgtcatgcgcggccataaccgaggtttccatcatgtgggcgataatctggacatcgccctgcacgttgtcttgctcgatatgcgccaatgaacggatggcgatggtggaggcggtgtcgcctcccgcatggcctcccatgccatcgcagatggcgatcagatgctcgccggcgaacgcggaatcctggttgttggaacgtacggtacccacatcggaaacgacggtggaatacatgaacagcggttgtgaagcgggagaagtcggcaaacgggtcacctcaattcaaaggtggttgcgccaatgcgtacgggaacgcgcgatccgagaatcatcggagcgttcagacgctgctggttgaccacagtgccgttggtggaacccaggtcttcgatggcccacttgccggtggcgggatccgtatagacgcgcgcatggtgggacgagacgaattcgtcgtccagaaccacggtgttcgaagcggaacggccaagcgtgatggtgttgccggacaaagggacggaactgccggcaagggggccatcgatgatgaccagcaaggtgggtttggcgcttgatgtggcgctgacgactggtgccgggacggccacgggcgcgggcgcttcgacggccttgcgcgcgcgacgctccttacggcgatgagcccgcgacttgcgcgggctgagcgtttccacatccctgtacagcgaacgcaccgtacaggccacgaagatccagagcagtacgaggaagccgtacttgaggatcgcgaaagtaagttcagtgagcatagaggcaactcccgaggttggggttggttactcctgatcctgcgaagaggcccaatacaggattcgggtgcggccgatggtgatcgtgttgccgtcgagcaacgtggccgcctcgacatgatggccttcgacatacatgccgttggtggagcccagatcgcgtgcgatgacggtgttgccgttgtcggtgatgtcgatctgcatgtggcggcgggagatgcccggatcgtcgatcacgatatcgcagtcggatccgcggccgatgatggtcttgctttccgtgagcagatactggtgttcgccgatttccagcatcgggcagtcttcggtctgcgcgtcggtggtgacgggcacggtattgccttgcacggattcgctcgtcagcttgaaattgctcttggtgaggtcaaggtcctcttcgaagatcaccacgaccggaccgacgaacgcgtaatgctggtccttcgcgtactgggtgaggttgtcggccagctcattggccaacgcttccgcgccccattcgacgatgttgttgaaatccggcgtgctcagcttgaaacggtactcattcggcgccacggtacggtctcgcgtgacgggcatggcctctttgtcaatctcacgttccagagcgctggaaaggtcgacgggctgcaggtccttggacccgaacttggcgaaaaccccgttgacggcgccttccacgcttttctcaaatcggtcgagaacactcatgcttgtccctttctatcctcacccatcctacgcggtagagcgccgagcgccaattcgtaagtcctttaattgcaaaaatttcatgcataaatccatccccagcatcatttagggggtatttatccgcgaatatgactaccttcgcccccgatttccacgatgtacgaattcacggaaggtggaattgggatggtgataggttgggagcatgacagatgcgattcgacagttcccccgtaaaaaagcacgtaccttgcgattttcctgcggcgctccgcgttcggcgcgcgtgattgcagacggctcccgcgcgctgttcctgcgttccgacggtccggaagacaccgtcacctcgctgtggatgagcgtgatcgacgaagacggcaacatcggtgagattccgctcgccgatccgcgcgtattgcttgccgacgccgacgcggaagacgttccggcggaagagaaggtgcgacgcgaacgtgcgcgcgaaggcggatccggcatcgtctcgtattgcgtcgacggtgccggcaaccgcgtgaccttcaccatcaacgggcagcttttcctcaccgaccttacggcgggcgcgacgcgagccatcacgatagaggaagatgaactcaaaccggtgctgaacccgcgcatcagtcccgacggacggcacatcatgtacaccaccggcacgtatctggtggacgtggatcttgccaacgatgaagaaaccggcgacgcgatttcggtggtcgcctcggcaccgcagaacggcgaatggaaaatcggattggcggaattcgccgcaggcgaagaaatggaccgctacgacggcttctggtggtcacccgactccaaatacgtgctcttcgaaacctacgacgaatcccccgaaccgatctggcatctgtcggaccccgcgaatccaaccaatccggcgcaagccaaccgctatccgcaagcgttgaccgccaatgccgacgtgcggctgaccctgctggaactcggctacgacagcgacaactgctgctacggggcaatcgccaacgaagtgcagtgggaccatgaatcctacgaatatctggccgccgtaagctggcgtgaaggccacgatccgatcatccttgtgcaagaccgcctccagcagcacgatcaggtgctcgccatccatgtaggcgagccgatcgccaccatgcgtgacgcggaaaacggcttcaccgacgacaatggcgacgaggtcgaaaccttctccatcgccattcccgaatacgcggaaggcgaacgccccggcaccacgcgcgtgcttgaggaacacggcaacgactactggctcgacctcatccacggcacccctgcattcactccggatggacgcttgatctgcgcgatgaacgacatggacgtcgatacgaaccgactcaccgttgatggtacgcccttcactccggccggactgcaggtgcgcgaagtgctcgacgtgaccgacgacgacgtgctgtgcgtggtgcagcgcacccctgaaatcctgcctgaaagcgacctgccgttcctctggcagtcgaatgcctccgaccatgacgcccgcagcttcgacgtggtgtcgatccgctatgacggcacatgggaacccctcacctacgcgcccggccagtggagcatgtctcgcgccggcaacggctgcgtggtgaccggacggggcatggacgacgcaaccgtgcaaatgcagcattgcatgaacatcgccacaaccgacgaaaatggtacggacgtggcgtcaatggtggtcgcaccaatcgaaaaccatgccgaaacccccggattcacgccgaacgtgcacttcacccgactcggcgaacgtgagctgtacacggcgatcgtgctgccctcatccgatagtgaatacgcgcacgaagccatcctgccggtactcatgaaaccctacggaggccccggcttccaacaggtcatcgaaagtcaatccttctattgggacgcgcaatggtgggccgaccaaggctacatcgtggtcaccaccgacggacgcggcaccaccggacgcggcccgcaatgggaccgcgccatctacgaaaccatgaaatccgtaacgctcgaagaccagatcgacgccgtgcgcgcgctgccggaagcgttggaagcgctggctggcgagaatgcggcagccaacgttccgcaacccgatctcagccgcgtcgccatgatcggctggtcgtacggcggattcctctccgcgctcgccgtgttggaggcgccggaaacgttcgccgcggcctgcgcgggcgcgcctccgaccgactggacgctgtacgacacgcattacaccgaacgctatctcggccttgactcggccgtgtacgaacgcaacagcatcatcgccgacgcgccgcagcttgatcgcccgctcatgctcatccacgggttcgccgacgacaatgtgacgatcgcgcacagcctgcgcctgagccaggcgctgatggcaaccggacgtaagcacacgttcctgccgctgaccggcatcacgcacatgaccaacgacgagacggttgccgaaaatctgctgatcctgcagcgcgatttccttgcggaagcgttggggtgacggcaccgtgacgacagtgcagtaacggtaacggcaacatcgcaaacgaaagtgctgcaaagcgccgtaggaagacaaaacgcgttcccctgcgattcccggactgccaagcatccgaacgtcgtgggcgaacgcgttcccttctcgaatgccaacataaaacaggcgaaacgacttcgcaagcgagggggtaccacatttgtgtacccccccccaaaaaaaatctgggcttgaaaaagacggaaatcggtggatcgggctcgtcccaaccctgatccgcagctatggtcaaacctgcacttgttcaagcaaaccgggcgaatcgtcgatgacggtcaccggaatgtacgcaaacaacgtccaactgccgtcctgcgcagacgtggtgagcgtgccctgatacgattcgagctgcttcttgaacgaggcgagcccgtggccgcccggtagttcgtcatcgcgctcgtcagctccagccatgtcctctttcatgggattgatttgcgtgatttcgatggcattcggccggagcatcaccgaaagatcgaccttgcttcccggagcggcatggcgtgcgatattcgcatagatctcgcgcagcagattattggcaagttcggcgattgcttgcgatgcgctcggcttgccgcccgcgcagtgccggatggacgtgatattgaagccaagcttgcgcaagcgacgatcgccgtcatccagtgttgctcgcagcagattggccaacgcttcgccgtcggcgtcgccggggagagtggtggcgtccatattcaattcgtcgatgacgcgatgcacgttcgtcaatgcggaaagaatatattcgttgatttgacgccagtcttcggcatcggctgttgtggttgccgtagttgtggttgcgttggcagggtcagcagcgacgccagggccgctagagttgccaccgatatgccgttgcgccacaaacgacgctgctgacaaatcgcccgtcaccgcatcgtgaatggcatcggcaatgcgtgcgcggctttccaattcctgcagacgattcttgttctgcgccgcttcgaagcttttctgcgttgttttttcgctccaactcaacgtccgaccaagcagtagcaccatggcatacatgctgaccatggcgacggggttggtatttgggtcaggggggtcaatcagcagaatgttaacaacgtaatatatgagtaacgttgccacgataatggcattagtgctgtatgcgagcatgccataggcgtaaagctgcgcgggaagagaatttcccaaatgcgcgtagggagtaaacagatcgcctatggaggcaatcacgagaatcgccaccgatgtacttttcagaaacagcggagacagtatgagcgccgtaaccagcatcgcaacccatatcacgccaaatatgtcggtaggaggctcgtagcaaacgccgtatatggtccatgcaagcacgatcagcataatggcgaaacggattggatgccacaggttcggatgctgcgtgcgcatacggttgcgccacgcaatgtactgagttgcgggtttagagcgcattggacctcacccacagtgccactgcctgacgcgaggtcttgcagttgagttttcttaaaatactttgcatatgtttgcggatggtggcttcggaaatccccaaacgctcggcgatgtcccggtcaagcatgccctccgcgcacaaggaaataatctgctcctcacgaacggtaagcgcgggagtggtctcagcctccctgctgatacgcagattggccaacgcaggcggctcaaatccctccatcacctcgccattgcacatacgcataataatctgcgccaactggtcggcattctccttaccaaccaacccttgcgcaccagcctcaaccagcttgtcccgataactattgatggaaaaactggttgcaccgagaatcggcatgcgctggcccatcaaacgcaaccgacgacacgtggcggggccttgcaatccctccatcgacatatcgagaatcaacaaactgacatggccgttcgcgtcctggcaacgttctatcgcctcacagcctgaagtcgccgtccacaccacatacgcggtcggcactttgctggcaatgacggcactgagcgaatccagcgctcgcggatcattgtcgaccagcgcgatgcggtgaatcttgggatgcttttcccgcgtggacatcatgcgatcattttccttttccgcacagccattgcagccatgttgggcagttggaatcttgggcagcggagatatcaccgttgttgtcaacgggagttgccgccgcgtacgcatacgttggtgtgccggtgagagacagcgttaccaccatcagcagtgaaacgaacttcatacctccatagtatgcgaggatggcgcgcgggggtgacgattcggttgttccggtacgccgttgatgcactgacgcatcgttatacagcgcgtatgcctgtgcttagtttcgtcttggcgccgttcgcctaagatggaaccatgactatcacgctcatcgacgaggcgcgctatgacgccgaaatggacgctacggtgctgcctgcgctgcaggcttgcatgacggaaggttggatggaaccggccaccgtcgattgggaaggcaaggcgttgcccaagttggagcgccccggccggttgcattactaccgctacgacgcgcgcacattcgacgcgttgcgcgaggaaggcgcttcgggcgtatttcgtggcacgatcgtcatttcgcacggattcaccgaattcggacgcaaatacagcgaaatggtgtggtactttctgttggccggctattcggtgtgcgtgttcgagcatcgcgggcatggccattccgcgcacgatatgagcaatccaagtttggtatggattgacgattggcggcgatatgtggccgatttcgccacgtttgcacagactgtggggcgtgaggcggcggatggtggcccaatgtacctgtactgccattccatgggcggcggcatcggcgcggccgcgctggaacgttacccgtcgctgttcgacaaggcggtgctgtccgcgccgatgatcgcgccggtggtcggcatgccgacgtgggtcgcacgcattgtggtcggcgtaatctgcgggcttggcttcggcaaatcgcgtgtgttcgggcataccgatttcgacggcaacctcaatctcgacgactaccgcggggcctcggaggcacgcatccgctggttccacaagcaacgtttggcggacgtgacgtgccagaccaacgcggccacgttcgattgggcaaaccaggcgatggcgctttcccgagccgtgctcaaacctgacatgtgtggagctatcgaagctccggtattgctattccaagccggacgcgacgtgtgggtgctcaacggaccgcaagatgacttcgtcgaacgtgtgcgagaaggcggcggttccatcgaaaaagtgcgatacagccagtcattgcacgaaattttctccatgccgaatgctgtgctcggatcatatcttggcaaaatcctcgattttttgtcagcgccgaacgcaagcttggcggaataaatctgttttgcataactgacgtttaatatgcgtaccgtgtgcgttacaatcgccgtgaatttgccgtgaaagccgtggagagagcgagggcaggccgtggcaaagcaaacgtcgggacgggcgtcgcaatcgcagaaaacttccgaatcgcaaaaaactacgaaaaaaactacgaaaaaaacggaacatgtgctggaacagacgccgaaaagcctgctcatcggcactggcatgacattgctgggcggtgccatgtggggtatgaacagcaccgtggccaaactgctgatgcgcgactaccagctggatccgatctggctttcctgcgtacgcgcgctattcgccagcctgatcttcctggtcggatcggccatcaccacaccgcagaaactcgccggagcggtcaaagacgtcaaatcgtatccgaaatatctggtcacgacactgatctgcgtgcttctggtacaggtctcctacctgatgaccatcgactggacgaactccggaaccgccaccgtattgcagacgctcaacctgatcttcgtgctcgcctgggtatgcctgcgcggcaaacgactgcccctcaagcgtgaattggtcggcgtgctcctggcgttcgcaggcacgttcctcatcgccaccggcggcaacttcgcctcgctgtcgttgccatggcaggggctcgcatggggactggttgacgcggtgagcaccgcggccatgtccatcctgccggtcgtgctcatgctcaaatggggcaacatgaccatcaacggcatcacattcctcatgtccggactcatattatgcccgttcgcgcaaccgtgggcgaacattcccgcactggacgcgcgaggcgtgcttctgctgctctacaccatcgtatgcggcacgttcctcgcgttctggctctacatggcaggcgtgatgcgcgtcggcgcggtgcgtgccaccatgctcggcaccagcgaaccggtcatggccaccatcaccgcagtggcatgggccggcgaaacgttcaccttcaccgacctgaccggcttcgccatgatcatcatcatggtcttcctcgtgcgctgaccgctcgccatagccataaactgtccgattctggagaatcggacatccagaacgcaaaacccataccttagttgtccgattcaccagaaacggacaactaaacaggtaaaactgccccacagttgtccgtttctccagaatcggacacttatggtgcgcacgtcggtgccggcgagcacgtcggccagatgcttggcagtgttcgggattgccggcagagtctcttcggtccaagcgccgaccgcgttcacgaccacgtcgaatactcgctgactgaagtcggcgaaagcctgcgcccgatcatcgatgcgatgaagacatgggggaaccattaccgaaacgaacacgagttctgattgttccagtcactggagttgtcgggagccgctgagctctactgccgcttgggaaacgaaaaggccggaacctttcggctccgacctttcaccatggtgcgagcggggggagttgaacccccacgagcatacactcactgccacctgaagacagcgcgtctaccattccgccacgctcgcagacaatcgactaatctacacctatcgttccgataccgcaattacggcgtgtcgcgatggttacggtgtccgattcacccgaatcggacagtctggggcgttcggatgatgcgtgcatgactgatttacccgaatcggacactcgggtgagtggaggatgcgctgcgagtgaccgattctggagaatcggacaaatagacatgcgaatacgcggctgtgaacgggcgtgaatcaaggcagcatcaaatcggtaccgccgagaaaacggtagccgccgtcatccagcaatcgggttttcgcaaaatgtaagcccaggagcgtggcttgtacctcgtcgatgccgtaaatgacatgctcccagacggtctgtccagaagcgtcttccagacgaacgtttacactccaggcgtcctcgtcgatttgcggttcggaaaccgacaacacccgatctccacccgcgtattggaattgtcgctgcatgctcgtctcccatcaaatgcgcgtatcttcgattgcgggttgttcgctcttcgggtcggaagatagtgtttggctatttgtcgtattggaactttttcccgctaggcaggcggcataggctgtggctgccccggcccagcatactgcggccgcagcaccgtgtaggcgtttgcatgttttccctaaaagtttatattcgtgatcacacgttgcttttgaggagactgtgactgcagctgcattgcttactgatggattactgatggcgcatgggggcattccctgaactgttgataatatacaagcgaaggtaattgttagaatagttttcagcataatttaatgtcctgcgataactgatattggaattaaattaaaatattcgccagaatttgtgctacgcaatgtgcagtgcttgcgtttacgccatgctgacggaggaattgctcgattttgccagctgcccaattctcaggtttttgcagaaagccggagagatcgccgagccattttgctccactgaaaatttttgccgctactttaagcgctttggctacatttcctacggctccacgactctgtggcacgtcatccgtgtcattcaatgattgcaaggcgtttgcatttttagtggggaatattccggaagcctccgcctctgccgggtaagcatattgtttgtcggctgtgggctggacggagaggctatgtgcttcgtgttcgattgctgcgctgttcggcacctcatccatgctgggaagcgaagcttcatctgccattgctgtcgcgctccccgatgcaagtgtcgcacaagccaaaagagtcgcaataacacgtaacgtgttctttttcatatatatgtcctttcgtcaagttgacgtgacatcagtcgagagtagaagcgtgttcgcaattgtgatagagtgctgtcacctgttagggggacatgtcgcattaaatattcaaacgggtgacattgctgttgtacggaaccgcattgcgtgatttacatgatgacggaatgtgtcccccggtgaaaggtgtgaatatgcgacggaagcaaaatgcatgcgattcgaacggtggcgtacatgctgagcgcgtgacggccaacatgcatgaccttacatatggcttgaaagattttttccgcgaggtctttcttgataaggatgatatcgactatgagcgccgctttgacgtgcgttccttgccattgctggttgtagcgatggctgcaggatggctctattctcgtgatggaaacggattctatgcgtgtgtcagcgcgatttttgctgtttcctatactgtgtatttcatcgtcaatcgaggcgtgtacatcgtgcgcctgttccgtggggaaaatattttcggtaaacggcgtgtgagatgcatgaaataccgtggcacgatacattcgtcggttgcgggcgggctggcaaaagccttggaaaaattcgttgataacgatacgctgtatgcgtatatcggcggatatggtgttccgttgctgggcactgcgacaatgattgcttatgatgcgtcgcactggttatggttggcattagttgggggagtcttgtgcgttgtatatgcgctgtattggctgatatatgcatttgttgccgcgcatcgggcgcttatcgcagtgcttgcggatcgcgataggagattggaacaggcgggttattgcatgacggttatgcgccgagatgcaaaattggccagcaggacgcatgatacggttaccggtggtctgtcgtatattgcctttattgcgcagcagcagctggagggtaaaaccttatcggacgaggaacgggttgcgtggaaacatatcgatgatgtggctcaacgtacgatggacaatgttcatgaagttattgatattcttggacgagatatcgaccccgcaaatcccgttggcggcgaagggtttgattgcgaatcgcaagaaatacagatgccagatgtttcttcattggagagaattattcgcgagcattgtgatgagggggattctcggcttaagacgctcgggtttgttggaacaagtgagattcagctggatgttgcggatgctgatgatactggtgaaagtgtttgtgcggatctgattgatgagtgtacaagtctgattgatgagttatacaccaatatttcttgtcacgctgatacgagtcagccatacgctgtttttgtcagtagcgagaacggatgcctccgcatcacgcaggtaaacgctatagcgtgcccgcgcgatgcgcagagcggctataagaagaaggtttcaggaaggggacttgcgtttcatcggaggatgcttgacgcgatgagcgggtcgattactacttgtgaagagggtgatacttggacgctgcatgtggtcataccgttgtgaaaacaataggttttggcgtagatatttgataattattcatgctgaatctttataaaatattgcaagtaatttggtggttaatgtaatggaaactaatgtggaaagaattaacaaattagttgaacatataggaatagtcgacaatgatgtgttgacgttgggtgcgttgtctagctatttgactcaacgatttggagacgagaaaattttatggcgatgcacgcttggtaaaaaagctgcggaattatgtagtaattcgcaaacacgtccccagatattactcatggatatgtcattatctgatgccgatggcgtgcagatttgccaggagattcggcgtactgttgacgatatgccgattttggcgattacttcttttccgttgcgccgatatgctgctgcggtggctcaggctggagtgcaaggcattgtcgcgaaacgaaatttgcgcactattgccgctgctctcgagtgcgttgtatctggacacgtttatctgccggatgagttagcggaaaccatgccggatctgcattttgagttgcccgtacaggcgcatcgtaggatcgtagcagagactcttggcgggcaggccgtgaaaccagttttgtccgatcgggaaacggcgattatagccagatatgcgcgagggcagaccacacttcaagtgggggagtgcttaggattatcggagaacactgtcaagacttataccaagcgtgccatggcgaagcttggggcgaaaacgcgaggtcaggcaatagccctctggctgatgcaaaccatgaggcatggtgtgtgatttaggcagcttttatctctgataaacgtatatgtgctgtgaccgattctggagaaacggacacattgggtggtgggtggctggggtgaaacggctagatgtatgcatgacacgcgcggaacacatgaaaaaaggcgccgacgggtttgttcgtcggcgccttggaatgcggaagtatggctcagcattcgtttgggtggaaggcccaagtgaaatgcatcatccgcgggaaccgttggcgtagaagcgggccagggtttcgtcgcggaattcgtcgaaatatccgccgtcaatcgacgcgcgaatatcgtccagcagcttcacgaagaaatgctcgttgtggatcgtcgccaatgtgaaaccattgaattcgcgggcacgcaacgcatgatccacataagcacgcgaataatgcgtgcacgtgtagcaatcgcagccctcttcaagtgggccaaaatcatgcttgaattgcgcgcgcttgatgttgtaacgtccaccgcgcgtgaaaatcgcgccatttcggccgcaacgcgccggtgcgacgcaatcgaacgtgtctccaccattctcgacgcatgcgaaaatatcgtcgactgcagcgatgccgagcacgtggcgcggtcggctttccggcatcgcatcgcaaatccaggcgcaagtgtcgccgataatgcgcttttcaatcgcacctccaataccgacgccgtcgaaatccaacgaagcgatctgttcggccgcatgcctgcgcaaatcctcataattcgcgccctgtaccacgccatacagcgcctgatacggcttgccgacgcgctcttcggtaagtctcttatgctcggcaacgcaacgctgcgcccaacggtaggtgcgttccacggaacgctcctggtagccgcgcgtgttcatcagtgtggtcagctcgtcgaacgcgaacatgatgtcggcgccgatcttatgctggattcccattgaaatttcggcggaaaaacggtgcagtgagccgttgagcggcgatttgaacgttacaccgtcctcgtccacgaacgcgagacgctccttgccttcggcgatcacgtcgtctgatttcatgccggtcacgtccatggcgagggttttcttgaagcctgcgccgagcgaaagcacttggaaaccgccggaatcggtgaaggtcggaccgttccagttcatgaatttggcaaggccgtcggcttcgtcgagcacttgttcgccggggcgttcatacaggtgaaacgcgttggacagcaggcattgcgcgccgaggtccttcatggtttcgggcagaacggctttcatcgcggcctgcgtggccacgggcacgaacgctggagtgtgaatatcgccgtggggggtgtgaatgatgccggtgcgaccatatcgtgcgccgcctcgccccttaccgtccgccgcgtcgggaaggcggtttttctgttcgaaatagaaggcgtcgcggcggcccggcttgcctggttccgctccacgcggatgttcgatgagattttcggacactgcggttgccgcgttttgcgtgtcttgcgctgtgtcggtagatgattcggtaaggcttgtcatgcggaatattttatgcgatagcagcgattcttgaaagtgctgcaaagaatgcgatcggtgaaatgaaaacaaggaagatgtggaaagtgcgatgaaggtgccgatcgcattttggtgcgattttcagattcaatggtgatgttgaacgtatttggctgctactttcaacaaacattcaggaaacttccagagcgagtatctttactcatagatagcagttcgagcggcacgattgctgatttgtgaaatgccgcgagacgaataaggagcgaaaatggctgaagagaacgaccagaacgccgtgcagccgcagaatgacgaacaacagaccgtgccgatgccgtcggttgatgcggaacagacgcaaacttacgcaggtgagccgtatgctgcagagtcggctaccgaaccgattgacgtgcagggcggtattgaggatcagccgacggccgccatgccagttgcgaacgatggcgcttcggcggaatccgcggctgcggcgggcgatacgtcggattatgcttccgcggcgggcgaacgtaccgtggttggcggttccacgcaggatgcgccggcccagcagtaccgtccggcaccggaatatggtgcgtacggtcccgtgccgacgcagccggctgatggcaccgcagccgcgaacgatactgcgaatggtgcgccgaacatgcccccgcagccgcaatatggcgcgtacgggcaggcttccggacagcagccgcagcggcctcgcaatcctttcttcggaaatccgtatgtgggtggaaatcagcagaacgatcagcagaacgcgcaatcgaataacggcaatccattcatgaagcccgctgcgcaaggcggtgccaacgtgccgccagcagcgccgaatactcccaataacggcaacccgtttgggaatccgaataacggtaatccgttcggtgccccgcagcagaatggcgcagcaaccaagccgaagtccgcttccggcgtgaccgggcatgtgatgaccggcgtggtggcggccctcgtctccgcggcattgtgcctcggcgtcggctacgcggcaatcaccaatggatgggtgaccgtacccacctccagctcgctgaccagcgtgaagtccaacacgtccggatccggttcggcgaaagccaaatccggcgaggccgcggactggagcgcggtggcgaaagaagtgtccgattctgtggtgtccattgacgtggcaaccagcgacggcagcgccaaaggctccggtgcaatcatcagcgacaaaggctacatcgtcaccaacaaccatgtgatttccggcgcgaagcagattcaagtgacgctcgccaacggcaccatctactcagcgcaaatcgtcggcaccgacaccaccaccgatctggccgtaatcaaactcgacaatccgccgagcaatctgaaagccgcggaatttgccgattccgacaatcttgccgtgggtgaatccgtgatggccatcggcaatccgctcggctacgatgacaccgcaaccgtcggcatcgtttccgcgctcaaccgcccggtgaccgtgtccgatgacaacaacaacgacatcgtcaccaacgccgtgcagattgacgcggccgtcaacccaggcaattccggcggtccgaccttcaatgcggccggccaggtgatcggcatcaactcatccatcgcatccaccacaacgtcttccggcaccgccggatccatcggcatcggcttcgccattccgtcgaacctggtaaagcgtgtggctaacgagatcatcgacaacggcaccgtgcagcatgtggcgctcggcgtcaccatcaagagctccacggttgaggcggacggcgtgacccgcggttgtacgcaggtgcagtccgtggtcgacaacagcccggcggccaaggccggagtgaaggccggcgactccatcgtggcgttcaacggcaaggcggtgaacaacaactattcgctgctcggctacgtgcgcgcctccgccatgaacgacaaggtgacattgacggtcgtgcgcgacggcaacaccatggagcttgacgtgacactcgaccaggaggaatcccaaacgaactccgccaacagccagaaccagcggaacaacggcaatgatggccagagccagaacggcaatggcaacggttacggtaatgacggcaacggcaacggaaatggacagagcgacggcaacggcagcaacggctacggtgacggtggcggcctgttcgacccgttcggcctgtggtaaagcgagatgttgatgcggtgcgtgaattgacggacgcaagttgttgcggtgcgcaagtcaagactgttgggctggctaaaacgtttcgcgacatgcgaacggacggaagccacccgataggctgacggcgaagacgcggctggcaccacgaaatcgcaagtacaacgaaaaccgcgaaaatcaacaaaaagcaagccaaaagaagaatgcaataagggctgtgtgagcaatcgcacagcccttattgctgtattgcggcacaaaaatcgcaaatatttgctatgctgaaaatatctttttacgccgtgtatcgatggctcgcgcgggcgaggcgccgatgggttaacaaggcgtccgatacgagcgtaaggagattctcatgcgtagaatcatcgatatttgctggcgactgtgcaaacaggttccgttactgccgattaccattctgtccgcgattccgttggcattgctgggggagtggaagccgtggggcgaggctgcgtgggattcgtggatttcgcaagtcggcgttgacgggttgagtgcattcaatccgggcgttgggcagtggattgtgatcgcgttggttgcgtacacgattgtggtgacggtacgcggcatgatcgacgatctgcggcacgggcatgttggcgtcgatctgctggcggtcgtcgcgattgcgtcgacggtcgcagtgcaggaatattgggccgcatgggccgtggtgctgatgatctcgtccggcgaggcgatcgaggaattcgcgcagtcaaaggccgaaagcaacctgaccgcgctgatcgacgcggcaccgcgaaccgcgcacgtggtcgtgctgcccggcatgcgggggcatgtgcacgcgtcgggcagcgagcatacggccgacgtgaccgccgacggatttcgtactgtcagagtgtccgattctggagaaacggacaaccaagacggtgaaaagcgtgcttttgcgtctgaatctccagaaacggacacaaaaggtgccgcgcagacgtatgatgcggctggagagcgtttcgaaacggtccccgttgatcaggtacagctcggcgacgtgatcctggtgttgcccggcgaaacggtgccggtcgacggtgagctgctgtcgggcgtggccacgttggacctaagcaacatcaacggcgagcccgttccccgcgaagtatatgcgggcgctcgcgtgatgtccggtgcggtcaatggctccacaacattgaccatgcgtgccacgcaacttgcgcaggattcgcagtaccagaagattctcgagctggtttcgtcggcgcaagagtcgcgccccgctgtcgtgaagaccgcggatatgcttgcagtgccgtttaccgtgctttcgcttgcgattgctgggattgcatgggcgatttccggattgccgctgcgatttgcgcaagtattggtgcttgctacgccgtgtccgctgttgattgccgcgccggtcgcatatgtggctggaaccgggcgacttgccaaagcgggaatcctgatcaaagcgcaggatgtgctggaaaatctaggtcgcgtatcgcatattttcttcgacaaaaccggcacgctcaccgtcaagcagccgcaggtcgtacgtgtagagaagccgtttgagacgagttcgccgttcaatgaggaccatattctcatgatggccagcgtggtggaaggctattcggtgcacattctgtcgaaaggcatcgcggcggccggacgcaaggctatggatgatttgtatgcgcggtatgcggcggggcagaggctgtgcgtcgagcgcgatttgccggggcacgggcgcgactatccggtggtgaagaacattgtagaggagtccggcaagggtatatccggcgaagtgaacgggcatcaggtgcgcgtggggcggttcgcatacgtgacggctgacgaatccggattcacgccggtgctgcatatgccggatgcgacgtattacgtgtccgattctgccgaatcggacaaacgggagactcagaatgcgctgcggatgtccgattctccagaatcggacactatgggagtgaggaacggggtgcctgacgatgcgcagcctgcagccgcgccctctacttccgcgtccgtcgcaacccaatccgccgctcgcaagcctgaaaccgcaaactcgctgtttgccccgctcgctcctgacgaaatggctgcatacgtggcgattgacggccgtcttgccgcccgcatcgtacttcgtgacgtgcctcgcgagaatgcgaagcgttctttggctcgcctgcacgagttgggtgtcaaggaactgtccatgcttaccggcgacaaggctgcgtccgcccgcatcatcgcaaacgaagtcggtatcgacgacgtgcagtccgaactgttccctgaagacaaggttgccgccgtcaagagcgccactgaatccaagcaccagaagctgtcgttgtggaatcgcatcaagcaacgcgtaaccggcgaatccaagaatcgtcaaatcaccatgatggtcggtgacggcgtcaacgacgcccccgtacttgcggttgccgatatcggcatggccatgaccgacggcacgtccaccgcggcttccgaatctgcgcaagtggtcatcatgaatgacgacattgcgtccgttccgcgggccatcgccatcgcgcgccgcacgaaaaaggtgatgttgcaggcggtgctgatcggcctcggccttgcgattatcggcatgatcgcggccgcgttcaatctgattcccgtggttgtcggcgcgttcatgcaggaagcgattgatgttgtcagcattctgtgggcgctcaccgtgcttttcgaccgtggcgaatcagcctgattgcgcctcgaaaccccgtatctcgcctatatatggcagatttggaggtctgtcagcaagtatttcgcttatatctggcaggtccatatgagaaaaccggacttagggggcgagaatacaccctctaagtccggtttctcaaaacagctctgccatatataacgcagatagctccggacgaacttcggaatctgccatacataaggcatgtataaggcagattcggaagttttgggattgtttacagcgagctcggggagatttctccagcgatcgatgtgtgcatccacttgccgaagtcggctccggtcacgccttgagacagcaggaacatgattttcgcatacgtggcttccagcgtcatatcgccagatccaattgcgccggcgcgtgcgatcgcatcacccgtctcgtaatggccgagcagtacttccgcctgctggcactgcgatgcaatcacaacgggaacgccatcatgcagcacgtcggcaatcacgtcagtcagtccaggctcgtcgcttggcacattgccgacgccgtacgcacgcaacaaaaccgcttccggccgcggcgtaagcatcgcttccaaccgtgctgcggaaatgccgggtgccatatcgatcaccgcaacatcatggcgagagtaaggctgaggcgacgtccaaccgcagccaaccgcagcggaatcgcccgcataccaatgccatggcgtgccagtgcgtgccagcgggccgacggaaggcgccgaaaaaccttcaaatgcccagctcgacgacttgctcacacgattgcccgcaaacaggtgatgtccaaaaaacagtcccacatcgtggaatcgtccgctcatcgcggcattcagcgcgcccgtgacattcgcagtggcgtccgactcgatcttgccaagcggatgctgtgaacccgtgaaaatcaccggcttgccaaaatcagccaacgcatacgcaagcgcggcgctcgaatagctcatcgtatcggtgccatgcaacaccacgaacgcgtcggcatcatcgcggtgcgcacgcaaatcgtcgaccatcgtctgccaattgtcgggagtcgcattcgacgagtcgataagaggatcaagttcggtgaacgtgaacaggctcgcgtccatgtgcgcgtcctccagcagacggaacagccatccgcgagtgtcggcgcccggaatcaggccgttcggcgagtcaatcatgccgatagtgccgccggtatatgtgatgtgaatgcgcattgccaccttcttacgattgcctggtacttaataagtacttgcttgcgattgcgggatggacgaattccgatatttcggattcctacatcccgcgattctgcgactacttgcgattgtacgtgcatctgccgcgctcatcgcgtacgattaatgcagccacacgttggattcatctggattcagcgcaaacaccaacgccagtgcgcacaaggcgaagaagtcgtaagaaagtgcataagcacccctgtcgcaaatgcagggaatgcattaggctagagcgcgtgactgaaactcatgaacttcgtattgctgtaatcggcgccggccctgcaggcgtctactcctctgacattttcctgcgccagttgaagaagctcggcgaggagctcggcctcggcactgccgcccgaatcgacctgttcgaaaagctgccggtgccgttcggcctggtgcgctacggcgtggcccccgaccacccgtccatcaaattcatcgcgtcggcactcgaaaagacactcgacaaccccgacatccacctgtattgcgacgtggaattcggcaaggacgtgaccctcgacgagctgctcgaacgttacgatgccgtgctgttcgccaccggtgcagtcgaagacaagccgctcggactgccgggcgccgatctggacggcgtatacggcgcagccaagttcgtggaatggtacgacggttatccgaccggcgctcgcgaatggccgcttgaagctgaggaagtcgccgtgatcggcggcggcaacgtggccatggacgtggctcgcgagctcatgcgcaatgccgatgatctgaaggagcgcaccgacattccggacaacgtatatgagggcatcaagtccaacaaggcgcgtgtgcttcacttgttcatccgtcgcggtgtggcgcaggccaagttctccgtgcaggaattgcgtgagatggagaagctgccgggagtgcagctgatcatcaacgaagacgatttcgatttggatgaagacacgattgaagaggccggcaaagacaagctgactcgtcagatggtcgaagagctgttcacgattcgtgagatggcggaagacatggaagatgacggtgacgtggattatgagggtaatccggctgaccgcaaatattacgcgcacttcaattccgctccggtcgaagtgttgggtgaggacggcaaggtcgttggcatccgtgtggaaaagaccgagacatcggcggacggcaagatgagccgtaccggcgaattcgaagagtatccggtgcaggctgtgtaccatgcgatcggctacaaaccggccaccgcgccgggcattgcgtacgacgagcgtcatgcgcacttggcgaacgcgaacggtgacggtcgtatcactacggccgctgaagccacggatgaagtgcgcgagcgtctgtatgcgaccggttgggcgaagcgtggtccggttggcctgatcggctccaccaagtccgacgcactgctgatcgtgaccaatatgctggaggatttgtcgaaggctgctgaaggcggtcgtgtggctgccgatcgtgatccggagtccatcgaccggctgctggaatcgcgcggtgtcaagccgatcgacttcgctggctggaagaagatcgatgcgttcgaacgtgccgagggtgcgaaggaaggccgtgagcacaagaaggtcatcgatccggagcagatgcgcgccctggctcacgcttaaggtgggtgtttgggatctgatctgataggtcccaggtttctttcatgcgtcttggatgtccgattctggagaatcggtcacccaagacgcattttttatcctgtgcttgtctgtttctggtgaatcggacatctggagtgtccgaaacatgttctgtatgtctgtttctggtgaattggacatgtgatgtggacgaaggacttgctacttgtccgattctcccgattcggtcacccaaaggcctcttggcatgcatcggatgtccgtttctgcagaatcggatatccggggagaagctgagcatgcgaacttccgcaactgccccctagtcctttccgcagtccagtctccagcacatatccagcaaaaactcaggctccgtttctacgctagtgaccatgaacggcaaattgcgggtgcatggccattgcaatggcttgaagacaacgctgttattcgcgttgatgtggggcgtcatcatgctcatttggtgggcgaccggtggcggccagcgtacgcttggtatctacattctcatcggacttggctcaacgttcgcatcctactggttttccgacaaacttgcgattgcatccatgcatgcgcaggaagtcagcgagcaggaagcgccggtactgtacaaaattgtgcgcgaactatcggcgaaggcgggcaagccgatgccgcgtatttatatcgccccaaccatgagccccaatgcgttcgcaacgggacgcaatgaacgtcatgcggcggtctgctgcacgcagggtattctgcagatgctgaacgaacgcgagattcgcggcgtacttgggcacgagcttatgcacgtgtacaatcacgatatcctgacgtctgcgatcgcttccgcaatggcgacggtcatttcgtatctcggctattcgctcatgtatttcggcggcggcaattcgcgtgacgatcgcaatggttcatcttctaacggtcttggattgctgggtgtgctgttgagcgcgattcttgcgccgattgccgcttcgcttattcagatggcgatttcgcgtacgcgagaatatgatgctgacgaagatggttccatgcttacggaagatccggaggcgctcgcgtccgcattgaataagatttcgaacggtgctgaggcgatgccgatgcagaagactgccggtacgcagtcggttgctgcgatgatgattgcgaatccgttttctgcggaaggtttttctcgcttgttttccacgcatccggcgactgaggatcgtattgcccggttgatgcagatgagtcaggagatgaaggcgcggggcgtgcagtccggctatttggctggcggttatgcgacgagcgggtatgcttcggcggataaccgtcggcaggatggggatgtctctggtgccggcgccggtgcgggtgcagggggatactccggtgggggctattcgcgagattattcgcagcatcccgtgcaaggcgggtatggtcgctgatcggcggcgattgcaatgtgcgcaggttgcgcaagtcatgcgtgattgcataggattccgctgattctgacgcgaattgtgtgtgtttcctgtggggatgcattgcagaatattttgatgtcatctgatgaatgacattaatgctgttgtggttgttgcgcgttgattgatatgcgatttggcaagtgggtgacggtatcgaatatcggtcgatggccgtgaattctgcgaatgcatgctagactaaatgattgtgcccaaaaggcacaaccttgcggatgtagttcatcggtagaacgaaagcttcccaagctttaaaggcgggttcgactcccgtcatccgctccattcgaaacccttggaatcgttggaattccaagggtttttctattgccgtaaaagacccgtgaagtcaacttcgcgccgcgcaactgtcggttgcgtcgcaaaattcggttgcgagtcgcaatgcaaccgaaagatggtggcgtggaacgagacgtttatgacaagctgttgcttggcaatcgccaataatcgcaagtcgaggcgatatggaaactcgacgaaatggcggacatgagtttcaaagagaatctgcagtatctgcgtggttcgcgcaacatgacgcaggaacagctggcaatgctgctgggcgtttcccggcaggcaatttcgaaatgggagtccgagaaggcataccccgaaatggataagctgctgatgctttgcgacatgttcggcgtgacgttggatgatttggtcatgggcgacgtgcgcgcgtcggcgggctgtgggggtgcgggacgcgtggacttggctgctgatacggatggtgtggccgcgtcggttggggtggccgacgctgctgttggcgcggttccgggggtaatcgggtttgcggcatcgcaggtcgcaggaatgtccgattctggtgaatcggacgtgagggatacgaatccgaatgtttgtgcgtccgtttctggtgaatcggacgcacaaggtgccaaaaccggtgttcaattgtccgtttctgcagaatcggacatgcggggtgggcggcaggtaggctggaatccgtgaatacggatcagaaacttcccgccgaatccgcaggcgaacgccccagtacccccctatttggtcatgccatatcacacgcggcgacactcatcggcctgttcgcaatcgtcctgtggggcttcatggccggcctcgtgcgactcgtttccgaatcgttcggcgccacgctcggctcggcgctcatctacactgtcggcggcatgctcctgctcatcgtgcgacggccgaaaccgattagccaagcgccacgcaagtacctcgtcgcaggcggactcatgttcattgcatacgagacgtcgatctcgctgtcgatcggtctggccacaacgaacgcgcaatctgtggaagtcagcctcgtcaattatttgtggccgacgctgctggtactgatgaccgccgccgtgtcgcacaaacgcggctcggtctccgaagcgctgccgggtgcaatcgtagccaccgtcggcgtggcaatggcggtcggcggtgaaaaccttgacgtgcaggaagcggttgccaatatcgccagcaatccattgccgtacgcgctcgcgttcgcaggcgcctttatttgggcgatttacgcgaccgtgacgccatcgatgtccgatggttacgatggtacgacgattttcttctgttgcgttgctgttgtgctgtggattatccatttcgtttcgggcgacggtttgccagctgtagcgcctggcatcggcggctatatttcgctgctcgcatgtgccgcgtcgattgctggcggctacgcgtgctgggggtatggcatgctacatggcagtatggaaacgcttgcgatcggttcgtatgcgacgccgctgttctccactgcttccagcacgctcctattgggcgtgacgttgggcatgccattctggatcggtgtcgcgctggtggtggtcggctcgctgatcaacgtgtggtttgcgcgacgccgctgattatccgattctgcagaattggacgcttgttggtgtgtgaggaggcgacatgtggggtagtggcggcgcagaggagcgccgggatggcgcagcggtacgtaagggaagtgaccgggcaagacaatgcccttacgcatccacgctagcttaggtttttgccggctggtatttggtgtgtgttgccgttggcggtgatggtgatgcgtcgccaatgacgcgtccatgtgtgccagccgaaaccgatctaaaccggcttaaaccagcccgttcaaatccacctcgtcacatcaccttggtggattccagattgcggctcacccagttgttcaaccggatcaccggcttgcgcaacaccaatcccagcagcagcgaaggaatcaggaacaaggcgagatacaccatgtcaagcaggtactcattgccgtacgatccggccatcgcggcgtgcatggcatcgatggcgtgcgggaacggtaggaacgggtagagcatttggaagaacttcggcagtgtctcgatagggaacgtaccgcccgaaccggcgacctgcatcaccagcagcaccacggccacggccttgccgatatcgccgaacgacacggtcagcgtatacacgatattcgagaacacgagtgcggcaagccaccccacggcaaggaactgcagcgcatgattcgcctgcacgccaaggaaatacatgtcacccaggcaaaccagtgtgccctgcagcaacgcgagcagtgcgaagatcgcgtaccgtccgaaatactcgtggtcgaggcgcagtccccaacgtgaggcgttccccgggccggacgggccggcgacgcgcggcagcgtgtcgcccaagcccagcacatgcgccttctcgcggtccgaaattgtcactttcagcatggcgcacaggatgatcgcacccacccagattgacaggatcgtatagaacggcgccatggccgaaccgtagttcgcgatcgggtacactgagacgcgctgcagtgcgacgggcgcggaaatcagcgtggacagtgtggacgcgttggcggtggccagtgcacgtagttcgtccgattcacccgaatcggacgaactggcgtcgttgtcaccgtcgccaccatcgctgttgccgtcaccggcgttcccgcccgtctccagcttcgtgatcagctccttcaccgtcgctgccgacgagtcgagtttcttcgcgatcgcgccgagcgtggaacggatggatgtcacattcgtccccacatcgcccgtcacatcgtccagatcgtcggcggtgccgctcagctgggtgatcatgctgtcggtttgggagatcagcgtgctgactgtggaggcgagcgcgtcgattttcggcttgacgttcgtggcgtaatcgtcgcgcacattgctgatcgactgcttcgcggaggtgatgcggttcaggatctccttgcgggagcgttccgcggctgcggtatcctgcgtgacctgcgtggaagcgtctttcagctgctgcgcgagcttctgcgaatcgcctttggcggcttccagcagcgtgatctcccggtcgatggcttccagcagcgcctgtttcgcggaatcactgtccggtagttgttccaccgattcgtgcatgtggttgaggcttgtgatgtacgtgtcgtacagcgattcgctgctggagacttgttcgctcaacgttgtcaactggctggctgcggtgtctgagtccttgccgatcgcgtcgaacgccttgttcaccttggcagctacttggtcgaacgcgcctgacacctggtcgagcgcggtgttcactgaggaggtgacgttcgcacctgccgaagtgaacgacgtggcacctgatttgccttgcttcaacgcgttctgggcctgtttgcccgccttggtcgccgaggcgagcagtttgcccgtggaatccacgatgtcgttcgccgagccgagcagctgcgaatacgacgttacctgctgcgatgcgccgctcaacgtatccgccatggtggtgagattgccgttgaggttgcgcatgtattcggccatttgcgggctttgcgaatagtgtaggatgcttgaggccaggtcgagtccgacttgcgcgatcgttttggcgaaggttttgtcgattgtgttgaccacggttgtcgcgccctgatcggtgatatgcggggcgatcgggttgattttctcgttcagatagtacttgagctgcgcgtgtttgatgtcgggggagaacagcgtcatcatgtcggcgctgaaacctttcggaattacgatcgccgcatagtattcgccggatttcaccccgtcgattgccttgtcgcttttcacgaactgccagtccagctggtcgttggcgtgcagtgtgctgatgatggtttcgcccacgttgacgcgcaccggtatgagatccgacttgtaacccttgtcgttattggccacggcgaccttcaatgccttggtgttgccgtaggggttccagctggccgcgatgttgaaccaggcgtacagcgccggtaccaccaccaggcccatcgagacgatcacggcgatcacgttgcgggtggcgtggcacatgtcccgcttgaagatgccccagatcattttcactgttcgttcccctcctcacgcagactcctgccagcatttccgtccgtgtttccagccgcatactcagccgcatgttcaggcgcatgtccggccgaaccaccatgcgcagcctcatacagcctcgtgcgtacggcatgcatcggcttgtaatgcatgcccggccggaatagcaggttctcgtgcaggatcgcgctgcggaactcttccgcactcatcgcttcctcgcccagataattcgcataccgttcgcgcagatactccaccacgatgagatacgtgtcgatggcgatgatcgaaatgatccaaccgagcagcatggcgagcttcatgcgcgtgatgaatagcaacagcaggaacacgaacggcagtaccgccagcgcgaggaatccccagcgcaccaggcgcgggtacaggcggaagaaatgaatcgcccgtctgctggcgagttcggggaactcctcggcgatctgctgcgcggtctcggtgagccgcaacggttccaccgtgccttcgttatgttcggtgatcatcagatcagtgtccgccagacggttgtcgaacaggcggttgaggttcaacgccagcttgcggaccaccaagccgatgaacagcgccacaggcagataccagaacagcgagagcatgtcgatccaataatggttggcatacatgccgccgatcggcccgcgcatcgcgttgatgccgtaggtgaacggtaggaacggtttcagacggcggaagaattccggcatcatctcgatggggtagaggcctgccgcgcccggaatctggatgatcaccagaatcacggcgacggccttgccgatatgccggaacgccacggcgagcgcgtaaatgatgttcacgtagacgaacgaggcgaaaatgccggcgaggatgaacaggaacggatgctcgcattggatgcccagcgcgagatcgccgatcgtggcgatgatcgcctgcaggaatccgaccgtgacgaacagcagccaacggcccatatagccttggcgtggcgtgtacatgcggatcttctcatcgcggtccacttcaagcttgtagatcgcgacgagcacgaatccgccgacccatagcgcaagattcgtgtagaacggcgtgaccgcggaaccatagtttttgaccgggtagaggacctgttcgtccaaatgcaccggctcgcccacgaacgagccgacctcgctcgcgtcaagtccgagcgcttgggaaagctgctggaacatcgccgaactgctcaacgcggccacatcggtgcgcgtggtgttgagctgtttggcgagattggcgagctgcgtctgcgtgccagcaatggtggtgttcgtttgggtcacggtgcgcgacaactggtcgagcagcccgttgccctgttccagtgtgctttgcagcgtggtaagcgtgccggacagcgacccattggccaggctgagtgtatcgagcccggtgttgagattcggcatgaccgtgccggtgatggtcgtgcgtgcgctcgccatcgacgccgtgccgtttttcgccagcgtggtgacatcgtcgttgaacccgttcgcggtgttcttccccgcgttgatcgcagccgtggtgtcctgatcgaaggcgtcgatgcgctgctgctggaacgtcagctgtttgcgggcttcggcgagttgcgcggaaagatccttatacgtttggttgttcggatccagctggctggcctgcaacgccttctccacgccgtcgagcacattgccggtggtggtgttgacgtgatgcatggtgctggacacttggtcgagcgcgtcctgcgtggtgttcagtccgctgagcacggtgccggtggcattgctcacgttgacctgcagaccggacagttgcgtgctgccgttgtcgagcgctccgaccagcgtgttcgagaatcgttcggtttgtgtgcgcgtctcgctcagcaagtcggacgccttgccgacggtgtcaagcgagttggtgattcccgaggcgagcgcgatgttggactgtttggccgaatcgatggtggtgagggccttgtcgagcgtggaacgcgtgccgcgcagctgctgttggacggtttcgagctggttgatggtgtcggtcagatcgttgatgacgtcgctttgcgcgcttttcatgctgccggtggtttctcccgctgcctccttcacttccttcgccacggcgtcggccacgctggaaacgaaagtggtgttgatctgctcgtcgatcgtggtcgcacccgtatcggtgattttcggcgcgatcgcgttcagcttttcgttgatgcagtacgtgatcgacggtcggtcgcctttaccagtgacggtgccgatgagtctggagctgaagtcttccggcagtacgatcgccgcatagtatttgccggattccacgccttcgatggcttgctgctcgggaacgaaacgccagccgagctgatggttcttcttaagctggttgacggtttgctggccagcgtcgagatgaccgaccagcgtggaggttgtgcccttgtcctcgttcgccacagcgacctggatgttgcccgtgttcgcgtacgggtcccagttggcgaggatgttgcaccatgcgtacagtgatgggatgatggccacacccagcgtgacgacgagcgccactgggttcttcagaatgcgtttcacgtctcgaaggaagatggcgaaaacctggtacatcaagcctcctcgcgggtattggtcgcaacatctacgtgcggcggcatgcccgtgcgggaatacccggttgggctcttcgtcgcgcgatccggtggatattctatgacttccgatggaacgatcgcaatggtttcgccctgtttaatggtcggtcccgcaaatgtcgggatatgagacgaaaacgctcggcatatggccctagtggggcgggcggcctggatatggagcggacggtcgggaaaacggaaaggaaagatggcgaatgttgtcacatgataagtgggatagggtcgggcgataatggaggcatgactattgcaacgccggaacgttatgcgcaaatgctggacgccgcacgccgcggcggttacgcctatcccgcgatcaatgtgaccagcacacagaccctgaacgccgcactccagggtttcgccgaggcggaatccgatggcatcatccaggtctccgtaggcggcgccgcctacttctccgggcaacgcgtcaacgaccgcgtcaccggctcgcttgccttcgcagccttcgcgcacgaagtcgcggcgaaataccccaacatcaccatcgccctgcacaccgaccactgcgccaaacagtatctggacgaatgggtgcgccccctgctcgaccatgaagccgaacaggtgaagcacggtcaggaaccgaccttccagtcacacatgtgggacggttccacagtgccgctgggtgaaaacctcgacatcgcagaagaactgctcgacaaatcccaagccgcgcacaccgtgctggaaatcgaaatcggcgcggtcggcggcgaagaagacgggcacagcgccgaaatcaacgacaaactgtattccacgcccgcgcaaggcatcgccgtcgcgcaacgactcggccttggcgagcgcggacgctacatggccgccttcaccttcggcaacgtgcacggcgcatacaaaccgggcgtggtgaaactgcgccccgaactgctcgacgaaatccagaccacggtcgcgctcgcgattaaggccggcgaaatgcccgaccccgcgcactcgctggatgtcgctcccggtaagccgttcgccctggtgttccacggtggttccggctccgcgccggaggagatcgcgcaggccgtgagctacggcgtggtgaagatgaacatcgacaccgatacgcagtacgcattcagccgtgcggtggccggtcacatgttctccaactatgattcggtgctcaaaatcgatggcgaggtgggcaacaagaagatgtacgacccgcgttcgtgggggcgcgaagcggaaagcgccatggccgcacgcgtggtggaggcttgcaggcagcttggcagcgcgggcaaggcgttgaagtagtgtgatgccgcacgcgccgcgtaatgcatgcggcgtgtggcggcacggtgggtgtgtcgcgttgtatgagacgaaaacgatggaactgactagtttcaacggccgatcggtgcatatccggcagatatccggtagagggcgcaggatagtctttgtaaggccttggtaaggctttgaggcgaaatcgcatacgcgcggaggtgcaacaacatgcctggaattgttttgatcggtgcccagtggggagacgaaggcaagggtaaggcgaccgacctgatcggcacgaaggtcgactatgttgcccgcttcaacggcggcaacaatgcgggccataccgtggtggtcggcgacgaatcgtatgcgctgcacctgctgccctccggcatcatcagcccgaccgcgactccggttatcggcaacggtgttgttgttgatcctgaagtgcttttcgaagagatcgacggcttggaaagccgcggtgtggactgctcccgactgctggtgagtgagggtgcgcacattattgcgccgtatcatcgtgtgcttgataaggtgacggaacgtttcctgggtaagcacaagatcggtaccaccggtcgcggcattggacctgcgtatgccgacaagattaatcgcgtgggcatccgcgtgcacgacctgttcaatgctgagcatttgcacgacaaggttgaggcaagcctgcatcagaagaaccagatgctggtgaagctgtacaatcgtcgtccgattgatgtgaacgaaaccacggatgagctgctcaagctcggcgaacgtttgaagccgtacgtggccaacacctcgctggtgctcaataaggcacttgacgaaggcaagaccgtgctgttcgaaggcggccaggccactatgctcgacgtggatcacggcacatatccgtttgtcacgtcctccaacccgactgccggcggcgcatgcaccggtaccggtgtcggcccgaccaagatcacccgcgtgatcggcgtttccaaagcgtacgtgacccgcgtgggcgaaggaccgttcccgaccgagctgttcggcgaggagggcgaatggctgcgagcccagggccacgagtacggcgtgaccaccggccgtccgcgtcgttgtggctggttcgatgcggtcgtcaatcgttatgcggctcaggtcaacggcctgaccgacatcgtgctcaccaagctcgacgtgcttaccggcctgaaggaaatcccattgtgcgtggcctatgatgtcaacggcgaacgccgcgacgatatgcctactgatcagtccgaattcgcggcagcgaagccgatctacgaatccatgccgggttgggacgaggatatttcccaaatccacgacttcaatgatctgccgaagacctgtcaggattacgtcaagcgtcttgaggaactgtccggctgccgtatctccgtgatcggcaccggcccgcagcgcgaccatatcatccagatcaattcgctggtcgactgaccgtcggcaacgagtttcccggcttgactggcaacgacgcggcacatgatatccgccggctgattccgcgattcgaccacttgaagtggaagatggcggcggccggcatagtcattggtctggtttcaggattgctggtcgtcgtataccgtctcggcatcgaatacggcacggatgcgtcccgctggatatatgcgcggattcgcgagaccccgtggctgattgcgccgtgggcggttgccgcggtggcggccgcgctggcgatcgcgtggatggtcgtcaaggagccgatggccggtggcagcggcatcccgcagaccaacggcgtggtgatatgcggcttgaagatgcgttggcagacgattctgccagtccgtttcgtcggtggactgttgggcgcgttgtttggtctgtcgctcggccgtgaggggccgtccattcagattggtgcgtcgggagcgcagtgtgtgtcccaccgtttgcgcggccaccgccgtgaggacatgcaggagcattatctggtcaccgccggtgccgcggcaggcttgtccgccgcgttcagcgcgccgctgtccggcatgatgttcgctttggaaggggtgcatcggagtttttcccctgcgattctgatgggcgccactgccgcatcgctgaccgccgatttcgtctcgaaatactgtttcggtctgcgtccggttttggatttcggtgatatcggtcagctgtcgttggaagagtatgtgtggctgattccgttgggattggtggccggtttggttggttcgctgatgaaccgctcgttgcttggcttccagacgctgtacggcaaactgccggcatggagccgcccgatgattgcgattgcgatggacctgacccccgttaggtagacacctctgattccagccagtgtggttgggaaggaaggtaatctaccaccatgccccgcaaggtttacacggaacagttcaagcgcgacgccgtcgcgatgttcgagtcgaacccggatacctcaatgcgcaaggtcgcagaagaactcggaatcaatcgctcgactttgggatgctggtacaagcaattcggcactaacgtcgccaaggatgaagatgcagcgtcacccgtagaaaagcttgctgatgcggaaagaatccgccagctagaacgcgaaaacaaaaggcttcgtgaagagcgcgatattctgcgtaaggccgcgaagtattttgcggaagagacgacctggtgatccgcttccagttcgttgacgacaatctcgccgactactcggtcaagcggatgtgcacagtcctggggctaaatcggtcttcgtattacaagtggaagaactcggctccacggcgccgtgcgcgccttgtagatgacgctgtggtggccgcggagatccaggcaattttcgacgctgaaaacggcgtctggggcgctcgtcgcatcactgctgaactcaacgaccgcaagcgcgacaacggcactacacctccggctaagcgcatcaatcgcaagagagtggctcgtttgatgcgggcccagaacctgttcggatttcaaaagaagcgcagggtcaagaccactgcgcgtgacaaaggccggcgcgtgttcgcagacttggtgaaccgtgatttcacagcctgtgctgccaatcgtgtgttggttggcgatattacgtatctgccgatcgcagacggggcgaacatgtacttagcaacagtgattgattgcttttctcgcaagcttgtcggctttgctatcgcaaatcacatgcgtaccgaactggtagaagaggccctcgaaaacgcttcccacctgcgaggaggtcttgatggtgcgattttccactcggatcatggaagcgtgtatacctcgtcgcagttccaggcaacatgcaagcgcttgggcgttgcccagtcgatgggcgcggtgggaaccagcgcggataattcgctcgccgagtcgttcaacgcagctttaaagcgggaggtcctcaaagatgcgaagaccttcgccaatcaactgatctgccgcagagacgtcttccggtggtgcgtgcgctacaacacgtgccgtcggcacacttggtgcgggtaccaaactcccgatgagttcgagtcccaagccgcttaaggtctgataggcttacacctacttttgttcaccccacggtgtctactttccgggggtcgggcccgatcgcgttgcctgtcggcatctggttgcccgacgtgctcggcggcggctcgaatctgattgataccgccgaacatgcgcgcgtcggcttgggaatgctgtgtctgctgttcgtggcgaagatgctgttcacatccacgagtttcggctcaggtgcgcctggcggtattttcatgccgattcttgcggtcggttcgttggccggcggcatctgcggtgaagtgttgcatcgaatcggtgatctgccatccgacgcagtggcggtgtttgcggcgtgcgtgatgacgggcacgctcgccgcgtccgtgaaaacgccgatcacgtcgattctgttggctgtggagatgtccggaacgttgacgcacatgctgccggtcgctgccgtcgctttcatcgcgctgttggtgtccgatctgctgcgcaccaaaccgatctatggggagttgctggagcggtacgtgcgtgcgcaaggcatgcagatggcaatcgcaagccatgtgggcagcggcattatggaactgccattggaaatgggggcgattgcggacggcaagcgggtgcgtgacgtgcgttggccgtctgggtgtctgatcatcggcctgcgtcgcggcgaaagcgagatcgtgccgcgcggtgatacacggctgcgtgccggtgactatctggtggtgctgttcagtggcgaggaggagcgcgaggtacgacctgcgatgcggcggctgtgtgatgcccggcttgactgagcctggctgaattcggctggactctggatgtccgaatctgcggaatcggacatccagggtgcatacgttggcgctccgtgtaaactcatatgcgttaggaaggcggcaaccgcggcccagctcgttgttgcacggcctatgggcggaacaacgctgtccgcgggaggccagtacagggggagcgcaatggaatcgcaagaacaatcgccgggagacgtggtgactgcgggtgaggactcgcatcccatcacgcaggcaatcgacactgttgaggtgacgcatgctggtgcaaccacgcccgccgctaacaccatggatccgcctacgattcccctggcaccgatgaaacgtatgcaggcgcggttcaatccgctcgccgacggactgatgtatgttgtggtgttcgtcggtggatttgttggagtcggctgtcggcatgcgttggatatgcttctgccgtcggtcagcgggacgccgttcgttgtgggcacgtttgtgtcgaatatggtcgcctgcttcctgttcgcgatgctgaccgaattcatggcgaccgcttcgtggctgcgtcgccgggtgcggcaggttgtcagccgtggtgttgggcttggcttgctcggtgggctttcgacgatgtccggcgtgatgctggaaacgatggaaggtctgcacgagcggcatatcgccagtgcgcttggctatcttgcgggaaattttgcaggcggtttgctcactgccgccgccggcgtggttctgatgcaggcactgctgtcacggagtactcgaaagcgggttcagggtgcgttttcagctgtttccgtgtccgattctgccgaatcggacacgcagggcgtacgccatgtgaaagtggccgacgtggcgcgttctgccgcgcaggccgcaatggaagccgcgcaggcggcgcagcaggccgcgcaggcggcccagcagattgcacagacgggacaggttccgcgagtcgaaacaccaaccgtgccgccgaccgccagccagactatgcagacgggccgcgttccgcagattcctccgctggccgttcctcagctggcacagccatcgcagccgttgctgcgcgagcaggatacttcagacttggggcagctgcccgagccgattcagcagtcgcaaccaatccagcagccccagcagcagtcgcagccgatccagcagccccagcagcagtcgcagccgatccagcagccggctaacccgcttccgcccagcttcgagcccaaaccgatcactgcggagatttcgcttatcgccgacccggctaccggggaggtgcgctgatgatgtggatgatctgtctgttcggcggtctgggcgccatggcccgttacgtgctcgacgtgtcaattcaacgaggctggaatcgcgagaatcggagaacgaaccgcaacttcccgctatccacgctcgtcatcaacggcgtcgcctcgctatgcgcgggcatcgccatgatgtcctactattcgcaatcggtggatatggacacggtcatgatgttcgttgtcggatttctcggtggtttctcaacattctccacggcgctcaacgaagtggtttcattgattcgccagcgtcgttttacgctggctctgggctatggaatagcaaccgtcgcggtgcctctcatttgcgtggccaccggtttcggcattgcgctgctcgccaatccggcgtaattttcacgttacgcggacggtcgctgagtaacatgaaagaaatctgagcgcaaccgccatcaaggccgccagcccggatgcgacgctggtgattgcattcgaccaggccaagccgctgctgaaggatggcaaggatatccagtaccagggccagaccggtatcggaccgttcaataagaacaatgatccgagctccgcgaacatcggcgtctacaccttcgacaaagacaacaagccggtcttcgaccacacccagtccggcgacgtgccgaccgactgatcgcaatgtaggtcatcatcaatacaagaagacggcgcaaagtgagtgtggatgtcgcaagctttgcgccgtttcttttgttgtgctgtgctgccgttttccgtgtcgtgggcagcatacgaaaatcaatattgaaaatcaagtaaaggggtaaccccgttaagtgatatacacgccggactgtcgaacaggttcgagagaatgtaaatgaatgtaatatctcgcgagaagcgcacggaaagcgcgcggcaagcacgtgagaatacaacgatggaacagtgataacggggaaggtgcgatcatggtcggcatgcgcgatgtggcgaagaaggccggggtgtctctgagcaccgtctcgctggtggtgaacggcaacgggtatgtatccaacgacatgcgcgaccgcgtgcgtaaggccatgcaggccctcaattacgtgccgaacgagcttgcccgcaacctgtaccacgatcgcacgaatctggtcggcgtcatcgtgcccaccatccgtcacccgttctttgcaacgtttaccgcgcacctgcagcatgcgctcgccgcgcaggggctgcgcaccatgctgtgctccaccaccgacgagacggacggcgaaatccaatacgtcgatatgctgcgcaggcacatgatggacggcatcgtcatgtgcgctcacacctcgcatcccggcgattattggacgtccatccaccgcccgatcgtcgcattcgatcgcgtgcttggaaatggtatttcgtcgatcggatctgaccacgagcagggtgggcgactgattgcgcagatgctgattcgcaatggcgcgcgccatgtggtgatgattggcggtccgcgcgatcagttcttcgatctggcggtccgcggcgaagtcgaggaggggtcgttcgatttgggaaagaccacgttcccgacggtgcgctactacctcacgttggaacaggaattgacctccgcgggcgtgaagtatgagtatatcgaggccggtgaggtgatggatttcgccggctatcatcgtgcggtcagccgtgcgcttgatggggtggcgaccgacggcgtcgatgccgtggtcagctccgatattggcgcggcgttctgcgtgcgtgaggcgttgagccgcggaatttccattcccgacgagctgcaggtcgtcgcctatgatggtacgtatttgaccgatttggccggtatgaagctgaccgcggtcgcacaggatttctcggcgatcgcgcagtcggcggccgaccatatggtgcaggcgatcgccaatgaagaggcggctgcggccaacgcctcgcgcaagaacatccccaagccgttcgagccgaacgtgcttattcccatgacgctggtgccaggcgataccacgcgttgatgctgcgcgttggaacgctgggttggggtcggacagtctgggctgcatagaacaccgcatcaaaccggttcgacacgcgcattccgctgtgtgactggacattgacgcccttttcgaggtaatatcgaaccggttcgatacatacgtgagtatgcaaatacgtaaacaacaaacaggcagacgcgcacacattgcacccgcacccatgaaccaagggaggtcccatgaaaaacaaagtgcagctcatcacctacgccgatcgcctcggcgacggcaccctcagctcgatgaccgacatcctgcgcacccgtttcgacggcgtgtatgacggcgtgcatatcctgccgttcttcactccattcgacggcgcggatgcaggcttcgaccccatcgaccacaccaaggtcgacccgcgcctcggcggctgggacgatgtcgccgaactttccaagacccacggcatcatggtcgacgccatcgtcaaccacatgagctgggaatccaagcagttccaagacgtgcttgaaaagggcgaggaatccgagtattacccgatgttcctgaccatgagttccgtctttccgaacggcgcgaccgaagaggatctggccggcatctaccgtccgcgcccgggtctgccgttcacccactacaagttcgcgggcaagactcgcctggtctgggtcagcttcaccccgcagcaggtcgatatcgacacggattccgacaaaggctgggaatacctgatgtcgattttcgaccagatggccgcatcccacgtcagctacattcgtcttgacgccgtcggctacggtgccaaggaagccggtaccagctgcttcatgacgccgaaaacgttcaagctcatctcccgcctgcgcgaggagggcgtcaagcgcggcttggaaatcctcatcgaagtgcattcctactacaagaagcaggtcgagatcgcgtcgaaggtcgatcgcgtctacgatttcgcccttccgccgctgctgctgcattcgctgaataccggtcatgtcgagccggtcgcgcattggaccgacatccgtccgaacaatgccgtcaccgtacttgacacgcatgatggcatcggcgtgatcgacatcggttccgatcagctggaccgttcgctcaaggggctcgtgccggatgaggatgtcgacaatctcgtcaacgccattcatgcgaacactcacggcgaatcgcaggccgctaccggtgccgccgcatccaatcttgacctgtatcaggtcaacagcacctactattcggcgctgggatgcaacgatcagcactatattgcggctcgcgcggtgcagttcttcctgccgggcgttccgcaggtctactatgtcggcgcgcttgccggcaagaatgacatggagctgctgcgcaagaccaacaatggccgcgatatcaatcgccattactattccacggctgagatcgacgagaatctgcagcgtccggtggtgaaggcactgaacgcgcttgccaagttccgcaacgagcttgatgcgttcgatggcaccttctcgtacagcgccgacggcgatacgtccatcagcttcacgtgggagggcacgaccactcaggccacgctcacgtttgagccgggccgtggtcttggtgtggagaacaccgcgtccgtcgccacgctcgaatggcgtgatgccgccggtgagcaccgcacggacgatctgatcgccaatccgccggtcgtggcctgattcagcctcgcctgatccggtcgctgcctgaccgcgcataaatccataaatctgtaatcgtcctttctgtcacctctccttcaggaaggacgattcgcattttcgttttttcgagaaatcgtcttatcgggaaaacaattttcccgggaatcagctgaaatcccagcaaaaacgggtaaggtgagcttatgtcaaagatgtcaaagcttttcgatcaagacaacatgtttttcgccattatgggcgtgctgttcgatctgattattctcaacgtgctcacgctgttgtgctgcctgccggtcgtcacggccggcgcatcgttcactgcgatgcacagtgtgctctggcgcatggtccgccatgaggaaacgtatgtggcgcgccagtttttcgactcgttcaagcgcaatctcaagcagtcgctgctgccgtggcttgcgttcctgctggcggcgattgtgctggtggtcgacggcatgctcgcccgttccatggggtcgatgcgcgggccgctgatggcgtgcgtcgcgttcatgggattggtgattattgcaattgcgcagtacttcttcccgctgctttctcgctatgagaatccgacttccgaaacgttgaagaatgcgacgaaacttgcgctcggctttttcccgcgcaccttgtgcatgctggtgattttggccgcgttcgccgtgctgtatgcgcagtttttcatatatatgattccgctgctgattttgatgggcgtcacgttgccgcaatactgttgcgcgtggatctacaactggattttccgccgtatcgacggtgagatcgacgccaaggggcgcaaggtagcgcagtcctgaaattgtttgctcgtaaaggccgttccgcagattgcaagttccgcggaacggcctttacgcgttttcgtcgccttgagtgtccgattctggagaatcggacacgctgggggcaggattagcaggggaggatggtggcgctgcgggctgggacgtgcagttgggtgccgtcgaagcgtgcggggttgccgatgctcagcagtactgttttctccgctggttcttgcgatatttcctgcgctaagccgccagacagcagtttcacatagtcgctcggcagtgtgcagcttgcgtcggtgtttgacggattgatggcgacgacgatgcgctcgccacctgcttcgcgattaatcttgctgcatgtttcacaaggtgtttcacagctggtttcgtgtgctgtttcgctgcgttcgccgtcagttgcgtcgcgttcggcttcgccggcctcggagcttctcgcgtacaccagcggatacgcgtgatcttccgcgtagaggaactcgatgcctccgtcggcctgcagtgcgggatgtgccaggcgtagcgtgttcagtgcgcgtacggtttccagcagcgagtcgctgcgtccggtctgcgaagccacgttcgggcgctcgctgtcggcatcgatcggcagatacagatcatcgggccgggctgcggagaatcctgcgttggttgcgcagctccattgcattggtgtgcgcgatccggtgcgctcgtatccgccttccttggatttgagcccgtgcatgtagcgcatgccgatttcgtcgccgtagtagatgaacgggcagccgggcatggtcagcaggaatgtgaacgcgagcttcatttcatcggtggtcaaggtgtcgcgcatgcggatcatgtcgtgattgcccgacggaatgcagatgtatccaggcgttccggcggtgctggcaagcatggccgtatatgtgtccacaaacgccttgatgtcgccgctcgcattgccgacattgtcgttattacaatttggattgtctccgtcgacgactgaattgccgttgctgtcgcacccgctgctgcccgcgccgtcgcattcgctgcgttcgccgtcgtgttccgtttcggcagtttcggcgctgcccgtagcttcggaagatccggccgaaaaatacggattctcgcggaacaggtcaagataatgcgacggcccgaaatgcagcaggaagtccatgtcgaatccggcgtgcagcgcctcttcggggtcaccccattccgatacgagcaccgcttccgggtaggtttcgtccagatgcgctcgcacttgctgccacaagagtttcgtccaatagtggtcggggtcttccttgacgaggctgcctgccatgtccacgcggaagccgtccgcccccagtccgagccagaagtccatgatgtcttggatgagcagccggccctgcaccgcttcgggggagtcggcggcgaactgccagtcttcggtgacggtgccgaatccgtagttgaggcatgcctgcgtggagaagcagttcacggccgccgcgtcgggacgttccgcaatgcctccgaggaatccgcggatcgattcgtagggcgagttcagattcggcgattgcgtcatcggtcgccagatgtagcggtcggtccatgcgttgcgttcgtccttgccggattcgaggaaccacggattgtcgaccgcggaatgcccgggtacgaggtcgagcagtacgtgcatgcctagttcgtgcgcgcgctcgaagagccgctgcaggtccgcgttgctgccgtagcgttccgcggctgtgtagtagtcgcgtacgtcgtagccggcatcgtagaacgacgagtcgaagcatgggttgatccagatcgcattgcaccccagatcgcgcacgtattgcagtttgtcgatgatgccttggaagtcaccgataccgtcgccgttcgagtcgttgaatgattgcggatagatttcataaaagattgcgttgttgagccagcgtgccataaatcctcctgttttcgcgtctttgctgttggtctaccgatgtatcgcaacgttggaaacgtcggtcactgcttttccgtcattatagcccgtgaagacactttttaggggtgtatggaatgccaatgtttgcaatacgtcaatcgattgacgcgacacgccggcggatggcactgtacacaaggtttctcgaaccggtttgacaactctcgaaccggtttgatatcctgtataccaaggacggagagattccgacaacgcgagtcggggattcaccttcctttatcacttcattgggcagggctgctcggtgaatagtggatagaaagggattggaaaatgagcaagttctcttcttggaagaaggctggcaccgctattgttgcaacgctgatgaccgttggcatgctgggagcatgcggatcgtcatccagctccagcggcaccaagatcaccatcttcaactccaaggttgaaatcgaaagccaaatggaagacatggctgcgaagtactccaaggaaaagggcatagacgttgaggtctactactccaacgacaccgtcgcagcgcatctcgccaccaagtacgcatccaaggatccgtacaccatctccatggtcgacgccaaggacatctactccttggctgaagagcacgccgtcgatctgtccgaccaggattgggtcaaagacactgactacgccatcagcatcgacggcaagacctacggcttcccggtttccgtcgaagcccgtggcctgatctacaatgctgacgccatcaagaaggtcaccggtaaggaattcaagcctgagaactacaagacccttgacgagttcaaggatctcatcgacgagctcaaggccggcggcatggaatccccgaccggtgtcatgaaggaagactggtccctcgccgggcacctcctgccggaagtctacgaggagcaggaagatccggacgccttctgccatgagctcaaggacggcaaggtcgacctcagctccaacgccaagtggaactccctgatggacttcttcgacgtgatgaaagacaacaactacgccaagtcctccgccatctccgccgagcgtgaggtgactgagcagaagctggccgagggtgagattgctttcatgttcggcggcaactgggattggtccgtgctgaaccagtacgattacaccgagaacatgggtctcatgccggttccgcagaacaccgatgacggctccaatgagaagctcgtcggcggcggctccaagtacttcttcatcgactcttccgacaacacctccgacgagcagcgtaaggccgccaaggacttcctgaactggcttgccgaagacaaggaaggtcaggagttcatctccaccgatgccgctctgatctccccgttcaagaacaacgacatcgaagcttccgatccgctgggcaagtccgtgaagtcctacgctgacgccggcaagctgatcggcaactacaactacctgccggacgatcactactccgtgctcggcgcagccttccagaagtggctcgcaggtgaagaggaccgtgcaggcctcgcccaggacatccaggactactggaagaccgctaagttcaccggcgcaaccgcctgaacttccaaataatgcaccatgatgcagggtccgccgcttccttcctgcggcggaccttacatccccggcacgtatgggatccatcatgaaacagaataagctttcctataaaatcggccagtttctgatgttcggtggtccggcgacgattcttttcttcgccgtggtgatcctaccgttcttctatggcctctatctgacacttaccagctgggacggcgtttcgacaacgaagccgttcgtcggtctcgaaaactacaaggcggctcttgccgacaccgcatattggcagtcgcttggacgcaccttcatctactccgtcatcgcagtcatcctcaccaacattgtcgcctttctgctggcctacctcgtgaccagcggcatcaagggccagaacttcttccgtgcgggcttcttcattccgaacctcatcggcggcatcgttctgggctacgtgtggaagttcgtcttcaaccgcgcattcgtggccgtcgccgaagtggcgacgcaaacagaccacgcatcgctgctctccacgccaaacggcgcaatgttctgcttgattctcgtttcggtctggcagtacgcaggctacatgatgctgatttacgtggcaggcttcatgagcgttgaccagagcctgaaggaagcggccatgatcgatggctgcaacaagggcaaggccatgtggcacgtggtcatcccgctgatgcgctcctccttcgtgcagtgcatcttcctgagcaccacccgttgcttcatggtgtacgacctgaacctttcgcttaccaagggcgaaccgttcaaccagtcggtgctcgcagcaatgcacgtctacaaccaggcattcgtttacaagaactatggcaccggtcaggcggaggcgttggtcctcttcatcgtctgcgcagtgatcggcatgctgcaggtgtacttcggcaagaagggtgaggtggcagcataatgaagggtcaaaccagcactcgcaccaaggttctgcatgcactgatgatcgtcgttctgacgattctgctgctgctgttcatcgcaccgttcattctggtcgtgatcaacgtcttcaagaccaaggcggacatcaacaccgctccgctggcactgatcggcaagcacgggttcaccctggagaacttccccagggcaatggacaagatgaacttcgtcaccgtgttcggcaactccgcggtcatcaccatcagcgcaaccatactgaccatcctgttctccgcgatgtgcgcatacgtgatcgtgcgcaacccctcgtggaagttcggcggcatggtgttcgcgcttatggtggcctccatggtcattccgttccaggtgctcatggtcccgctcgtgtccgtctacggcggtctgcttgacgtgttgaacaaccgtatcacgctgatcctcatgcacaccggcttctcggtttccctggcggtgttcatgttccacggcgcgatcaagacgaacattccgaacgagcttgaggaagccgccagcattgacggctgttccaagtggcgcaccttctggacgatcgtgttcccactgctcaagccgaccgtggccaccgtggccatcatcgacgccatggcgttctggaacgactacctgctgccgtccctggtcttgggtcgccgcgaactgtacaccatcccgatcgcaacccagatcttctacggcacatactccaacgacatcggcctgatcatggcggccctgctgctggccatgctgccgatccttatcctgtacctgttcctgcagcgctacatcgtcgaaggcgtcacctccggcgcagtcaagggctgatcgaacggtacggaatccgcaatcataactgaacagactcacacaaccggtccggatgcgaagcgataatcgcatccgggcttttcttatgcgatatcgattcttatgcgatatcgatattgagattgccatcgcatgtttctgctgtctgacaggacgtattgatatggttgatttcgccgaaagaatcgctcgaatgcactggtgcagtgcgtccgggcgattttcatatgtgctgaatatcgtgtgacatttcgaaacgagcaacgaaatagaagcaagaacgacaagcgacaatacaaaacaggaaaaacaggaatagaaataagagatgactgaagacaatcaacataatgcaggtgagcagcagactccaatgcagccgcagccgctgccgggccaggtgttcgtacgccccggcatcgatgaccgtcccgattacgaaaaaacgctgaccgaagagaccaaagcggccctgaagcgcttggccgtacagcagaatccgcgcgtgcccgaggcttccaacgagcgtccggaagtgcagcagaccctcatcaacacggaaggcggctccccgctgaccgcgttcgcccatctcgacgccgccgtgccgaacctcgaatcgtcgttccttgacctgcgcgatccgatgaccgcgcccgacggcaccacgcccaccaaaccgcaggtgcatcgcctcaccgccggcttcgcgcttggtgcgctgctgttcaccgcgccgatggccgcgctcaactccgtgctcattccgcagaccatcagccgtctttccggcaccgaccgcgtcaccgatctggcgctgctcagcgtcgtcggcacgctgttgacgttcctgatgaatgcgtggatttccgtcggatccgaccattcgtactgcccgctgggccgccgcaccccgtggatcatcgccggcacggtgctgaccgccacgtcggtggcgattctttccgcatgcgatttcatgccgttggtcatcgtgttctggctgtttacgctgatcggacatgcgatggtatcgatgccgctggcggccgctttcggtgagcgcgtgcccgacaagttccgtgatcgtgcggacgcgtggcgtggcgctggccaggcgttcggccaggtgttgggcattatcgcggccgtttcgattacgtgggctgccgacgattccggttgggatggcaccacgcgtttcgccatgatggtgtttgcgttgtgcctggtggtggctggtgtggctacgttgctggtgttgccgtttgagggttccagcagctatttgcctcgtgagggtgtgaagaagggcgattatttttcgcagtatcgtccgccgaagggcgctccgaagttcttcattgcgtttgccgcgcgcatgtttgccatcgcagccacttccggcattgcgatttaccagtggtatcttgcgcaggatggtttgggcgatgtttcgcaggtcaccatgtttggtttgtccggagcggctgcggttatgtcgatgatggccgttgccgcgttcgtcggctcgctgttggctgcgctgctgcttggccgcatcgcccgcgctttcaaagattcccgtattcccgcgattgccgcctgcttgttatttgtggttgctgtggtgcttccgttgacgccgatcgatagtgctatggcggtcgcgctgtatgcgctgtttgcaggtttcgcgtatgtggtgtatgacggcgtgagccaagggttgaatcttgcgacgttgccggatatacgttccgttggtcgttcgttggctgcgttcagtttggcgaatacgttcggttcgttgattggcgctgtcgtttgcgcgattgcgattgcggcgactggcgagtatctgctgattttcgctgttgccgccggttgcatggctgttgcgggcgtgctgacgttgctgctgaaatgatttggatgacctgagataatccgaaaaacgaatatcaaattcaaaattgcgcgtccacatagtgaacctttagtagaaaggatatgtggacgcgcttatctttacggcttagttcgagcggacaatccgccgaatacaagactttgcgaaaggaggttcgccacgatgaacggaatggttgcacgcgtactgctgtccgcacgaattattattccgctttcgttggcggactgattcgagcaatgcagcttcaatccctcgccaacggaggcagggtttgaggcgcgcaaaacacacacgttgatggccctgcatgctgcggggtctttttgttgccgcccacaaggcgtaaggcaacgaaatgaagactgcacacaagagaatagaagaaagacgttatcggcgcatgttgggagccggcaacgcatgacagacgtaacaggagtaatccaatgagtgcagtcgaagcagccgctggcaaagcgcaggcaatggtgcgcgattcggtgaaaaccgtgatcgccgcttccatggtcggcaccgccatcgagttctacgacttctacgcatacggcaccgccgctgcgaactatttcccgaaggtgttcttcggagacaccaccaatccgaccgtcgcgctgctggccagcctgctgaccttcgccatcgcgttcattgcacgtccgctcggatccttggtgttcggccatttcggcgaccgcatgggccgcaagaccacgctggtggtttcgctgttgaccatgggcatcgccacgttcctgatcggctgcctgccgacttacagccagtggggcattgtggctgtcgccgcgctgtgcctgtgccgtttcgtgcagggcatcggtctgggcggcgaatggtcgggtgccgctttggtggccaccgagaacgctccggaagacaagcgcgcgctgtatggctccttcccggaattgggcgctccgatcggtttcttcctgtcgaacggtacctacttcctgttggaaacgttcaacgatgacgatgcgatgctggcatggggctggcgtgtgccgttcctgctgtccgcagtgctggtgatcgtcggtcttgtggtgcgcgtgcagatggaggagaccccgatcttccgcatggcccaggagcagaagaaggtcgtcaagtccccgttgaccgaagtgttcaagaagagctggaaggaagtcatccaagccacgttcctggtggccgtcacctacacgctgttctacacgctggcaacctggtccctcgcttggggcaccaaaaccgtcgagcagggcggcggagaccttggtttcaccaatcgtgaatatctgctcatgctgatgctcgccatctgtgtgttcgccgcgttcatcgtcatctcctgcgtgaatgccgataaattcggccgcaagcgcgtgatcgtcatctcgtcctgctgcctcgtggcattcgcgctgctcttcccgttcctgcttgatccgtcggtcgtcggccagcgtaacttcgccgccaacctgctgttcctatgcatcggcttcgcgttgatgggcaccgcattcggtccgatcggcgcgttcctgccggagctgttcgacgccaacgtgcgttattccggctccggcatcggctacaacctggccgccatcgtcggcgcggcattcgtgccgaccatcgccacttggctgtcccaccactggggtgtgcactccgtcggtctgtacctcggcgtgatggccgtgtgctgccttgttgcggtgttgagctgcaaggagactaaggatgttgatttcaccaagtgatcaatcgccaagtgccgtttgaccggctattcagcgacgtgtcaagatgacatcgacggaagccttactaaaaacgtttgacgcgaatataaccactatgtgaacgtcagcaagcaacataaagaaagcgggactaaaacagttccgcaggagaggcggggtggttcctcggacacaatccgggggagtaatctcctaggaaccatcgcccgctgtgaacaaccgaaacaagaattaaatatcgcgagtttgttcgggaatgcaagtcccgaatcgctataaaaagaaaaataaaggagcgcctattatggcagcaactatctggtacgagaaggatgccgatctgtccgtgttcgatggcaagaaggtggccatcctcggttacggttcccagggtcacgcccacgcgctgaacctgcgcgattccggtgtggatgtcgtcgtcggcctgcgtcctacctctaagtccgtggaatacgccaaggagcagggcctcgaggtcaagcctgttgccgaggccgttgccgaagccgacgttgtgatgatcctgctgcctgaccagtaccaggccgccgtgtacaagaaggacgttgagccgaacctgaagccgggcgctgctctggctttcgctcacggcttcaacatccactacggctacatcaagccgtccgaggatcatccggtgttcatggtcgccccgaagggcccgggccacatcgttcgtcgtgagtacgccgccggccgtggcgttccggtcgttgtggctgtggagcaggatccggatggcaagacttggccgctgtgcctggcttacgccaaggctctgggcgctctgcgcgcaggcgccatcaagaccaccttcaccgaggagaccgaaaccgatctgttcggtgagcaggacgtgctcatgggtggcatcaaccacctgtgcgatatgggcttcgatgtgctgaccgaggctggctaccagccggagatcgcttacttcgaggtgttccacgagctgaagatgctggtggatctggccaacgagggtggtctgaacaaggctcgctggagctgctccgacaccgctcagtacggcgattacacctccaccgtcatcactgaagagaccaagaagcgcatgcagtaccagctcaagcgcattcaggacggctccttcgccaaggagttcatggatgatcaggccgctggcgctccgaagttcaaggagctgcaggaagagtacagccacccgcacctggagaccgttggtccgaagctgcgcgccatgttctcttggaacaaccagacggacgccgatgccgatatggccgagtccttcaacggcaagatcgctcgtacccaggttcagtgatttcgctgtagcggctgcatgttaagggccgctgaataacgtagtagcgcaatatgcgcgaaacgtgttggaagccaccgtctcaccgcggtggcttctttttgttgctgtgttgttttatgactgggatatttcgtatgcgggatcgcagtactgattgtcgggggaaccgcacggctaggcgttggcccactttgtggactcaatgcttatttaggaagggacgggagtaggatagaccccagtttgcaggacaaaatccatgcacaaaaacacgcgaattcatctgcgaatggtagaaacccgagcgccgggaggcgttcaccccactacataaaaaggagtgccaagtacaatggctgcacaaatctggtacgagaacgacggcgatctctcggtcctcgaaggtaagaaggttgccatcatcggttacggttcccagggtcacgcccacgcgctgaacctgcgcgattccggtgtggacgtcgtcgttggcctgcgtccgacctccaagtccgtcgagcacgccaaggagcagggtctggaagtcaagtccgttccggaagctgctgctgaggccgatatcatcatgattctggctccggatcagtaccagcgcaccatctgggccaatgacatcgagccgaacatcaagccgggcgcagctgttgctttcgctcacggcttcaacatccactacggctacatcaagccgtccgaggatcatccggtgttcatggtcgccccgaagggcccgggccacatcgtgcgtcgtgagtacgccaacggccgtggcgttccggtcgtcgtggccgtggagcaggatccgcgcggcgacgcttgggacatcaccctggcttacgccaaggctctgggcgctctgcgcgcaggcgccatcaagaccaccttcaccgaggagaccgaaaccgatctgttcggcgagcagaatgtgctcatgggcggcgtgaacaagcttgttgaaatgggcttcgaggtcctcaccgacgccggctaccagcctgaaatcgcctacttcgaggtctgccacgagttgaagatgctcgtcgacctcatgaacgagggcggtctgaacaaggctcgctggtcctgctccgacaccgcccagtacggcgactacaccaacacctgcatcgacgagcacgtgcgtgagcgcatgcagtaccacctgcagcgcatccaggacggctccttcgccaaggagttcatcgaggaccaggacgctggcgctccgaagttcaaggctctgcaggaagagtacggcaacgtccgcatcgagaccgtcggtccgaagctgcgcgccatgttctcctggaacaacggcaaggatgacgacgctgatatggccaccttcaccggcaagatcgcccgtggctgatgtggctcattcggctaatcgctgagtcttttacaagaccgctgcccttacgggtggcggtcttttttgtatgttctgtcgcatattgttctaggatagatatgtacggtttcttacggtttttctataggaagagatgtcatggtcactgcgactggtcccgcacctggttctgaaatgacaacgtcggctgaacctaccgaagaccgtagcacgtcaggagttctgcacgtcgccgcgattttcgcctcgcatatggtgttgcagcgtaacaagcccatcgccgtgttcggcgcgcttgatgccgattgcgccggacttgaggtttccgcggaaatccgcgatttcgatggttccgtgatcgtgcaggcgcatgcgtacgcctccaaagagatcaagaacggtttttcaccgtggcgcgtcatgctgccggcacagcccgaaggtggcccttacacgttgcgcgtcaccgcaggcaacgatttcatcgaatattatgacgtgcttatcggcgaagtatggctggccggcggtcaaagcaatatggaacttgaattgcgcaacagtgaagacgccgaggaagccctcgataactgtgccgatccgttactgcgcttctacaatgtgccgaaaaccggtgtgatcaatcgcaacgccgaacatgtggcaagctggcaggaatcatcgcctgaaaatagtggcgtaatgagtgcggtagcgtactattttgcgcgaaaactgcgtgatgaacttgattccgaccttccgatcggcattatcgactgttatatcgggggtacgtcgatcagttgctggacgagcgaagatgcactgaattccagcgaatccgggcgcggctatcttgcgcgctatgagcaggcgatcgcaggtaaaacgcaggaacagttcgatttggagtacggcgaatggcagtcgcgttctgatacgtggaatgcgtcgatcgcagccgcccgcgaagacgatcctgatgtgacgtgggatacgctgacccaacagtatggcgaatgcccgtggccgccgccgatgacgccgacctcgcagtggcgtccgtcaggcgcgttccatgccatgctggagcgcattgtgccttactccttggcgggattcctatggtatcagggcgaggaagacgagccgtattgcggatcctaccgtgagttgctgggcatgatgattggtgaatggcgtgcgctgtggagcgaaagcctgccgttcctgatcgtgcaattgccgcagtggattgacaagaaggtcgacgagggcgacggcgatccgatgctgtggccggtgttgcgcgaggcccagtgggatgccgcgcagtccatcgacaatgtgttcgccatctgcactatggattgcggcgaatacaacaacattcatccggttgataaacgtacaccgggcgagcgtctaggcaattgtgcgcttcgccaagtgtatggtatgagccgtattccggtgtatgggccgactgtgctgggtttccgctgcgacgaaggcggccgcgtacgcctgttcttccggtacgcgcacggcctgcatttcagcggtactacgcccgacagttttggtgacgagttcgccaagagcctgccttcgctggtgcgtctgccggaacgttccggtttcgagcttgccggtgccgatggtgtgttccatccggcctacgccgcgattttcgtggattgcgatattgacgatctggtcaacgcaaaggtcaacgtggtcgattacaacgccacggaattcggtattccgatcaacagccgcagtatcggcacgattacgttggccacgccggaagtgccagcgccggtgatgatgcgctacgcatggcgtagctggggtccggcaccgttgtttaatgacaataatctgcctgctcacccattcaagctggacctgaccgatcacaccgactctgatcacgctgaataatcacgttagatagttgcgttgaacggctgcgtcacatgattgtcgatagttgacgatgaatagcgtgcgattgctgtgcttatagtgtgctgcaatcgcacgctttatattgcgattgaagtcctgctgatcgcacgtcagtcaaatacgaatcaaataccagtcaaataaaaaatcgttgaaaaatcaacgtttctgcgatttatgccaccaaaatcgcagaaacgaatcaaataaaatgcgctgcactgcgagcgcataggctattgccagaggtccgggccgaatgattccaggtatgcggtcagttcggcggccatctgttcgtcttccggaacgcgcggatggccatccttgccgcaaccattgcgtgaatacaagaaatgttttacgtgaaactcgccctcagtgccgcggccgttgccgtggaagatggcgtggaacttaccgtcacagccaagagctacgtgcgcgacctgttctgcatggcagataaggtcgacgcgaaggcttcggtggccgagggcatggtctcgctgcttccgggcgaaagcgtcgtgctgcatatcgccactgccgatgccgcagcgcttgccgctccgggtgcgttcgcagccgccaacgtgccgcgttccgccaacgatccgaagcgcgaatggtgagcttccgcgagtacgccgtctactgaagcggtagaagagtggatagaggactactgaaatttcagttgacgtgttcggttgagtaaaaacataagttgaagcgccgccaaccttaagaaacgaaagtgttgtgaacgctgacttttcaagaggttggtcggcgcttttactgtacgatgtagatgaaccgtttaagttgcgatttaagttaagaagaaggacacggacatgcctattcaaaaaagcaaggtgacgatttttgacgttgccaaggcttcgggagtctctagtagcgccgtttcgtatgcgctcaacggcaagtctggtgtttccgatgtgactcgagacaaagtgttgaaggtcgcacacgaactgggatggaagccgaatggcgcggcacaggcgctggccaaggcgaagacgcagcgcgtgggtctagtgttgggttacgacccgaagctgctttccgtcgaatcctacatgatggaacttatttccggtcttggcgccgagctggaaaaatacgattattctctgctggtacgcatggccgtgggtgaggacgcgaagctttcgatcatcgatgattggattgctactggcaacgtcgacgccatgctgctcgtcaatgtcgagcttggagacccttgcgttgccttgcttgaggagcatgaggagatgccggtgcttgccattgccgatgcctccgtggtcggcaatctgccgagtctgtcaagcgccgacgccgatgccgtgcgccgagcggtgcgatacctgtatgatctcgggcatcgtcagatcgcccgcgtcggcggtcccgaatcgcttgcgcactcgtatattcgcgattccgcctttgcggacgtcgcttccgagctgagcatgcgttatcgttgcctgcacaccgactacacgccggaaaccggtcgcgaggccacgaagcgcctgctggcgttctctgagcatccgacggcgatcatctacgacaatgatgtgatggcgttggctggccttggcgtggcagcttcgcaaggcatcaaagtaccggaggaaatctccatcatgtcgtgggatgattccctcatgtgcaccgcggcgtatccgaacctgaccgccatggaccgtgacgtggtcgataccggtaagcaggccgccggattgctgctcaagctgatcggcggcgagcgtgtggggcatctgatggaagggccgtacgaattgcgtgcccgcgcttcgaccggtcccgctccggcagcggaataagatgcgatgatgagttaatgcgatgatgaattaaaaaattgcgattgcgcatttgctgcgccccgacaagggcaggatgaaagcgagcagcgagccgatcgcggcgatcgccgcaagggttacgccatacaggattgcgacggtgttgccggactgcttcgacaggtaccacaggtcgaacggcgcgagtccccagaacagcccgggaatcgcggattggaaatcaaaatctgaaatctgaaatcgtaatctgaaatcaaaaagcgcccgtgcccctcgcttgaggcatgggcgcattgttgccttacgacttcaggcgcgcttctgtgtgatctgataggcggtgaacagcacgaccagccaaatcacgccggcgaccactgcgatgcgatagcttgcggagaagcacatcagcaccacgaccagcagcatgaacgcgatcaccacatacggcgtcaccttggcgaatggcagcttgaacgcaagtttgtcaagtgcttcctggcccttcaatcccttcaaatcattcggaccgtcgccggcggcgacaacgcgacggaacttaatttccgtaagcataatcatgatccaattaatcgcagcggcaatcgtggcaatcgacatcaaataattgaacgcgaaatcaggccacacgaacaccaccaccacggcgatcgcaatgatgatggccgacgtgatcacacccccgaccggaacgccgcgcttgttcaggcggcccagatacgcgggcgcattgccctgcttcgccaacgaatacagcatgcgcgagttcgcgtacaggccggagttgtacacgctcatcacggcggtcaagcacacgaaattcagaatgccggcggccgcatgcacgcccaccgagtcgaaaatctgcacgaacgggctggaattgccgtcgatcgtgctccacggcaccacggccatgatcacgccgagcgcgcagatgtagaacacgagaatacgccagataatgccgttcgtggccttcgggatggtggtgcgcggattttcggtttcgcccgcggtgatgccgatgagctcggtaccgccgaagctgaacatcaccacgaccagcgccatcagcaggccggtccacgtgccgtccgcattgcgagacatcaggccatgcggcaggaatccgccgtcaacggtaaaccagttggcgaacgacgcgcgaatgcccgaagcggtcggcacattcgcgatgatcacatacaaaccgccgaaaatcatggcaagcacggccacgatcttgatgatggcgaaccagaattcaaattcgccgaacttgttcacgcccataagattcagcgccgcgatggccaccaggaacaccgccgccgacacccacttcggaatgttcgggaaccagtaattcacgaacgagccaaccacggccaactccaccatggccacgagcacgtagttgaaccagtaattccagccggaaataaagccggctcgcttcgaccagtactgcgtggcgtaatagctgaacgcgcccgccttcggatcctcgaccgccatttcggacagggcgcgcacgatcaggaaaatcgccagaccgccgatcagataggcgagcagaatggccgggcccgccagctgaatcgactcgctggaaccatagaacaggccggtgccgatcgcgccgcccaatgcgatcaattgaatatgacgattcttcaaagacttgcgcagcgtcggcggaaccggcacatcgtcggtttcgcgcggtttcttcgcaacggttgcgtcgctcatgaatgcttcctcttcttgggtgcctcggcaatattcggcaaattcggcaaaagtttgcgatcttggcgatgttgcgttcggcagtagtggtaggtgacgcgcctatggtttttggtatggcgcgtcttccccgattgtagctgtagcgcgtggattcggtttcatagtgttcaatagttcgatagttcaataaaatgaaggttttgggagcaatggttggtgctgcttgagcgctacgggctggaggtcgtcatggcattcatcaaagacatggtgcgtatgtggttgcatgcgtggaagcgattcatctccatcgcactgatctcgttgctgggcgtcgccgtgcttacgggcatttacgcgggttgccgagacgcttttcttgcgacggatcgttttttcgacacccaaggattgcacgacattcaggtgttgtcgacggccggattgaccgatgacgatattgccgcgctccgtaagatttccggtgttgcgaaagtgcagggcgaacgttcgcaaaccgtgaccgtcgatctgaacggcaaaaaaaccgtgaccatgcaggagatcggcacgaacggcattgaccagccgtatctgcagagcggacgcatgccggagaagtccggtgagatcgcggtgacgcgcaaattcatcaaggattccggatataaaaagggcgaccatattacggtgacgccgcaggattcggcgtcttctgcttcttctgcgacgtcttccgtgaccgattctggtgaatcggacaatcaggcaccgagcttccccaccgaactgactattgtgggcgtggtgcttgacccgcaggatctcaccaatccagacggctattcgggtacgaacgcgttccgttcctccgccaccagcgactacacgttctttgcgccgtccgacggtgtgaccggcagcatgtacacggccgtcaccattctcgtgaaaggcgccgccgacaaggactcgttcagtgacgtgtacgacgacaccgtcagcgaagtagctgaccgcatcgacggcacggtgcgaaccaatcgccagaaagcgcgtcatcaggaactactcgacgctggaaccaaacaaatcgacgaggcgaaagcgcaaaccgacaaacagttcgccgcagcgcaacagcagatcgacagtaatcgcagccagctcaaccagcaaatcgaccaaatcgtcaatatgcaggcgggcgcggctgcaggatccctcgacgaaacaacccgtgaaacactacgtgaaacggtaattgccgcaagcccgcaattagcggaagccaaagcgcaactcgaccaggcgcaatcgaaattggaccagcagaaaaaagacaccgaacggacactgcaatccaagcaaaacgagctggaagacagcattccgcaagtgcgttggtatgtgcaggaccggtcgcaaatcggcggattcagctcgctgaaatctgatctggaatccatccaatcgctgggcaacgcattcccgatcgtgttcttgctcgtggcggtgatgatgagtctgaccgccatggcgcgcatggtcgaagaggatcgcgggctgatcggcacatacacagggctcggctacgggcgtcttgcggtcgcctcacgatacctgttgttcgcgctgttcgcctgcctgatcggcggtggactcggcctgatcgcaggcttccttggcattccggcgttcctgctcgtcgtattgcgaggcttgtatgtgatgccggacgtacgcttggcatacgactggctgtacggaacggccggagtcgcgctgttcgtggtcggcgtgcttgccgcaaccgtgtatgcgtgcgcgcaggaaatgcgacagaagccggccagtctcatgcgtccgaaagcgccgcgtgcaggatcgcgcattctactggagcgtatcaagccgttgtggaatcgcatgagcttcctcggcaaagtcacggcgcgcaacattttccgcttcaaatcgcgtctgatcatgacggtcggcggcgtggccggctgcaccgcgctgattgtgtgcggacttgcgatcaacgacaccgttgccgcattgggcgcgaaacagtatcaggacgtgtatcagtacgatttgatggtggtcgcgaacgatgatgacgctgatgcgatgcggcagaaagtcgcttcggatggtcgcgtcacgtcgagcatggacgtgcgcgttgaatcgggtgatttgaccggcgattcggggagcgaaagcattcagctggttgccgtgcccgacagtgaacgcagcgagttcggcaagatggtcacgttgcagccggtgcgctccagttgggtggatggtgcggccgatacggtaagtctgggcgatgacggcgtgatcgtatcgcagtccgcggcaagcgcgatgggcgtcaaagcgggcggtatggtaacgctgaccaacggtgacgatatgcaggccgaagcgcatgtcagcgcggtgatccgcagtgtgatcggatcggacgtgtatgtgagcgaaacctattatcgccagctgttcgatactgctgcatccggcacgtcttccgcatcttccgcgtccgattctggagaatcggacaatcaaaacggcgaatccggtacctcgaatggcgcatcgtcaaacggccaacaattggtgtggaacgccatgtatgcgaagctcaaaggttcaggcgaatcccaggccgcctatgcggaaaagctggaagacgacgatgcggtcatgaaagccgtgagctgcgcgcacatggcggaaagcttcaaattcgatctgatgggtgcggtggtcgcgctgatcgtggcgctcgcgggcgggctcgcgctcgtggtgttgttcacgctcgccaacaccaacgtgtcagaacgtgaacgcgagatggccacgctcaaggtgctcggattcttcgacaaagaggttcaccactatgtgaaccgtgaaatgatggtgctcaccatgatgggcgtggtgctgggcttgcctctcggccgtttcgtcggcggattgctgacggctgcgttgaatatgcccgcactgtatttcgaagtggaatgcacgccgttgagttatgtgattgcggccggcgcgaccatggctttcgcgctgctcgtgcagttgttcgtgaatccggtgttggatcgtatcgacccgattagttcgctcaaatccgtcgaataggcgcatgtctgaatgtccgattctccagaatcggacaagtaatgcggcgaaagtgccctgtggttgtccgtttctccagaatcggacacttagagtgccggaaaggctcggattcgcgtttcagttcttcggataacggtagttgtgtggcagttgcgtggtgagctgcgggtccaggccgagttccttcaactgccggtcgatttcgcggcgcgcacgtttcacaagttcggctcgatattcatcgccatgtccggcattgctatgtgccgcatcgccatgtcccatcgttcccatcttctccagtgcgtccaatgtttccgccatacgcttgagccggtcctgatggtgcagcagcgcacgcacctgcgcatgttcgtgcacgatcgtccgccaatcggatggtgtgtgtgcaatctcccgaaccgcggtgaccggatgtacgtcggccacctgatatgtgatcgagccaagcagcggcattaggaacaccgtaatcgcgccggctgcgaccagtgttgacgcggtgtcgccttgcatggtgccgaccttcaccgccagtgacgtgacggcgacgatgatcggcagcgcggtcgtgcaatacagcgctacggtgacgcgatgatgcgatgacagcggattctcgcgtttgtcgagcgatagcgcaacatatacgggcaccgcgcgaatcagcatgagcattacgatgaacgcgacgagcagcgcgggtcggcctgccacggcgcgcacgttgatcgcggctcctgacaccacgaaaaacacaggaataaggaatccgtagccgacgccttccagtttcatttccagcgacttgctgccgtcggggatgatgtaacgcaggatgaagcctgcggcgaacgcgccgagcaccgcgtcaagtttgaacagtgcagaaatggtgacaaggaagatgagcaggaatgtggtcagtcgcatgagcgtttgcgatgacgtgttcgcgttttccgtaaggaaacggtacaggcgatggccggttttcagtgctttcgtgggtagcattgcgcacagtagacagatggtaaggaacgcgccgagcacgagcatggtctgccagccggttcgggtggatagcaggatggccatggcaaggattgggccgagttcgccccacgttccgtacgagatgatggcgtcgccgatgggggtgccttcgaggttgcgttccttgagaatcggcatgagtgtgccgagagcggtggtggtaagtgctattaccgtggcgatgccgttgatgccttgctttgcgaagaatggaagcagggtcacgacgagtccggcgagccccaaggtgatgatccatgtgacaaggccgactttgccttgatgtccggcgagtcgtttcgggtcgatttcatagccggcgagcaggaataggaacgccatgccgagctcgctcaagagtttcacggcgtcgttcacctcgattacgcccagtccgtacggaccgagtgcggctccggtgacgagcagcagcacagtttgtggaatgaaccttcctggaatcagctgcgccacaatcgggctgacggccgccaccgccatgatgatagtcaatgaaacgagctcttgcgtcatgtttctagcctagtgagtctgcatgacggtgttcaaggacgtgatgccccatgatgagccaaagggcactctggggcaaggttaagtttttgtaaattttatgggggggggggg

SEQ ID NO: 845 - DNA, 398645 bp, Unknown
  gut microbiota DNA sequence
ggggggggggtaattctatgagcgttactatctgtgcaaaatggcggaactgttttgttttgaagatggaactccttcttttcattgggggaagggtgggctttattcgagggttttaacgagggtgccaatgggaaagctccgatacgattctgaaccaagctgtttaggcaatatagggggagggaagaatggttgatggaaaattcaccgcaaaggagcgcgcgtatttggccagccttcccgcagtggaaagcgtgagcgcgtcgcgtattcgatattcagaccgtttccgagtggaagcgatgtgccgttataacgccggtgaatcaccgtcagccattttccgtgaagcggggcttgatccgaaactgatcggctacaagcgtgtggagcggtgcatcgcgcgctggaagcagcaggaacgtgatgagcgtcgaaagggaaaagggcccgcgaaccattatctgcaggatgtcgaagatgatttatcgatcgccgaactgcaaggggctacgcacgaaggggagacgaatgatccaactgaagccgacgaatcgcagaatatggcggcaaagcttgcgcaggcgcaactgaccatcaacaaatgcgacatgctcatcgccaagcaagcgttgcgtatcgacgagcttgaacgtgtgctgcggaagttcatccagtgatggacatgcggcaacagcagcgctatcgggagccgtctttcgaagaagccgtcgacattgccgatgaggtgcggcagtggcgcagagaacgtaggaaagtcattgccatgcgggtggttgcggcgctgttgatcattcttgcgataggtatcggtgggtttcctatgtttctacagtatcagtcggcgctggagctacggaatacgtcggatcggtccgcgcaggcggtcgccggctggccttacccccaggctgatgaggcgtttgccgcggccaaagcatataacaggcggcttgcggcttcggggcagccgattctcggcgaggctcaagacccgttctcccgagtgcagggcggttcgcagtccagtgaatccggtgccgcggaatcaaatagcgccagcgccaaagataaggaatatcaaagtttgctcgattcgggcagcggcgtgatgggaaccatccgcattccgaagatttccgtacgtctgccgatctaccatggcacgtcgcagtcggcgctcgcatccggatccggccatctgtatggcagcagcctgccagtgggcgggcggagcacgcatgcggtgatcaccggccaccgtgggctggtcgaggcgatgatgttcacgcgcttggatgagatgcgcgtcggcgactacttctacatcgaagtgatgggccgtacgctcggctacaaggtggatcgcatttcggtgatcgaaccgaatgacacctcgaagctgaagattgtgcccggcgaggaccgggtgacgttgatgacctgcacgccgtacggggtgaacacccaccggttgctggtttcggcggtgcgtgcgccgattcctggagtggttcccgaggagcggaatgcggcgaaggatgcgcggacgattgcgattgcggtgtcggctggcgtgctcgtgtcggggatgctgcttgcctggctgcgtagacggccatggcatattcgcagacatgcggcttggtggccgaaacgtggctagctgttgcgttggcatgctgaggcgacatccgtacggttgcggacatgtgaataatgttgccccgtcggacgtcgggcttatgtgaatttcgggtagcgcagatagctgaaaacgttgttaccacttggtttcgaggctatttcatacccccgaatctcccgcgcttagggtgtacatatccattcccttttccttttattgttcaaaattggagcgccggaagtgtatccgcgtcggctggatgcgtgactggtgatgaagatgtgaatcgtgcacatgcacacggtgtgtaaggggaggtagcagatgaggcatacgcgaatacaacaggcaaagcccgagaggagctttgctgaacgaatagtcgccgtcatcgttgcgatcgccatgctcggcggcatgggctacgccaccacttccgccgcgatggcggatgataccgaacagaccacggagcagcaggccggcatcagcctgggattgcatgattacgatcgtaatgccatcaataagggtcatgcgttgaaattcaagaacgctggtccagaagagtataacaaatatgtcggtaatgacaatggcgcatacaccggtattgtgaataaaaccctgacaaatgatggctatccgaccatggcggctgataaggaatcagaatcattggactatctctttggcgggaagcctgatgatgaagccgtcaccagctacgagccggatggcggactgctgacattggacaaggatgggtattacggtttcgacgccgatttccagaaggctacatatgacacggtgtcgaacaagttcacgcggatcgactggacttgtacggaccaggctagtactccttgcttcgctccatttggagacgatagtgagaataataaatattctttcggcatgaatcttggcgccgagttctacatgccggaatacggcaaggttaacaatcaggacatggtgttcgactttaccggcgacgatgatgtgtgggtgttcatcgatgatgtgctggtgcttgatttgggtggtatccatcaggcgttggatggcagcatcaatttcgccaccggcaagatcacctatgacaggacgcagagtcatggaaaccatcctgccggaacaatcgaccaggcatttgccaatgcgggaaagcgatgggattccacgccgtataagacacatcatctgagtttcttctatctggaacgcggcgacggcggctccaactgcaagatcaagttcaatctgccggtgaagccgtccaaggccatcgatatcgagaaggaagccctaggcaccatcgacgcggacaaacagttccaattccagctgttcgtcgacgattccctaaccccgtaccagggcgaatacagcgtgtacaatgcgtacaccaatcaggtcgttcaatccgataagtcgatcggagacaacggtgtgataacgctgaccaagggtcaattcgcccgcgtgcaatccgacagtttcaccgacgctacctcgtataaggtgcgggagttggactctagcggctacaccgtgtccgcgaacggttccccgatgacgcagcagggcagcaatgataatgcatacgccgaaaccggcttgttcaccgtgggcaagacgagtcatgtaaccatcgtgaattccaatgtgaagccgtcgaacaacaaaagcatcgtgaaaaccgatggcggcgacggtgatcagtacacgctgtatctgaccgcatccggcgatagcacctcatccacggtcaccactgccacaccggccgacattgtgctggtcatggacaagtccggcagcatgaagggcgaactcgacagcaatgcgaaaaaagctgccaacgcgctcgctaagaaattgctgactaccgagaattcaacgttgtcggatgatcaacaggtacgtatggcggtagtgacattcagcactaacgcttttctcaagcagacgttcaccacgaacgcctcggaaatcaacaacgccgtgaagggtaaccccgacggcggcaccaactgggaggccgcgctccagcaggcaaacgatctgaaaggccgctctggtgtgaagaagcacatcatcttcctctcggatggcaatccgacataccgtacgacctcgtacagcggatgttattcgtattcgttttgggatgggcggactgctcatccggaatatacgaccccggagtcctgccaagcacaacggtacatgtggggtgaaaatcctgatggtagttccgatggcgcgtacggtgcaggaaatagcgatacatacggtttcaactatgctgccgccctggctgaggctaacaaacgtggcgatgccgcactctatgtggtgaagacttccgctgatgcgaataagatgaccgatctcgccactgaagccaatgcagtgaatggcgaggaatttgacggcacgaacgctgagaatctgacgaaagcattcgaccagatctattccaccattacctcttccgcgaagatcaaggtcttctccatcgccgacaccttgtcccagtgggtggatccggtcgagttcgcaggtgtcgccaacggtgccaacatcacgcaatatgtgacggtgaagaacggcagtaccaagctgacgagcggatatacggccatatacagcgtcgacagttccggcaatcgcaccgtgacggtgacgttcaacggtactgacggtactgatggcatcgtcgcagaaaaggctgatgacatcgacgtttccttcaaagtcaagccaagcgatgccgcatataccaactatgcgagcggcaacaactatccggatatgggagatgcggataccggaaacgtatccgccgggaagcaaggctactattccaacgtggatgcaaagctgaactattgcgtgctcaccgaggtcaacaacgcgacatcctgtgaaaggaccgaagccgaatatccgcatccggtggtgcaggtgaagcttggcaagatcaacatcaccaagcaatggaagggcagcggtgagcatgccaattccgtgacggtgcaattgcaacgcaaggcgattggtgcgactactaatgcggagaacgttggtgattcgatcacgctgaacgccgccaacaattggaccacaacggtcgataatctggtgcccggctacacgtattccgtggtggaaaccaccggcgatgaccgatatgacgtcacctacaaagtcaacaatgccgcgaataacaatgctgatttgaccaagcagatggtgtggtcttccaatgccgatgagggaacattgactgcgaccatcaccaacacactgaagacggtatcactgcagcgcctaatctcggtgcagaagaatctgaccggtcgtgagtggaaggattccgaccagttcgacttcatgttggaggcggaaggcaacgccccgttgccgacccgctgcaaggatcagcagtcatgcacggtcacggtgaagcgtgattcgaccgaccataccgagtccttcggtgatatcacctacaacgccggtggcgccgaatacacgtactacgtgacggaaaacctgggaaaaatcacggcactgcactactcacaggcgaagtacaaggtcgtggtgaccgtgagcggaaacgccggcacgtggggtgctgccgtgaagtccgtgaccaaggtgctggatgacaacggcaaggcggtttccgaatcgcaggacgacattaataagccggtcgccttcaccaaccattacatcgcagtgtcggcgctgccgttgacgggcgggatgacggatcgtcagtggctgttcgtcggcggtgtggtcggcgggcttgcggtgctgcttatcggcgctgccggtgtgtggaacggcaagaagcgactcgtctgaatcgctgtgcggggtcggaacgtctgccaacttgaaggcgttccgaccgataatccaagatttgcggattgcgggagcaagttgggttcccgcctcccgcgatcgcagaaacaagtaatcaaacaataaggaagagagggttctcatgaaggtgaggaaacttttcgccggcatcgccgccgctgcgacgctgctcggtggcatggctctgggcgcagccagtgcacaggctgctgatccgcagacgaccccgttgctgcaggtcaacaacgcgcaggaaggccacatgtacacgccgtacaagttcgccacgttcgagaacgccgacaacggtactgttgaggtgagcacggtcgaggcgtggaaggacgccgtgaccgcggccgctgacactgccaatggtaatgattcgattccggcggaatataaaaacaatccggccgcatacgtggcgacgttcaatgcggagcagatccgcaagttcgctgaagaactggccaagaccaatccgctgccgaccgccgatggcgcaggcctgaccgtgaccgcggagcaggcgggcacggcccagccggtcgcggtggatggcgaaggctggtacctggtgactgacacctataacggcaaggccggcactccggccgttgtggccaccaccgtcaatggcctggacaatctgcggatcgttgccgacgcgaagaccggccagggcggcatcaccactgtgggccggttcaatgcgaagaacgagaacccgctcaccccgccgagcaagactgccaaggtcggcgatgtggatgtgaacggcaagaccgtgaatgtcggcgacaccgtcgacttcaccgtgtccgcggccgtccctgcttccgcagccaactatgacgtgtatcccttcaccattaccgataccgcgtccaagggcctgaaggtcgccgagacgaacaccttcaaggtgcaggtcgacggcaaggacgtggatgccgccctgtacaaggtggaacagaccggtagcgccgccgtcggcaccactacgaccatcacgttcgccagcgcgaagtccctggcgggcaagaccatcgtcgtgtcgtacaccggcgtcgtcaccaaggatgcgctgaccggcctggacggcagcgtggacaacaaggccacgatcaccaccaatggtggcaccagcggcgaaggcaagaccgaatccaagacctacggcttccagttcaagaagatcggcgtcgacaacgatgccaacgctttggccggcgcgcagttcgtcgtcaagaagaaggatggcaagttcctcaagcaggatactgaatccaaagcttggtcctctgttgacgatcaaacgaacgccacggtgttcacctccggcgctgatggtctggtgcagttcaagggccttgcagctggagactacacggtcatggaaaccagtgctccaaacggctacgcccagaacttcagggtcaccttcgacgtgagcattgcagagaacggcacggttaccttcaagcaggatctcctccatcaggtcactttgccgaccgacgaccagatcgccaccgtgaagaacgtgaagtccatcacccagctgccgctcaccggtgctgcgggcaccacgctgttcactgtcgtggcgctgctcgtggccggtgccggtgtgaccgttgcggttaagagccgtcagcgcatgcactaaacccacaaggcggtaacgccaaaagctatgcaggggccaatccaaccgggttggctccttttgtgtgcgcccgcgacccgactgtcctacggtccgacccggccccgcgggaacttctgtggggtgtcatccacatcagatgaggatatttttcgaggggacagtgcggattggtgcgacgtgttgcaacaagctgaaccgtggatgcgaggtagtcacagacagtctccgaagagaggggaaaaacgagggtatcgtacggcaagcgggccatagaatcataaagcatatccacgagaagtgagcaatggagacacaggacgggaggtatgccgtgcgtggcggcggagcattcagcgacgaggagattcagttgttgcggggattaccggcggtggcgaatgtgacgcgtaatcgtatcacttattccgacgctttcaagcagttgtgcaccatccggtatcttgcgggggaatctccgaccaaaatcttccgtgaggcgggattaccaccggatttggtcgggtataagcgcatcgaacgcagtgtggctcgttggaaggccgctgccatcaaatcagtgagcggcaacgatcccctggatgacagcgagatcattgcgcagctcgttgaacggtgcaagcgtactttggtgacgaggcggaatcttgacaatatggcgtccggtgttccggattcgagcgttcccgttatgtccgaaggcgctgtcggcgcgcatgtttcgattggcgcgctcgacggtgataccgctgacgtcatcatcaagcagcaggcccgccgcatcgacgagctggaacgcgtgaacgccgaactgcgcggccaaatcgccgccaccacctgacccagactatcgttatgccatacgcaagcgagaaagcagcggtcaacctcgtgaatctgccatatataggcgagacaggattgaattaagcgaattccgcctctgtctgccaagtttgaaggctttcggacgtattgggaagcttggatggcatgctcgggattccggttctttgttcattgttttctacgttagacttccacagggtttggtgaggtcaattcaggattcgtataaaatgcatcggcctgtgtcttcctaatgtcatccgtcctattgggtgcgagttgcgttggaagctcaggctcaaagatatggtcatttccgaatgacttgctccaacgggggcctgccgtttatgaaatcagatacacatatttcgtgaagtaatcgcgccattgtgctcgatatattgcgattgcatatagtaccaatgcagcctgattcaggcgacggcctgcaataggccggctggctcttagaaggaggatgacgatgggaaacgtcattttgggatgggttatttgttccgagggcgtatggacttggtctattagtcttggagaactgttggatacgggtgtcaattttgttgcggcattggtgactgcggctgcgcttgttgcgggtttccgacaaatgaaaatgacttgggagaacgactccgatgctcgactgcaagatcgctatttcgagtttcagcagaaggcgtatcttgttgacgcatatgtgacacggcatccaaaacagaaacggttcctggtcattgcaaatcagactgatggcgctatacgtaacgtgaagcttcatgtgaaatggcccgaccttgatggaagacctctggaatgtaatcagctggatgatttttctttgcattgcgttcccaagaaggatctttgctggaaggtgcttcctcaagggcagtggttcgtcagtcctaattctgaaataacgtatgcgacatggacgtacccccagcttgatggtgatggaaaacgttactctccggaattctttgaacacaggaatggtgcggagaaagggagggaattcgcggtcgttttcattgaattcacggatgcatacggtaaccaatggcagcgggtgtttgatgttgccgaccatccggattcgttgacgccggggatgattctgctcgattctcctgataagcgattgagaaaagtggccgaacgaattcaaaaagctactcagggctagcgttcgggctgtcaatcaaatctgcaagtggcggcgggcatatggacaggaggtatgcatcaagcagcaggcccgccgcatcgacgagctggaacgcgtgaacgccgaactgcgcggccaaatcgccaccacctgacccagactatcgttatgccatacgcaagcgagaaagtagcggtcaacctcgtgaatctgccatatataggcgagatagggcggcagggggtatggcgaggcgaaaatacgggaataaggtggtcagctgggcacggttgaccacaaacgggatgcgccagtgccgcaaaatctgcgtacgtgcccaaaaacaaagcttcggcgggcgcaatgtgcggttcgcggggtagggtagtgaacattatgacttccgagaacaccaattccgcgggctcaagcgccgcgcacatcaaatccgtcgaaagcctcgaccaaagcaatgaaatggagcgaggcctgaaaaaccgccatgtccagttcatcgccatcggcggcaccatcggcaccggcctgttcctaggctccggcaagtcgatcgcactgaccggcccgagcatcattttcgtgtacatcggcgttggcctgatcatgttcctgctgatgcgtgccatcggcgaaatgatgtacagcgatcctagccagcacacgttcatcaacttcatcacgcgctatctcggccgcgggtggggcaagttcgccggctggacgtattggatcgtgctcattctgaccggcatgaccgaaatcaccgccgtaagcacatatttcgtaacgttcttcggcacattcggcatagacctgaactcgtggaagtggttgatcgaactgtgcttcctcgtagcgctcaccggcatcaatctgattgcggtgaaagtgttcggcgaggcggaattctggttctccatgatcaagatcacgctgatcgtcggtctgatcgtcaccgccatcgtgatgctgatcatcggcttcagctaccccgccacgcacatcgaaggcgtggacggcacggtgtcgggtgccacggtgagccttacgaatatcaccgacggcttccagctcgcgccgaacggttggatgaacttcttcatgagcttccaaatggtgttcttcgcctaccagctcatcgaattcgtgggtgtcacggtgtcggaaacgcagaatccgcgcgaggtgctgccgaaggcggtgaacgagctgatcatgcgtattctgatcttctacgtgggcgcgctgatcgcgatcatggctattgtgccctggcgtaactttcacgagaattccgatggctcgttcggttcgccgttcatcatggtgttcaaatatgcgggtcttgattgggccgccgccctggtgttcttcgtggtgattacggctgccgcgtcggcgttgaattcgctgatttattcggccggtcgtcacttgtatcagcttgcttcggattccgagtcgcctgcgatggcgcgtttggctgaggtttccgaccacaaggtgcctgcgaaggcgatcgtcgcttcgggttgcatgattctgttctctccgatcatcaacgcgattccgggtatttccggcgcgttcgtgctattcgcttcggccgccagcgctgtggtgattttcatttacgtgctgacgatgctcgcccaccacaggtatcgtcagagcagcgattttctaccggacggtttcgtcatgcccgcttggcaggtgtttgattggattgcgatcacgttctttgtgctcgtgtatgtcacgttgttcctgtcgacggacacgattggttctgcgattgccggtctgatttggctggttgcgttcggcggatattgcctgctacacgaacgattccagaatcgcgatcttaaggaagccttgcagcagtagcgtttgcaggtaacgcaggatacaagtaaggggcgttcgccgaacgtgagtgcatcacgtacgttcggcaaacgcccctttcagcatggtctttgcgcgaatccccattacgggatccagcgcaaatcagccgatatagtcggcctcgttcgtcgggctggacggcacggcatgatcttccgtaaccttgcccaagccagacaaatacgcctcgcgacccgcttcgatcgccttcttgaacgcgcgtgccatcagcggaatattgccggcggaagcgatggccgtgtatgccatcaccgcgtccgcgcccatttccatggcttccgcagcctggctcggacggccaataccagcgtcgatgatcaccggaacattggagttcttgatgatcacttcaatgaaatcgcgtgcacgcagacccttattcgagccgatcatcgcgcccagcggcatcacgcaagccgcaccagcgtcttcaagacgcttcgccgcaatcggatcggggaacatgtacggcatgaccacgaagccttcttttgccagctgtttcgtggctttgatggtttcctcattgtcgggcagcagatacttcgcctcatgctcgatctccaccttcacgaaatccgtctggcacacttcgcgggcgagacgtgcaatacgcaccgcttcctcggcattgcgtgcgccggacgtgttcggcagcatggtgatgcccttcggaatgtaatcgagcagattgttttcggtggtacggcagcgacgcaacgccatggtgacgatctgcgtacccgcgttctcaatggtcgccttgatgaggttcagatcgtagcggccggaaccgagaatgaaacggctcgtgaacttgtgtccgccgaggatcaacggatcggcgtcaccggtggcgatttcgtcatacgcgtgcgcatccggttccggcagcagtgcggtgttcgtggtggtgccgaccagctcgtcgagtgtggcattcggtgctgccgcgaagtctttttccgcggtggtgatcgtgttttcggtgctcatggttaatccttactatgcgattagtgttgtgtcattcgttgcgatttgcgattgcaacttgcgtttgcgtttgcgtttcgctgtcaggcgtcttcttcgccgagaatcaagcgagtgatcatattggcttcatggcaggcgaccacacccacgcgcggtgccatcagaccagcgcccggcaccggagcggtttcgccatcgccgcagaagtagaaattcttcgaaacgcgacgagtattcaccaaattggaactgcggaatcccgccattccagaagcactcaccagcttcttgttcggcagattctcaagtacggcattcaccagcatcgtcttgttttccggcacgtcgaacgcttcgcagataatatcttcattaccgaacagcatcggcacgttctcgtcggtcactttcacggtatcaatggtgatatcgataaaaggattgatctgacgcaagttactgcgcaatgcttccgtcttgtactgcccaagatccttcaaaaaatactgctgacgattcagattcgtcatatccacgcgatcaaaatcaatcaaatgcaggtgaccgacgccaatgcgggtcaacgccactgcaatcgtcgatccgaggccgccgcagccgcaaatggccacgtgcgccgcgtcgagcttgtcttgcgtggccgcggtgtggcggtcgagcagggccgcgcggatttcttcgcggctgacgagcgtggtcgggtcgggctggttgtcgaaagcgtgctggcgggcgtcgatctgcgcctgcgatgcggatggttcaaaagtcatggttgttctcgtattctcgttttccgttcgtgcgttgtttttgccgggttggttgtgttttgtatgttcttgcgattgttacgcgtgcattgcgccggtcgtaatcgtaagaaactttgaaagtggttcagccgccctgcacgaacgtgacgatttccaacgtatcggtgcccttgagctgcgtctgcgcacgctgggtgcgaggcacgatctcaccattgagctcgacagccacgcggtcggcgcgcaggcccttgctttcgatcagttcggccacggtgatcggcgtggcgatgttctcttccttaccgttgatgatcattgcggttcccttctgtgtctgtcgtgacacatgcttcctgcactccaaatgttcgtttctggtgaatcggacatccggaggttcattgttggtctttaaatgtccgattctgcagaatcggacacgcacggcatctatttcagtccacggatgtccgtttctggtgaatcggacacgtaggcgcttgttcgagccgcttgtgcgtccgtttctgcagaatcgggcactcaaggttggtacgaaaaaagggtcgccgaaggaaccgtaccctatgaggtggtgcgcccctccgtgaccctaatcacgcgatattcggttatcgcgaacggaagatgagatacgtcttgcggcgtgaacaacccgtctccttacggcggcattacccgcatcaagtcctcggtcgaagctctatgagctccctctcagcctttcggctcccgttcggttgtgccttcatcttcgcgcacgcgcccgacaagcttgcgccggttcacgttgggttagtcttgatgtgaacatgtgcgaatcggctgagtgcttgcaaggaaggggaagatgatgatggacggcgagttggcaggatttgcgattcctcggcttggtatgggaacgatggctttggcgattgaggggcgcccggatcgcgataccgcgattcgtacgattcatgccggtttggacgcgggtgttcgctatttggacacggcttggtcatattatctgccgagcgagcctggcaccggcactgcggaagaccttggctacggcgaaaagttggtgcgtgatgcgctcacttcgtggaatggcccccgagatgaagtgctggtcgccacgaaaactggctatcgacgcaccatggaggtccccgcttttgttgctcctgtgtccgattctggagaatcggacaaacagggtgccggatttggggtacagatgtccgattcaccagaatcggacactcaggggcgggattctgagggatgcagccgtcggcctggcgaggaacgccagcatttgcaggcggcgggcagtcaatacgggtggatggcggattcgcgccccgaaaccatgattcgtgacgccaaggagtccgcgttgcacttgggcgtcgatacgctcgacctgttgtattcgcatggccccgatcccgcggtgccttacgaagaccaatgcggcgcgttgaagcagctgctcgacgaaggcgtgatcaaatatgcgggcatctcccgtgtgaataacgagcagatcgatcttgcgcgcggcattatcggcagcggcttggtcgccgtgcaaaaccagttctcgccgtcgcatcccgatccggaacatacgatggagcattgcgccgaattggggctcgctttcgtctgttggtcgccgctcggcggattcctcgatacgttcgatcagagcgcgtacgatccgttccgcacggttgccgcgcaacgtggttgctcctaccagcgtgtggtgctggcgtgggaattgacccgttacgaacgtctgttcaccattcccagcgctcgcaatccgcaggaaatcaacgattccttcgctgcaacgcaacttcagctcactcaagaagagcttgcgatgcttccttgctgattatcgtttcctttttgggcgttttcctgtacttgcacgttgcgatcgaaaaaatgtttacagtaaaagatattatcgagacataactgatgggcatcgaataaggcgaggtgaagcgtgggcttcgagcgggagtcgtttgacaagctgatgaaagtggtctggggtaagaagtctcagatgcagcaggcgatgtcgcgtgattccaagggcgagccattcattattcgcgagcttgagttcaagggcgcgcaaacgccctcgcagttggctaccgcgttgaaggtcacgtcgggcaggatttccacgctgttggctgcgttggaaaaaaagggtctgatcgagcgtgaggtcgatcccaacgaccgacgcattgtgcatgtgaatcttaccgagcaggggcgggcgaaggccaagcagcagcgcgaggatatgcgcgacgccgtctgctgggtcttttcgcagatgggggagcgtcgcacgcgcgaattcgtggatcttaccgaggaatttgccacatacgtgaccatctgcatccctggccagccccgtcccaccgccgaagaagtaaagcaagccttcgcaaaagccgaatctgaagatcctgcgtagggactgcctaccacgtaagcgtgcgaccggcatgcgccgctcgcgactgtaagcttggccaaacggccttgagtgtgtcgcgaatggtatatgttggccgcgcgcgaccgagctgagaagaatcgctctcagcaaatacacagaaatatgagattgtcttacactgtaagtaattaaatatcgtaagacaattcaataggacttatgtaaatcattaatcgcaattcgatcaactcatgtagttgatccaaccaatccatcaatcgcaaaaacttcaaacgcaacacaagagaaggaatccaagcatgttccgcattatgcgatacctctccaaagcggagataggccagatgctcattgcactggtcagcatcgtcgggcagatctggcttgacctgaccctgccggactacatgtccgacatcaccaccctcgtggaaacccccggcagtgaaatgcacgatatttggatcgccggcggcaaaatgctgcttatttcgcttggatcggcagcatgcgccatcatcaccggctatttcgcggcacgcatcggcgcatcgttcagccagcgtctgcgttccatggaattccgcaaggtagaatcgttcggaccggctgaaatgagccgattctccacagcctcgctgattacgcgttccacgaacgatattacgcagattcagatgttcatcaccatgggattgatgatgattgtcaaatcgccgattatggcggtttgggccgtctgcaagattgcgggagacggtctcgaatggacgctcgccaccggcatcgcggtagtggtgctgctggtctccatcacgatcctcatggttctcgtcatgccgaagttcaagtccatgcagcgactgaccgataacatcaaccttgtggcgcgcgagaacctcaccggcctgcgcgtggtgcgcgcctacaatgccgaggattaccaggaagccaagttcaccaaggccaacaaggaactcaccgacacccagctgttcaccaaccgtgccatggccttcatgatgccgttgatgaacaccatcatgaacggtcttatgcttgccgtgtactggatcggcgcctacctgatcgacgcggccgacgcggccgacaagctcaccaccttctccaacatggtggtgttctccagctactccgtgcaggtgatcatgagcttcctgctgatgagcatggtgttcgtgctgtggccgcgagcggacgtgtccgcacagcgcgtgctcgaagtgctcgacaccgaaccgctgatcaccgacggcacccgcagcgatgctggcgaagcaggcaagcaaggcgaaatcgaattccgcaatgtttccttcacctacccggattcgcgtgaagccatgctcgaaggcatcaacttcactgccaagaagggcgaaacggtcgcgttcatcggctccaccggctccggcaaatcctcgctcatcaacctcgtgccgcgtttctatgacgcgacgcaaggcgaggtgctcgtcgacggcgtgagcgtgcgcgactacacgctcaaggcattacgagacaaaatcggatatgtgccgcaacaatccttcctgttcaaaggcacgatcgcatccaatgtcagctatggcgacaatccgctcgacaccaccgatgccggcatcgtcgacatgaccgatacctcgaccgcggccggcagaaagcgcgaaaaagagctgatcgcaacgcaaaacgagcatcgcacactcacttcggaacagcgcgccgacgtgcgcaacgcatgtgaagttgcacaggcgaccgaattcatcgcaaccaaggaaaagcagtacgattccgcgatttcgcagggtggatcgaacgtgtcgggcgggcagaaacagcgtctgtcgattgcacgtgccgtctatcgtcatccggaaatcctgattttcgacgattccttttccgcacttgatttcaaaaccgaccgtgccgtacgcgacgcgctcgccaaggaagcgaaagattctaccaaactgattgtcgcgcagcgcatcggcaccattatggacgccgaccgcatcgtggtgctcgacgacggcaaggtggtcggccaaggcacgcatagcgaactgctggaaaactgcgatgtgtaccgtcagattgcgcagtctcagctgagcgaagacgaattgaacggcggcaagtcgggcgaaagcaagctgccgggcgaaaccggcaaatcgattgaaaccggcaagccgtccgtcgaaagcgaattgaacgaaagcgagggtcgctgatatgccaggaggacctatgggacgcggccgcggggccgttgaaaaaccgcaggatttcggtggtgtgatgaagaaactggtgcatttctgccgccactacattcccgccatcattgtggcgctcgtattgggcgcgatcggcacggtatgccagatcgtcggtccggacaaactcaaggacatgaccaacgagatcgccaaaggcctgcctgcgctagtcaatggcaagccggtgctcggtgcgatcgacatggacgcggtcacgcacatcgcatggctgctggtggcgctgtatgtggggtacgcggtgctgtgctacgtgcaaagctggatgatggcgaacgtcacgcagcgcaccgcacaggagctgcgcgaagccatcagcgtgaagatcaacaagctgccgctcaagtatttcgacaaggtcagctacggcgatgtgctcagccgcatcaccaacgatgtggacgccatcggccagacgctcggccagtcggtcggctcgctgatcacgtcggtcacgctgttcgtgggcgcgctcatcatgatgttctacaacaatgtgattatgacggtgtgcgccatcgcttccagcctggttggcctgctcatcatgggcgcaatcatgaaggtttcgcagaagtacttctcccgtcagcagatcgcattgggcgatgtcaacggtcacgtcgaagagatgtacgccggccacaccgtggtcaaggcgtattgcggcgaggctgattcgattcgcgcgttcgaaaagtacaacggcgatttgtacgattcgggatggaagagccagttcctttccggcctgatgatgccgttgatgaatttcgtcggcaatttcggctacgtggttgtgtgcgtggttggcgctgtgcttgcgatggatggcaagatcgagtttggtgtgatcgttgcgttcatgatgtacattcgactgttcacccagccgctttcccagttcgcgcaggcattccagaacctgcagcgttgcgcggccgcttccgagcgcgtgttcagcttccttgaagagccggagatggccgacgaatccgacaagcaggcgctgctcggcgtgaacggcaaaccggtgcgcggtgacgttgagttcagtcatgtgaagttcggttacgatccgagcaagacgatcatcaacgatttctccgcttcggtgaagtccggtcagaaggttgcgattgttggtccgaccggtgccggcaagaccacgatggtgaatctgctgatgcgtttctatgagatttcgggcggttcgattgcgattgatggtgtggatacgaagtccgtgccacgctggaacgtgcatgaccagttctccatggtattgcaggatacgtgggtgttccgtggaacagtgcgtgaaaacatcgcgtattcgaagccggacgtcaccgacaagcagatcgaggacgcatgcaaggccgtggggctgcaccactacatcatgtcgctgccgaatggctatgacacagtgcttgacgacaaggccacgctttcgcagggtcagaagcagttgctcaccattgcgcgagccatggttgaggatgcgccgattctgattctcgacgaggccacctcttcggtcgatacgcgtacggaagagctgattcagaaggccatggacgcgctgaccgtggaccgtacgtcgttcgtgatcgcgcaccgtctgtccaccatccgcgatgcggacatgattttggtcatgaaccatggcgacatcgtggaaagcggtacgcatgaggagctgctcgccaaaggcggtttctacgccgacatctacaacagccagttcgccctcaccgactgattcgccgttctggctggctgattcacaggagccgcacgtccccaaagacgtgcggtctttgtttatttcggctggtattcggctgttatgcggatcgcaggaagagatcggccgggaagttgcggctgactgcgatttggcgggattcgtccaatgttgcgtatgtgaaatcgaacgtgcgttgcagttgtgctacgtcggaaacgaacagggccgtggccaggccgtccgcaacggcggtggggtagtcgcgtgcaagattgagcgttgcgtttgctggaacgtatgcccagctggcttcggtttgttgcgcgggcagtccgtcgatggcattgagcagatgatgaatggcgatttgggtgcgctcgttgactgccacgttccaatggcgtcggctgggtgcgcttgcgcacaacgctccgttcgcaatatgtgcgattccgattgcgtgggactgatcttccggatcctcaagtgcgacggaaatgggctgttccgcatgaatcagcaaatcacctcccgcatcaatcacgaattgtgacgactgcagcatgcgcccgagcagatcgacgagatagcctttgccgcaggcgccgaaatccaactgcaccggctcatgcgttaccaatgtggttccgtggcgggtcacatcgcgtccccaaacggcgcgtccgcgcaatgcgcccaaatgctcgggcgcatcttgcgtaaccgtgaaactcagcgacgcatcgtatccaagtcgaatcaaatcctcgccgacgcacggatcaatcgcgccggaagtggcggaaaatagcgcatcatacagatcgaacagcggcgcgcaccaatccggaaaatcgaaacttccgccatgctcggccttgccgatcgccgcaatcagcgaatcattgcggaatcgagacagcacgtgttcgtaatcctcaatgagcgattccattgcggaacgcaccttgtcgtcgatcggcgaatccacggaaatcaccataccggtgccgagcgccctataaaacgccgtgacaaacggcatgcgttgcgtcaaagaatccatgcctccgatgctacccgcccatttcctccagctactgggggaaatgggactttcgcgatggggcgcatggtacagttgccggcagggcgtcaacatggaggttgatatggggaacgtcgagaatgcaagtgcagccacgcgcacaacaaaaacggtgaagagcctgccgatgcccaaagtctgggctttcgccgtcggccaattcggctgggcgctactttccggcattatttcgaattggctcgtctacttctaccagcctgacggcgaaaccatctcgcaagggcaaaccgtgttcgtaccgcaaggtcttgccgtactcggcgtggtgaccgtagtcggtggcatcaccgcgttcgcccgcttcttcgacgcattcgtggatccggccgtggcaagtctttccgaccgttgcacatcaaaatccggtcgtcgcatgccgttcctcaaatttgcggcccttccgctcgccctcgtcaccgtgctggtgttttggagtccaatcaacgatacgagctggatcaacggcgcgttcctgttcgtcacggtgatcggctactacattgcgctcacgttctactgcacgccctacaacgcgctgatcgccgagcttggtcacgattccaaacggcagctcaccatctccaccgccatttcgttcacgtgggtggccggcaccgccattgcatacgtggcaccggtgatttgggctggtttcgtgccgggcttggggcgtgtgaacgccattcgtttgacgttcaccatcatggcggccatcgcattcgtgtgcatgctggttccgccgctcaccatcaaggaacgcgattacgtcaactcgcagcccacgtccgaatcgaccatcgaatcgttgaagcagacgttcggcgacggcgaattccgcaagttcgtctgctccgacgtggtctattgggttgcgatcactacattccagactggtttgccgttcttcgtgacaagcctgctcaaacttcccgagaccacgaccaccatctatttcgtgctcatgaccgcagtgtcggtgctgttctacatgccggtgaatgtattggcgaatcgtgttggcaagaagcggattctgctggtcgctttcgtgattttcacatgtgcgttcgcgtttgcgggcgcgcttggctccggtctgctcgctgcgattccgccgatggcgcagggcttgattctctcgattgtcggcgcgattccgatggccgcgttcggcattcttccgcaggcgattgttgcgaatattgccgacgcgagctcgaaaacgaccggtcaggatcgtcagggcatgttctatgcggctcgcacgtttgcgatgaagatgggtcagtcggtggcgatgctgctgtttaccggcgtgagcacgattggcatggcgtcgggcgccggctatcgcattgcggctgtttgcgccgcggtattgtgcggcatcggcggtgtggtgttcgcgttctacaacgaacgcaaggtgcttgacgtgctcgaatcctgattccgtccatgcgcccgctggcctcacgattttgtttttcgttgctttttcggaatcgtgaggtcaccagggcggaatcgtgaggtcagaaagtccagctccatcccaaatcccccaattcccgaatcttccaatcgcacgaatatgcatggagaggaacggcgaaagcgcctcaaaaaatcactatgtgagacgactcgcgcggattacagaaaagaagaatggcggaattccgccattttaaaggtttctacaacaaaactgccaaaaaatcaagactgttctttcgatttttttcgttttatcttgtgaagtcggtgcgcactgtgtgtatggcaaaggtggcgcactcgtgaatcggattgtgaatggctgagagaggaagcggtcttatgtcatcctgcgatacgcagcgggctacaagtgtgtccggtcgccttgtcgcgttcattgcggcattgatgatcgcgttgaccacgcttttcgcgactaccgcagttccgcagccggcaattgccgccgatgacggtcaaacgaattttgattcctggactgccgctgcgaagaacatcgaagaccagcttgcgactgccgaaaaagactacaatgacggcaattacggtcaggctggcaccgatttccagaccgcgcattggatcggttacgacgcatccaacttctcgaaagtcgtcaacgacaccatcagtgccgacaagcagaaggaactgctgcagcaattcaccgatcttgaaggtcttgcctaccagcaggaccaaggcgacgccatcgcagccaaaatcgacgcgctgaccgccgaaatcaacgcaaccgcgcaaacgcttgacgcgaacgccgacctcgccaatcctaaggaatatgcgaagcagcgtgccgcgcaaaccgcggaagagcgcaagaagctcgacgcggccaagaagaattcatccaaaggcaaaggcgaccgcacgtggagtgaggttgccagcgaaatgaccgtcattctcgaccaggcatacgaggctgccgctgccggcaagggcgacgaaggtgccacgctggtcaacaacgcctactaccagtactacgagaagctcggcttcgaaaagaacgtgatgaacgtgatttccggcgatcgtgtttcgcaggtcgaataccagttcaagatgactcgtaagaccatgcgcgacggcggttccgacaaggaaatcaagcagcatgtcgacgatttgaaaagctggcttgtgaaagacgcggccaccctggacggtggcgcgtccggcaatgtcaacggcttcaccaagctcgtcaccagctccgccggccaggcgttcctcattctgatccgtgagggcctcgaagcgctgctggtggtggctgcggtgatcgcctatctggtgaagtccggcaacaagcgtttcactaggtggatctaccttggcgtggtcgcaggtctggccggttccggtttggtcgccgtactcttcacgttcctgttcggcggttccggcccggttcaggagatttccgaaggcgtgtgcgcgctgatcgccactctcatgctgctgtggaccagtaactggatgctcaacaagagctccgtggaagcgtggaacaactacatcaggaataagaccgaagcggctgtggccggcgcgcaaagcaaggtcgaatccggtcagagactgggcttgggcatgatcacctcgcttgccatgctgagcttcctcgccgtgttccgtgagggcgccgaaacggtgatcttctacgagtccatctactccatgagccaggatgcgcacggcatgtgggttggcggtctggccgccgccgcggtgctgatcgttatcttcctgattctgcgattcacttcggtgaagattccgatcggcccgttcttcctcgtcacttcgattgtgatggccgtgctggttgtgattttcgcgggtggcggcatccatgcgctcatcgagggtgatcttattgaaggcacctacttgagcagcgtgccaactaacgattggatcggcttgtatccgtacgtcgaaacgattacggcgcaggtgattgccgcgatcgcggtggttgtgctgttcgtggtcggtttcatcaagaaacacaggatgaagttggccgcgcaggcggaacaggctaagtagacgccaatcaataatcacaagtaaagatttagagatttccataagtttccaacgttcctcaagggaccaaagaaaaggaagagaacacaatgaagaataagaagatcgccgccctgctgggcatcctgctggccggctccatggccttctccctgtccgcatgcggcaactccaacgattccgcatccgatgccaagtccgacacctccacttcggacaccaccgacaaatccagcgattccagcgctgatgacagcaacggcgccggcttcgaagagattcaggtcgacgagaagcactccgatcaggatgttgacgctctgaccgtcaacgccgtgtacttccagccgatcgatatggaaccgtccggtatgggcctgaaggctgccgacgcgagcttccacctcgaagccgacatccatgccaacgagaagggcaccgagctcggctatggcaagggcgacttcgtgccggacctcaccgtgaactacgagatcatcaacaacgcgaacaacgagaccgttggttccggtaccttcatgcagatgaacgcttccgacggcccgcactacggcgccaacgtcaagctcgacgaggctggctcctacaagctcgtgctgaagatcgaatctccggagaagaagggttggatgctgcatgttgatccggaaaccggcgttaagggccgcttctggaccgagccgctcgaggtcactttcccggagtggaactacaccccgcaggagtggtgatctgaaacgtgagttccggcacatgccaagcgaaatggtttggatgtaagcctgaattcatgttgagattcaactcgtggttaacgccgttcacgtatcgcgaaacgtatgcaagtagcgcgaatatgggtacggtgttcgcggttgcctggatagtcgttcgacgcgctcaaggccgtttggccgagcctacggtcgaacaaccatccaagcaaccgctctcttgcgtttgaggggatacgcttttgggagataacgcgcttttgggggaatcttggtaagggggttccttttgtgtgccgaattcactaggctttgacagggatatataacgaaaggtgtgagatgctgacgcagtacgtcacggtgttgcagggaacgctggcaccggctttgctgattatggcgctgaacgtgatgctcacggtcggtgaggggcgtgacaagccgttgagcgcgtactggcgtcttgcgggcttcattattggattcgcgggtgccattgtgttcgccgcgttgcgtgcatccgcgatgatcaatcagcgtacgttcgtcaattaccccacgttgtggtgttgtgtgattttcgatatcgcagtgttcgttgttgtgctgttcgcacgtcgcatcactacgaattggcatgatcatcgcgcgttgctcgatattgcgaatgcgattggcgctcttgcgattgcctccaccaccttccgtgcgttgcctgatgttattttgcgtttgacgattttcgtggagccaggagatccgatcttcacttcggatatgctgcttcgtgcgcttggtttcgtattgggtgcggccactgcgattgttgcagcgttgattttccgtacgatgcgttccactgcgattcgttggtcgttcaccacggccgtgctgctgctgattgcgctgctgtttgtctcgcatttcactgatcttgcgcagattctgcagtccaagcgcatcgttcatttccctacggaagcgttcctggcgttggtgtggtgcatcaatcatcagcgtcatatggtcattgccatggtgttggtgttcatcattccggtggtcgccagcattgtgatgggcttcaaaatcaagccggaaggcgcaaacgaggccattgtgcgatcgcatatcgcgttccgtcgccgtgcgaaggcggccggcgcatggagtcttgttgcgatgatcggcatcacgttcgcgctcacgtatggtgtggcgcaaacgaagaaggtcattacgctgtctccgcctgaggattattcgctgagcgacggcgtggccaccatcaaattcagtcagatcaacgacggtcacctgcatcgcttccaatacaaggcgaaagatggcacggtaatgcgtttcatcatcatcaaaaagaatggtggagcgtacggtgtcggtcttgacgcatgcgataactgcggtgacgcgggctattacgagaaggatggcaagatcatctgcaagaagtgcgatgtcgccatcaacctcgccactatcggattcaagggcggctgcaatcctgtgccgttcgattatcaggttgaatccggcaaaatcgtaattcaaacttcgacgctcgacgcattgtcgacgcatttccagtgagcggaaagaggtagtcatgttcttttttcgaatgattttccgctcgttcagcaggcagttcaaacgcagactgctgatcgcggtcaccgtgtgcctgtcggccacggtcagcgtggccatgctgggtgtggtgttcgacgttggagacaagctgaacgcggaactgtcgacgtacggttccaacatcaccgtgcagcccaaggccgatgccgtcgtcaacgacctgtacaacacggggggtgacgcgaatagcaacgcttccggcacttccgaatccgatccgaccacatttctgaaggaatcggatgcgccgaagatcaaaaccatcttctgggcgttcaacatcacgaattttgcccccgaacttaatatccatgctgacgtgaactgcgcatccgaatcggcggaatcggtggattccgtctcctgcaaggcttccagcgtgccgatcgtgggcacatggttcgcgaagaccctgcatatggattccggtgaatccacggtggcgggcatgaacggcatgcgttcgtggtggaagcttgacggctcctggccgaaagacgatagcgcgcaaggcctgatcggcaccacgctcgcatccaaactcggcgtgaccaagggagataccgtaaccctctacaaaaccaccgccgacggcagccgtaacaagcagcggatcgccatcaccggcatttacgattccggcgatagcgacaacaatgcgatgtacattccgtcatccactgcgcaggtgcttgcgaatctgcctgattccatcgacaagatcgaagtcaaggctctgaccacgccggacaatgatttggcccgtaaggcgtcgaagaatccgaatgcgctcacgcaagatgagtgggaaacatggtattgcaccgcgtacccttcgtccatcgcctaccagatcgaagaggttattcccggttccgtagccaagcaggtgcgtcaggtggccgcattgcagggcgatgtgctgcagaaaacgcaggcggtgatggtgctgatgaccgtgctttcgctggttgcggccgctattgcagtggcgaatctgatggccgcctcgattggtgagcgcggttccgaattggcgttgctgaaggcgattggtgccaccgatggtgcggtttctcgcctgatgctcgctgagacggctgtgatttcgttggttggtgcgattgtcggtgcgctgttgggttccggtgtcgcgcagatcgtgggacacgtggtattcggttccggcattacgatgcgtccgatggtgtttgtgctggtgtttgtgttgttgacgcttaccgtgctgatcgcctcgttctcgtcgatccgttcgattctgggacttaaacctgcggaggtcttgcatggccgttgatttcaacttgggttccgtaaactcggccgcggctgcggcctcggtcacgaacggcacactgtgctgttcgtctgcggaggtgttgcatggtaggtgagttcaagacagtccgtaaggggcatgagatgactaatcgcaagatgttcttcaccatgctgtggggcgcggtgttccgccgtcgttcgcgggccgttatggccgtgatcgcctccatggtgggcgctgccacgctgttctgccttgcggcgacgtgtattgccgttccacagcagatgaacgaggaaatgcgtgcgtatggcgcgaatcttatcgtcacgccgtccgaatcagccgaaaagtcccacggcatcgacaccgataccgtcaaagcgttgaaccagatggtgaaaggctcgtacagcgcccgttccgccgcttaccggtatgaaagcgtgcgcatcaattctgcgccatacacgctggctggcatcacaaccaaagacgtgaaggcgctcaaccatcattggaacgtgactggcgattggcccagcgaaggcaacgtgatgctcggccgtgacgtggcagacgcgctcggtgtctccatcggttcgaccgtaaccatcggctaccgcgcatccgacgatgcgcaggattccggcgctcttagccaaaccgaagcgcaagtcaaagaaaacggccgcgtttcgtccgacattatggaaaacaccggcactgaattccgtgtcggaggcatcgtcgatacgggcggcagcgaagacgaaatcgtctacgcggtcaacgctgacgtggccaaactggccggttccaagcgcggcgcggacgtgatcgaatattccgtcaatgcggtaggcagcgaactcaacgatgtcgtcaaatcgatcaatgcgaatccgtcaaccggcgtgaaagcgcagaccgtcaccaaaatcacctcatccgacactcgtatcatcgccatgctgcaaaccctgttctggatcgtgtcgctggtcgtgctcgtgctgacgtttgtgggcgtgggcaccaccattagttccatcgtgtctcagcgacgcaacgaaatcggcttgcgcaaggcgttgggcgcatcctcgcgcgccatcggcatcgaattctatgtggaatccgccatctacggactgattggcggcctgatcggcactgccatcggctacctgctggcccgcgtgctgtgcgtgtccgtattcgagcgtgccatcggcttcaactggctgttgggcgtcgcttcgctgctgttgagcgtgctcatcgccgtcatcgcatccatcccgccggttcgccgcgcaacccgtatcgaccccgccatcgttttgagggaggaataatcatgagttccgaacatacgttgaatacgttgcttgaattggatcatatttccaagatttacggcgatttgcgtgccgtcgacgatttgactttgaccgttccgcaaggtgaatggcttgcgattgtcggttcgtcgggttccggcaaaaccacgctgatgaacatgattggctgcatggacacgccttcaaagggttccgtcatgctggaaggccgcaagttggaggatttgaacgccaagcagcttgccgacgtgcgcaagaacatgatcggattggtgttccagaagttctatctggtaccgcatctgacggctgtggaaaacgtgatggtggcacagtactaccattccgtagtcaacgagcagcaggcgttggaagcattggagcgcgtcggtttgaaggagcgtgcccaccatttgcccggccagctttccggtggtgagcagcagcgtgtgtgcatcgcacgtgcgctcatcaactgtccgaaactgattcttgcggacgaaccgaccggcaatctggatgagaagaacgagaaaatcgtgcttgacctgttccgtcagctgcacgagcagggcactaccatcatcgttgtgacccatgatgcgctcgtcgcatcttgtgcccagcgtgagatcatgctcaaccatggcgtgctcgtcggcgagaagtggaatgatgaggccgcacggaaggtctatgagcagtcgggcggcaagccggcatacaccggttccactgcggaaggcgcacagaatggcgagacggccatcagcttcgccgacccgaccaaagccgcgaaaaccggcggtgaggaataagctgaaatcagccgaataatccaagccatagcactgacgaatcgtacggagcgaacatgagcaacgaatcatcgaatgcgatcaaagtaatcgcactgtctgcggcaagccttgcgctgctgtcggcatgcggcgaacccacggcgacaccgatggacgatgaatatgccggaaattccggcgaaagcgtgcaatcgcaggaagaaaattcgaagaacagcggtagcgccaccgactccggcgattctgcggattcggacgacaaaaaccatgccgacgatccgaacagcactacatccgacaagcaagacaccggcaactacgccgacggtacctactcgatcaacggccagtacgggccggtgggcgaagacaccatcgacgtgcatgtgacggtcaaagatcagaccgtcaccaatgtggaggttatcgggcatccgttcacgtccatctccaaaaagcaccagaatgcgttcgccgaagccatcaacggcgtggtggacggcaaacctctcaaagacctcaaggtagacaaggtggccggtgccagctggacgtcggaagcgttcaacaaggcgttggacgtggcccgtcaggaagcgtcgatccagtaggtccagtagcggcgaaaagtctgccaacgtacaatgggcgcctcagctacagcctcactcaaagagtgattaaaggccgtagcggggacgctcatgagtttcagatgctactacgtgcaactctgctctgcaatgcctttcaggcggccataacgggccacagaacagccgtcatgttctcaggccaaggaatactcgcgtcgccatgcaacgccttacaggcgagcatggagccgagtatcgtgctgaacaggaattgcggatccaatccatggcggaacacaccggccctcacaccgcgatcgacaaactcagaaaaacgcttctccgcgggaacgagcacctgatccgcaatcgcattcaacgaaggattatcggaagaaagcaccacaccgacggccttcaaaccaagctcactgtcgaaaaaacagccctgaatacgttgcagtatcgtcagcagaccgtttttcgacaactcgacatcgctgaaatccggcaatcccgcaacttccaactgcacgcggcgcaacagatcgtcggcattcttatagcgacggtaaatcgtggttttcgcaacaccggaacgacgggcgacctcttcgatggtcaccgcgccgacgccatcggaaatcacaatcgcaagcgtggccttcatgatcttatgatcggtctgctcgcgaagctgctcgcggcggctatgcgccttgcgaacggcctcatgtacgtcactgaccgcgtcggaaaccacatcggaaacggtttcggaaaccgcctcatgcactccggtaatcatgcgaccaccttggtgctttccacctttgccacataccacttattgaatttgaccagcggaatacgcagcagcaagccaatcagcagcagcggaatcaggaacagcagcagcgagccgatcgcatgccaataatcattgttgtaaataccggcaatggccgcacgcaatgccgtaatcgcatgcgtggctggcaggaacgggctgatatcgctgatgatcttcggcagcacggcaagcggatacgcgccgttcgcgccggaaatctgcaacaccagcgtcagcacgccaatggccttgcccacgttgccgaagctcgccaccatcgtgtaggtgaagaacgagaacacgagggaggccacccagccggtcaacatgaacagccacgggtgcaccgcctgaatgtgcaggaacagcaggccgccgcccagcgagaacgtgctctgcaacagtgcgatcacaccgaacacgccataatggccgaggaacagctgatgcggcttcggattgtcgagctcctcacgattcttgcgcgacactgtggtcttgagtgttacggccataagcagcgatcccacgaacaacggaagaatcgtgtagaacggcgccagttgcgagccgaaattcttaacagggaacacagccgtgcgcttcacctggacgggagctgcaagagccgccgccagcgaatcggtgttgttgccgagcacttccttgacggtgtccatattgccgctgttcagcgcgtcggaaagcgtgccattgaacgaagacagcgcggtgctcgccttagtgaggctttcggcggtggaatcaagcaccgtgcgaatattggtcagctgcttgcctgccgacttcgtggtgctgttgagatctcccaacgcgcccttcagatcggtggccgtgctgctcagtgcggtggccgtgctgctgatcgaatcggaaatgtcgttgagctgcggcttgagctggctgtcgaaatcggttttgatgccgtcgatggaggccttcgcctgctgggcaagctggctcacgcgctcgcggtcggctgtggtgtcgctcactttcgcgtcgatattgtcggcgctggtgttgagtgagttcgttagatcgttgagttgcgtaatggtcgcgcccacgttggttttgagatgattgatggcgattttcgcgacttccggcaccagattgttgttgctgagctcgtcgagggcatcgtagatgttctgatagccttgcgcctgcttggatacgttcgcagcctgattgcgcagggcggtggccgtattgccggcttgggtgcccgcattgttgaatacgctgtcaatatcggtggagacagcgccgaagctgttcgacgagctgctcaacgcggtgctgagcgcattcgtgctggttttgacggctccggtcagatcgttgatgccgttcttcgactgtttgagctcgttgacggcgttcttcgcgctgccgctcacgttggaaagcaggctgttggaactgtcgagcaggttctgcgcgctcaacgtcagcgagctgaacgtggtcaacgcggacgacgtgtcggtgagcgtattcgcgaaattgcccatgttgttgctgaagttggtgagcgtggcctgcgatttcggtttgtcaagctcatcggccagctgcgaggcgatgttgagcgcggtgctcgtcaacgttgcggagaacatttcgttgatctgtgctgccacggtgtcggctccctggccggtgatcttcggagcgagtgcgttcttcttctcgttgttgtagtaggtgagtgtggcatggtcgccgtccgcggtgaagaatgtcatcatgcgggtgctgaaatccttcggaatcaccactgctgcatagtatttgccggatttggtgccgtcgatggcctcttttttggtggtgaaggtccagtccatctggtcgttggcgcgcaaggtgttgaccacctgatcgccgatgctgatcttcacgggaatgaggtcggacttgtagccttcatcgtcgttggcgacggcgaatttcagattgccggtgttggcgaatggattccagcttgcgctcacgttgaaccaggagaacaggccaggaattaccaccagtccgatgacgatgatgatggagacgatgttgctggtcaggcgtcgaacgtcgccgacgaacagtttccagatgtttttcatgcgttgctcctttcgctgttaccgttgggattggtgttgctcgctgtgccggtgttgccggtcgcgttcatggcctgtaccagtgttgcgatgccgtcggcatcggcttggctggtgtctgcgacgttggcgatcgcctgtttggtttcgtgttttcttcgttgtgccttgcgcatcagcttgtctcgcctgatttgttgcgcacgcttcttgcggcgcagccttgcagcttggcgttccaccagttgttcgcgaatcgcttcgtcgctgaggctgccgagttccacctggcgttgcaggctgaaacgcatatattcgatgaccatcaggaatccgatgatgagcagcacccagatgatccaggtggcaagcaccacgatcttctcgccgttggtgaaggagaagatcagcaccagaatcaccggcacaatgaaaccggcaaccagcgcgccacgcttgagcttcggatacagttcggcgaagcggctcgcacgttcctcgatcgcctcacggtagccgcccttatcggcgagcacttgaatggcctgggacacgttgtagccgcgttccggaagctgtacctcctcgccgatgatcatgtcgctttccttgatctgacgggcgaacaggcggttgagattgaccagcagcgggcgaatcgcaagtccgatgaagaacgcgaccacggcgaacatcagtagcgcgccaatcgacttgagccaatgcccgtcgtagaagccggcaatcgtctcacggaacgcgtcaatcgaataactgaatggtacgaacgggtagaccatgcggaagaatttcggcatcatctcaatcggatacaggccggaagcgcccggaatctgcacgatgatcagcgcgacgcacagtcccttgccaatatgcatgaacgaggtcgacagcgcgaaggtgatgctcagatataccagcgacgtgatgacgccggtaagtatgtacagcggcgcgttcaccgtctgcacgccgatgatgaggttgccgatggtggtgatcgcgccttggatggcgcccatgatgccgagcagcatgtagcgggcgaaatatttttcggaagtggtcaagtcgaggtcttcgaggccttcatcgtcgacctccaccttgaagatcaccacgaaggcgaacgcgcccacccacagggccaggttggtcatgagcggagccatgccggaaccgtaggagttcatcggatacacgtttttcgtgtcgatcaccgtgggggactgcatgaacgaagcgattttctccgtgttgagggagctgtcgccggtcaggcttttcagcatgtcaacgctgccgagcgctttcaggtcggtgctgacggtgatgagcttgttctccacctgctcgagctgcttgtcggtgttctgcagcgtggtgcgggtgtcgttcgccacctggtcgagttggtcgagcacggcggaggtctggtcgaccacggtggtctggctggttacggtgccggacagtgtgccggcggtcatggcgagcgagctcagaccggagttgagctgggggagcgcaccggaattcaacgtgttgcgggcatctcccatgcttttcagcgaattttgcgtgctggtgttgaagtcggtggcgagtttggacacgctgtcggacgtggattgcgtgttctcgctcaacgttttgaggtcgttgagcgtgccagcggccgtgttgttggtgtcttcgagcttcttgatgatgtcttggtactgtgcgttgtcgctgacgttcttgagcttctcgatgagccgggcgttgctgtcggtcacgctttgcatgttgctgacggcctgctgtgcggtgccgcttgcggacgagacggccgtggtcaccttgttgatgctggtggtggtgtcgctggcggcctgcgaaatcaggccggaaccgttctccaaagcggtgttggcgttggacgtgaaggtattgaggccgttttgtgcggtgccgatggcggtggcggtgttcgccagtcccttgcccgcacttgctgcggccagctgcacgtcgttcattgcctgacgggcggattgcgtttgttgcggcacgttggcgagctgtgcgtcaagatcttcgatggtggagcggatgaggcttacgttcttctgggttttgtcgagttctgctgtggtttcgttgacgaaggagttggttttgccgttgatggtgtcattcgcggagttcacggctttagtgagtacttcgctgacggtggagacgaaggtgttgttgacggtacgatcaacggtggtcgcgccttggtcggtgattttcggggagatcgggctcgatttttcgttgacatagtattccagcgtcggccggttcttgctgtcggtcacgacgttggcgagatcctcgctgaaatcggaggggatgatgatcgccgcatagcagtcgccggactgtaccgcttccatcgcttcggccttgcccatgaattcccagccaagctggtcgttgtctttcagcgtgtcttcgatctggtcgccgaggttcattttgccgagcagggcgttgtcggtgcctttgtcgacgttggccacggcaactttgatgccttgggtattgccatacggattccagaatccgtagatgttgaaccatgcgtacagcggcggaatgatggttataccgatcatgatgacccaggcggcaggtacggtgacgagtcgtttgaggtcacgacgcagaatctgcagtacgttgcgcattgtctccccagtccaatggatgttcgaccgtgttcgcgcgtagcgatacgttattcgtagcgctacgcctcccgtatcgtaatacccgctctcggacaaatttgggcacaggcgtaaatgcgctccgtccatgactgaaataaacacgacaaaccgcggcaggactgtgaatcttgctgttggagaccgcgcaacttgccttctgtgtctgcgcaagtcgagtctgctgtctgcacatcttgtgattgcgggatgacatgtgacttgcgcaggcagaaatcgcaggttgtgcgcgttgcgcgcaaacaatcatctcgtgtagcgcactgcgatcgggttttggtagcgttgtgcagggaaggacgaacaagcatgagcaagattgaagatgtgagcgaagccatcgccgacgaaaccgaaatcgcagcaatcgaagaggccggcatcattgcgcaatcgcaatcggcggaagatgacggcaatcctgctgaccgcaggctgccgctgattgcacgtatttacggcatcgtcatgttgatcgaaggcgtggtgacgttgccgatcatcgtgatttcctgcctgtatgcagtccacgccgcgctttccggcaaactggcgtttggcgcgctgaatctcaccactattctgtcggttattcatgctgcagtgctgctggtctccaccgcatgccttgcgattttcggcatgctgctgattctcaacaagcgtcggcatatcgcgcaatggacgtatctgatgattccgctcacgcttgcggaaggcctattgtcgttgtcgttgcagggtttgggtgtgaatctgatcagtccgaccgtgcagctgcttgtattggttgcgttgcatatcacggctgatccgtcgctgcgcgaggagcgacgtttgcagttcgcgcttcgtcgtttggatgcgcgcagcgagtatgagacggctgtttcgaagggtatggccggtcgtgatctgaccggcaagggctatatttcgcttgatttcttcaacctgttttggctgtttgtggtcggatgcgtgttcggtttggtagtggagacgctataccactatgtgctgttcggcgaatggcaggatcgcgccggatttttgtgggggccgttctcgccgatctacggctttggcgcggtgatcctgacggtattgctcaaccacttgtggcggtcgaattggatgctgatcttctgcgccagcgcggtgattggcggcgcgttcgaatatttcaccagctggttcatggaggttgcgttcggtattcgcgcgtgggattacacgggtcaatggctgtcgattgatgggcgcacatccggcaaatacatgtttttctggggaatactcggcttggtgtgggtgaagctgattctgccgcatttgcttgcgatgattcagcgtattccgtggaagattcgctatacgttgacggcggtgtgtttcgcgctgattttcgttgacggcgtgatgacgttgatggcgctggattcctggtattcgcgtatggctggtattgcgcagaattcgcctgtttcgcaattcttcgccacgtatttcgatgacggcttcatggccaatcggttccagaccatgacgctcgacccgtccacggccagccgcatgtagtgtctgactgttttatggatgactgctttatgggctagatggcgaagctttgtggaagaacgtgtatggtgcgtccgctattggttgcgccgtgcacggctgcatgtgacctgtgcccgcactgcctttgtggactcggtgccctgcgacttctacgcgcttaggcggcgaagctttgcgcgagctggcggatgagatccggcctatgtccactccatgaggagttcggtgagatgacgaccggaatctgcttgaagccagcgtttttgatctgttcgaaggtggacgggttcttcgtcagatcaacggtgtcgtaacgcacgcccagctttgcgagctcttgttcggtggcttcgcattgcgggttgctcggattggtgaagacggtcacggtcattcgatttcctccctatgcaaaaatggcttccgtcgtttgcgaaagccgtgtcggccacgttcttcggttatgctcgcttacgcaagccactatctagcatacacactacaggtagtggtgtgtcgtgagtttcctcactgtatatagtggggaattccccagaattccccaaaatacgaacgtttgttcgaatatgtctagtgtaccccaaaccacggaattcacgtccaagcgcatgtcgaaactgcttctagtgctgtttctaatgctgttggatgggcgcaagatgcgtttcgggaggtcgtgaaatgacatcgagtctgcgatgcctgtagcggtgaatgtgttgaataaatgttgaatcggaccatttgatccattagactgcaaaaacaagaaagtctcggaaaccgttgaaaacattgacttccgagacttttcgcatgtgccccccgtgggattcgaacccacaacccacgacttaaaaggacgctgctctaaccgttgagctagaggggcaacagtgagacagtatacagcatatttacgcaaaacgccacacgaatcagctgtaagtaacaaaaaacgtggattatcaccaagtcatcgccgaatcatcatcgaattctcgcgaatcgcagcgtcatttctgcatatctgctcgtacagtggaacgcatgtcatgtaccacgattcttgtaggcaagaaagccagctacgacggctccaccatcatcgcacgcgacgatgattccggttccggacgttacgatcccaagaaattcattgcggtagcaccgcaagaccagccgagacattaccgcagtgtgctcagtcatgtcgaaattgaccttccagacaatccatgccgatacagcattgtgccgaacgtgctgccgaatcgcggaattctcgcggaagcgggcgtcaacgagcacaatgtggcgatgagcgccactgaaaccatcgcagtcaacgagcgcgtgctagccgctgatccactcgttgaactgcaaccggcgaacgaagccgctgatacccctgaaattccgggcggaatcggagaggaagacatcatcacccttgtgctgccttacgtaaccacggcgcgcgaaggcgtcgcacgtctcgccgaactgcttgaaacatacggcacctacgaatcgaacggcatcatcatttccgacgtaaacgaaatctggtacgtcgaaacaatcggcgggcaccattggatcgcccgccgcgtgccggacgactgctatgcgaccatccccaaccagctcggcatcgacgatttcgacttcgacgacgccttcagcacccaacgcgagttcatgtgcagtgccgatctgcgcgaattcatggacgcgcaccaccttgaccgcactatgagcgcgggtgcgagtagcggcttcggattccagccgacgagcgttttcggaaacgccagcatgaacggcggtggcaatagcagtagcggcgcggcgctgggtcacaaccatttcaatccgcgcacggctttcggcaccgccaccaccaaagaccgcatctacaacacgccacgtgcctggtatatgcagcgccacctcaatccaagcgaggactgggattcgccggccgcccgctacacgcccgcatccgacgatattccgtggtgtcgtgtgcctgagaacgctgtgacgctcgaagacgtcgacttcctgatgagtgcacacttcgaggggaccccttacgatccgtacggtacgctcgggacgccggaaagccgccatcgctaccgtccgatcggcatcaaccgcaccgggcatatggtggccatgcagattcgtccgtacgcaccggaggcaagccgttcgatcatgtggatctcatacggttccggccccttcaccgcggccacgccgttctatgcgaacgtcgacgatacgcccgcctacctgcgtgacaccacgccggaagtctcgaccggcaacctgtactgggcgaaccgtttgatcgccgcgctcgccgacgcgcatttctacgaaaccagcaatgcgatcgaaggatttgcggaatcggcccgcgcttacggccatcgtctggtggaacgtactgatgccgaattgcgtgagatgtccgcgcaaacgagcgcgtccgaatcgcaggagcgtgcaggggccgcggagattacggaaaacgcaagtattgcaattatcgcaaaactgcagcagtccaacgaagaaatggcggaatacttgcgcactcacgtcacgaaactgctcaacgacgtgctctacacgtccagcaatctcatgcacaacagtttcgccatgtccgaccgctggaactaagcataaagccccgaaatccggcaaaacccgtcccaatgagccaaggtttccgcgctcggagcattccgcatgaacgcaggctgttggaagcgtcagtgctgctcccgacagcctcacggctgcatccgcatcctcgtacgtcagtttttgcccatatctcgcttatatatggcagatttcaagagctgacacgaggcatttcgcttatatatatggcactcgtgcttgtaggcaaggcgatttcgggggtaaaatataccctctaagtcgtctttctccaaaagcatctgccatatataagcgagatatcagttgacggacccgcgaatctgccatatataaggcagatggcgccgatcagttgaacccgacgacgtgttccgccacgaaataccccttgcgaatcacgaaacgaccgatcgacccgcgcaaattcaacgcacgagacatggccttcttgcgcacatccttgtaaatagtgggggagtacgccttaatgtcgtcccacatatcctttttcttctcataattttccggatcgcgagacaaaatcatgaacacacttgccacggaactttcaatcgccaggaagtggatcatataacggtacaggccgtccggcaccgtgccgcgttccggagttgcacgcaccatgcactggttgacgaggcgcagctggtcgacgcggcggatcatcacgtcggtctgcacgctctggccgtcgcgaccgatgaaatagtggtagaacggcgtatccaaatacttcatggtcttcacccacgggaacggctgatacgcgtaaatgaagtccacgtagaacgtgtgctccggcagctgcatgccggactctcgcaccacggcggtgcggtacgtcagcgcgtgcatgagaatgtattcagccaagccgaaatgcccaagatcgttccaagtcaggcgctcgccggccttcatggcatggcggaagttcaccacatgcttgttgcgtttgccaaccttgtcatacacataattagtgacgagcatgtcgatcggctcggtggaatcggcctcttcgcgcagcacggccatgacctgttcgagcgattcggggccaacccaatcgtcggcgtcaacaaccttcacgtacatgccgcttgccgccgcgatgccggtgttgacggctccgccatgccccttgttctcttggtggatggcgcgcacgatgcctggatagcgggcttcgaatttctgtgccatttccagcgtgccgtcggacgagccgtcatccacgatcagcacttcgatgtcgtcgttgcgcttcgctgcgattaacgacatgacgcatcgttccaaatattcggtcatgttgtacgcgggcaccacgaaggtgagcgtcttcttctcctgcatagtcttccttggtaggacgaggtgacctgccgcgcgcggcgcgtggtcactgcgtaacgaaactaacgtagcaccttgtttgcttcaggggaacggtttgtatgtaataggcaccctgaatagcgcaatctgcacctgaaatttcccttaagggtaccgttgttgacaatttgtaagttttcgtcgatgcttgttggcttgtgcgatgcttgcgattcccctgttgctggtactgttcgattcttgcgtctggcgcctgttggcgttggctgcgatgcttgcgatgactgggggcggctgggttttacgactgctgttcggcttgcgtgccttggcttccggctgcgtcttgttcggtattctgttcagcgttctgctcggctgggctttccgtattgttttgtgattgtgcctcttttgcggccttgcgctcgcgtttcgcgatttccttgatttcgcgcctttcctgcttttccgcctcttttgtggctttgtcgctttcgaaacgcagttccggcttggcttccatgcggctcaagccatgccaggccagattcacgatgtgcgcggcaatctgctctttactgagtttgcgctggtccgcccaatactggcaggtatatacggtcatgccgatgagcatctgcgcgtagtatggcacgcccttggccggcagatgctggcgtttgaacgcttcggcgagaatgtcttccacgcgcagggcgatgtctcccaaaagcgaattgaacgagctggccggatcggttttcggcgaatcgcgggtgagcactcggaatccttcagcattctcctcaacataggtgagcagtgccagcgccgtgcgttccacgatttgacgggggtgcgcttgtgggtcggagagcgcgttgacgagcgtgtcggtaagcgcgcgcatctcacggtccaccaccacagcgtacaggccctctttgcctccgaaatgctcgtacacaatgggtttcgacactttcgcggtggcggcgatctcctccacgctcactgcttcgaaccccttcgacgcgaacagcgaacgaccgatttcgatgagctgctcgcgccgctgatacgacgtcattctggatgtattggccatgccgtccagtttttcatgccccgtggatagtctgtccgattctggtgaatcggacacttgggctcggtatttggacggttcgttgtccgattctgcagaatcggacattcgtggtgcgtccgcggggcggagccggtgtgtccgttgcgctttttaggctggagtcatggatacgaatgtgattattgcgattgtcgccgttgtcgttatcgcggcaattctggtgattggcggttggtggctcggtaagacccgcaagaacgccgtcgataagtccacggaggatgcgaaagccaaggctgacgcccgtcttgccgcggaagcaaagtcggctgcggctgattcttccacggtgaagccgtccgttgattccaatgttgatgcagctgaaaaagctccggctgaaagtcagcagaagtcctcagctcaagcttcctcttccgaaacggcagctcctgcaccagccaccgaagccaagcccgaaccggttcatgaaacccccgaatccgccggcacgcgcatgcagcgtcttaaggcgcgcctgtcgaaatccggcaatccgttcggcaaggctctgttcaacattcttgcgaaggatcagctttccgaagccgactgggaagacgtcgaagacacccttctgcttgccgatgttggcgcggaagccagcgaacagctcgtcgaggaactgcgcaacgacgcccgaatcgcaggccagtccgatccggccgaagtgcgtgccgcgctgaaggacaagctgttgaagctcgtaggcactgacacggatcgccgcctcaatgccaataaggagggtgccaacaaaccaagcgtcatcatcatggtcggcgtgaacggcacgggcaaaaccaccactgcgggcaagctttcccgcctgcttgtttccgaaggcaagcaggtcatgttgggcgctgccgataccttccgcgcggcggccgccgaccagttggaaacttggggtgccaaggtcggcgtcccggtcgtgcgttccgacaaggacggcgccgatccggcgtccgtcgcattcgaggccagtgccaaggccaaggaagagaacgccgacgtgctcatcatcgacactgcgggccgcctgcagaacaaggcgaacctcatggacgagctcggcaagatccgccgcgttaccgaaaagaaccttccggtcgacgaggtgctgctcgtgctcgacgccaccaccggccagaatggcatgacccaggccaaggtgttcgccgaagccatcggcattaccggtgtggtgctctccaagctcgacggctccgcaaagggtggcattgtgatttccgtgcagaaggagcttggcgtgcccgtcaagcttgtcggcctcggtgaaggcccggacgatctcgccccgttcgatccggaaggcttcgtcgacggcatcctcgcctgagctgattgcgctcccgagaaagcctccccgcgtgggaggctttctttttactcccgaccagtcctatttcgcctatatatggcagatttgccggttcgtccgctggtttctcgcttatatatggcagatgcttttggagaaagtcgacttagaaggtatatgtttacccccgaaagcaccttttttgcgagtgagagtgccatatataggcgaaatgtctcgtgtcagtcctccaaatctgccatacataaggcagatacgctgaaaaatgggctgatagtggtttggcctgagagcggtgcgcaatctgaaacaaaacgtgccagccgctttattccgccgttttcggttgacgtaatggcgagatggcgttaccttgctgtaacacgtcgtaacgttttcaaaacgcgggcggcgttccataccgttttgtcagccccatacgatggggccggaaatgtgaactcaaaaagaaagaaagaggagggtgacatgggtcagcttgattctggaaatgccgcgtggattttgacgtccgcgtcccttgtgttcctcatgacgccgggtgtggcgttcttctacggtggcatggtccgcgcaaaggccgtgctgaacatgatgattatggaggcggccgctctgtccgtcacaatggtgatctgggtgctgtggggctggtccatcgcctacgcaggcacttcggtcggcggtgtcttcggtgatccggccacaggcttcctgctgaaggattccatggtttccgacggcggtgtcttcacgtcggcttcgctgaactccaacaactacccggtcagcgtcgatgtggcgttccagtccgcattcgccatgattaccgtcgctctgatttgcggcgctatcgctgaacgtgtcaagtactccacgtggatgattttcgtcgcgctgtggattaccttcgattacgctccgctcgcccacatggtgtggaatggcggtctgctgagcgctgacggcgcgatctcccaggctatcggcgctgccgcccacgatttcgcaggtggtacggtcgtgcacatcaatgctgcagtcgccgctctggtgatcgtgttgatcatcggcaagcgcaagggcttcggcacccagccgttccgtccgcacaatgttccgttcgtgatgcttggcgctttcctgctgtggttcggatggttcggcttcaacgctggttccgcgtttgccgccaatggcaccgcaggctacgcttgggtttccacttccgctgcaaccgccgccgcaatgctctcttggggcttcactgagaagatccgcaccggccactacaccgccatgggtgccgcttccggcatcgtcgcaggtctggttgccatcactccggccgccgatgtggtttccccgctgtgggccatcgtgctcggtgccatcgccggcgtgctcacctgcctcgcttgcggcctgaagttcaagctcggctacgatgattctctcgacgttgtcggcgtccacggcgtcggcggcttcaccggcactgtgcttatcggcttcttcggcgaaggtaccggtctgttcgcgggcggcgactggaagcagctggttgtgcagctcatcgttgccctcgttgccatcatctggtccgctgttgtcaccggcatcatcgccttcgctctggagaagacgattggctggcgtgtcaccgaagctcaggaagtcggcggtatcgatcttgccgatcagggcgaacgtgcttacgattttgctggtaccgccagctctgttctcaaggaggtgaagtgagatgaagctcattaccgctatcattcagccgcataagcttgacgatgtcaaggaagccctcgctgccgcaggtgttcacggtctgaccgtgtctgaggctaacggttacggccgccagcgtggccacaccgaggtttaccgtggcgccgaatacaccgtggatctcattccgaagattcgcgtcgaggtgctgtccgatgacgccgatgccgagactctggtcggtgtgatcgtcaagtccgccggctccggcaccatcggcgacggcaaggtctgggttgccccgcttgattcggtgacccgcgtgcgtaccggcgagaccggctctgccgctatctgataattcattcggatagatattaagggccccgggcttgggttcgggttatcaatagacagatccccgtacgtgcttcgcgccgtgcggggattttcatacgtttttcgcgtcagattgtctgcttcggatttccccgctttcgcttttatctgctcagatttgattgtttttgcgaagattcataaggatttgctatgacttcagcggttgatggtcttaaacaacgtttcatggatataagtcagccggatgccgacggcgtgtaccgcaatggtgcggcgaaacgtaaggctcgtacggatctggccatggattgcctcaaacaattgtggcaggaggcttgccagacggtgtcttttgacgttccgcagtccggcattggtcttggcgcggtgggttcgttggcccgcggccaagtgggaccgagttccgatcttgacttggtggtcatttatgagcctcacgcgctcactgaccggcagctcaatgagcttgccaacaaattgtggtatccgatttgggattcgggtcttgatcttgaccagtcggtgcgtacccgcgcgcagtgcgaggcggtcaccgaccatgatctgcccgccgcgatgggttggctggacgtggtgccgatcgcgggcgacacgcagctgatcgaatccacggctgtctccattttggagcgttggcgtagggccgcccgtaagcgcttgcccgaattgttgggctccgccaagtctcgtttggacgagttcggccgtatggcgtatagcaatcagcctgatattaaggagtctcgcggtggtttgcgcgattccgtgctggtctccgcgcttgccgcttcttggcttgccgaccgcccgcacggccagtatgacgatgccgtcgaacggttgctggatgtgcgcgattgcattcatttggtggccaataaagacacgaatatgttgctcgctccttatcaggcgaaggtttcggcgatgttgggtttggccgatccgacgttgccgagcggcgagcgtgaggcgaagtcgattgatgatttgcagacgttgcttgcgcgtgttggtcgccagatcgcgttttcgcttgattccacggcttctcgcgctgagcattcgttgactcatgagaagcctcgttttgcgtttttccaggtgttccagcctcgtggcggcggtaagcgtcaggcgcctacgtttgatgtggtcgcgcccggtatcgccaagcatgaggaggagatcgtgcttgcgccgggtgccgatccgaagtccgatccgtgccttgcgttgcgggctgctgttgctgcggctgagtttggtctgccgatcgcgcccggcacgttgcagaatctgaagtcgtgtccgatcgatgatcgcacgtggaatgatgagtcgcgtagtctgttcttgcgtttgcttgcgagcggtcccgcgttgttgcaggtgtgggaggagattgattttgtcgatattccgggtcggctgattccggaatggttggcgattcgtaatcgcccgagtgcttcggctgcgcatcggtatacgattgaccgtcattcggttgaggtggtcacgcggcttggtcgtgaaacacctcgtggaaatcgatatgatgatcggcattatcaggcgttgctgttggctggtattttgcatgatgtcggtaagcgtccgggggttttcgatcatgcggcggagggtgcgcgtcatgcgtccatggtgttgaagcgcatgggttttgatcgtgacattatttggtgggtcacgttgttggtgcgtgagcatcttacgttgtcggagtttgcgactggtcagaatccgaatgatccgaatgttggtgacgagttggcttctcgtcttgatcatgatccgctgctgcttgacatgctgttcgatctgactcgtgctgacggttcgtcgttgggtgccacggccggcgagaccatttccaaacagtacggctggagtaaatggcgcgaaacccttgtccgaaccatgtacaacgccacccgctaccacatgtgaggccgcgtaggctgtgagcgaatgcccggcaaagcgacatggctgccgatgcggtacccgccgcgtcggcggaaacccatcgtttaagaaaaagtggggaacatatcaccttcggttcacttaagcaaatcacaaccaggggaatgggcacccgtacggaagatgtctccaagttgtccacttggttatccccatttggtggataactcgatatgttttccacatagttatccccagtatgtggataactcgggttttttcggctttcttatccacagcgaaccgattcgcgcgtgtcgggtgattccgatcctgccaatgcggagattcctccagaatctcatcgcaacatcattcgtgaagtggcacaggtattatggtttttcccggtacaccacacatcgaagagctggagaagcatggcggagagcaattcttggaacaatggcctgaatcaagggcaaaaccgcggtttttcaggcaatggcagcatttccggcgcgtcgggaacggctattcgcgacgccatcttcgaccgtgtgccgccacatgacgacgccgccgaaatggcggtgctcggcggcatgctcatgagcaaagacgccatcggcgaagtctcgcagatgattgacatcaccgacttctaccagccgcgcaaccaaaccgtgtacgaagccatcatcaacctgttctccgcatcgcagcccgtcgacgcggtgctggtggccaaccagctgctcaaagacggcgacctcgaaaaagtggggggatccgactatctgcacagcctcgtcgcatccgtgccgaccgcagccaacgcaaccttctatgccgacatcatccaccagcgtgccatcctgcgcaatgtgatcgcagccggcaccaaaatcgcacagctcggctacaccgccgaaggatcccaagccgaagacgtcgtcaacctggcacaggccgaagtctacgaaatgtcgaccggcaaagtgaggcaggattacgcgccgatcggcaccgtcatcaccgataccctcgaccaaatcgaccgactgcaaaacggcgaggtttccaaaggcgtgccaaccggattccgtgacatcgacgacgtgacgcaaggcctgcagccgggccagatgatcgtcgttgcaggccgaccggccatgggtaagtccacgctcggcgttgattttgcgcgagctgcggcgctgcaccacaatatgacgtccgtgatcttcagcttggaaatgagcaaaaccgaacttgcgcaacgaatcatttcggcggaagcgaatattccgctgtcagccatgcgccgagcggaagaaatcacgcaggaacgttggaatatcctcaataatctgcaggataaactgcagaacgcaccattattcatcgacgatagtccgaacatgagtttgatggagatccgtgcgaaatgccgccgattgaagcagacgaacgatctgaaattagtggtgatcgattacctgcagctcatgacttccggcaaggccgtggaaagccgccagcaggaagtgtctgatttctcgcgtgcattgaagctgcttgccaaggaattggaagtgccggtggtggcgctgagccagctgaaccgtggccccgaaatgcgtcaggataaaaagccgcagctttcggatttgcgcgaatccggttctatcgaacaggacgccgacgtggtgttcctcgtgcacaggccggacgcctacgacaaggaagatcgcccgggcgaggccgatatcatcatggcgaagcatcgtaacggtccgacgcagacgttcaatctcgcgttccttggcgcatactccaagttcaaagatatgccgcaggactaccagagccaacaggaggtatagcatggcgtggaactcattcgcaacgccgttgatcggcaaggccgtgcgtgcggcctcccgcctggcacatggcggcggcagcgcgttccccggcaaaatcgtggaacggatcgacccgcaattcctcgcacgcaccctgcagcagctaccgcttggcgtggtgctcgtgtctggcacgaacggcaaaaccaccaccacgcgcatggtggcaagcatgctggaatcgttgggattgaaggtattcaccaatccgaccggatcgaatttcacccgcggcgtggtctcgtcgctgctggccgaagtctcgctcggcggcaaactggacgccgacatcgccgtactggaactcgacgaagcgtacgcggtgcatttcgtcaaacaagtgcaacccgactactgcctgctgctcaacgtgatgcgcgaccagctcgaccgtttcggcgaaatcgacaataccgcacgactgctgagcaaagccgccgaagcgaccaccggaaccgtagtgctcaatcgtgaggatccacgcatcgcacgacttgctgacgtcgcacatactgaagatggtgtggaagtgcgctatttcggtcttgacgggtcgttgcgcagcttcttcccgtccgacgatgacatgcgcacgacagtcgatactgcatcgtccgctgatactgcatcgtccgaatctgcagaatcgtccgcaaatattgagattgacgatgcttcggcaatcgcgaaaactggggaaaatgcagaaaaatcggaagatgcggcaattgcggaacagctaccagctgacgtgaccttgcttgccgtgggcgaccatcgtgccagtttcggcatcgacggtgaaacgtacgaaaccggtgtgagactggaaggcgtgtacaacctgtacaacgcggcggccgcgctggccgtcgtgcgagcggtcgtagccgacgcgcaggcaatgttcctgccgttcgagcagaacgtaaccgacgaactattgcgacaagtgggaatctcacagcgcatgatcgacttcgcacattccaccacgcaagccatgatcgacgcggcagccgaagtcactccggcgttcggacgcggcgaggtcatcgacgtgaacggctcgccggtggagctgctgctcgtcaaaaaccccatgggattccgtctgtcgctcgcatccttcacccctgaaggctgcgacaccatgatcgccatcaacgacgaatacgccgacgggcgtgacatgagctggctgtgggacgtggacttctcctcgctgcgagacaccggtgtggccatggtttcgggcgtgcgtgcctgggacatggcgttgcgcctcgaatacgatcaggtgccggtgaatagcgtcaacacggaacttgaagaggccgtctcaacgttcgtgaacgcgaatccgggcacccccaagcacatttactgcacatacacggcaatgctcaaaacgcgagccgcgctcggcaaaatcgccgaagtcgccgacgctggcgtgggcaaataacagcgcgaatccgcgcaacgcatgaaaacgcatgaagaacgtatgaaccgcatgagggagacgatatgagccaggtaatcgacatcgtgtcgctatatccgaaagacatgaacatctacggcgactccggcaacgtgctcaccatccagcgccgtctcgccctatacggctacgagccgcgcgtgcacgcctacaatcagggcgacgcgtggcccgaacacgtcgacatgattctgggcggcggcggccaagacaccggccagaagaaaatcatcgacgacttcttcaaacgcgccgacctgctgcgatcgctggccgccggcggcacccccatgctcatgatttgcggtctgtaccagctgttcggcgaatatttcgaaacggtggatggctcccggctcgacggcatcggcgtgatcggcgcgtacacggtcggtcaggaagtgcgcatgatcggcaatctgaccgagcattccgccgatttcggtgacatcatcggctacgaaaaccattccggccaaaccttcctgcgcgaaggcgtgcagccgctcggcaccgtcgacgcggatagcaccggcaataatggcgaggatcatacggaaggcgcccgcgtcaacaatgtgatcggcacatacatgcacggctcgctgctgccgaaaaaccccgcgatcgccgattttctgatccgcaccgccgcagaacgccggtatggttcgttcgatccggccgctgcagggcagacggaagcgcagcgtgcggaacttgatcgcatcaacacgattgccagcaacgcgcgtcgcgtggccatgtcacgcccgcgctgattgttttcgcgctgtttcgtagttttcgcgttttcgtacgctgtgagcatacggcagcgagtcttccgcagaattgtaacgattgactagtttcgttgacgttatttgtgaagaaaatgcgatagagtgggtaccaccatcacctaaggaggtaatcatggctgattttgattttggtgacggcctgcgtaaggtcttcctcgccggcgttggcgctttggcgaccacggttgagaagagccaggaaatcgttgacgatctcgtcaagaagggcgagctgaccgtcgaacagggcaaggccctcaacgccgaactcaagcacaaggtcgcggaggtcaaggaatcctctgaagccaaggctgcagaggaaaccaaggaagccgaacctgaagccaaagccgagtaacgttcaatcgttcacatcgccgtctgctcgtcgcatcacgttcagacggcgatttgttatgcggaacttgcgaaacatgcgaacggccgtgtgcggaacgtaagaaacgtgcgaatcgcatgaaatacgcgggacgcaagtctcctcatgaatcccactcatcgtaatccgaccaacgtttgcgagcagcgatatgtctttgaattctccgatcgagccggatgcggcccgacccgaaagcgtggagccggtcacactttccgaccgagtcaacgcggtgatcaatccgacggcgaacccctcgtccgacgcggctgcggcaacggcagccaaatccgcgggaaaaacgggaatcccgcaatcgcaaggcaagcagaacgacgcaacctttacgcaatccgaaaccatcggactgttcggcccgcgtaaagactcattctcgcagcgctaccacctgactcgtcgaggcaaactgaagcgacttgcgcaaatcgcgcaaatcgtcaaccaattcgacattgtgcacggcctgacccccgtcaaaatgcggctcatgttcgaagcgcttggcccaactttcgtgaaagtcggacagatcctgtccatgcgctccgaaatcctgccccaatcgttctgcgacgaactcgccaaactgcgcgccgacgccgaccccatgccgtacggcaccgtcctgcaagtgctggaagacgaatacggacgcccggcaggcgaaatcttcgaccatatcgacgccacaccgctcggatcggcaagcctcgcgcaagtgcatcgtgcgaaactcactaccggagaagatgtggccgtcaaagtgcaacgcccgggcgtgcgcgaaaccatggcacaggatgtgtccatcatgcgcaccatcgcacgaatagccgccaaaaccatgcccagcgcccaagtggtcgatctctccggcgtggtcgaagaactgtgggacaccttcgaagccgaaaccgacttcatgatcgaagcgcgaaatctggcggaattcaaacgattctgcgaacactacaaatacatggactgcccgaagccatactccgacctgtgcaccgaacacgtggtggtcatggactacgtcgaaggcatttccgtctcacatcctgatgagctcatcgaagcgggctacgatctgaaggaaatcggcaccaaactggtcgacaattacgccacgcaagtgcttgacgaaggcttcttccacgcggatccgcacccgggcaacatcatggtgcgcggcgggcagatcgtgctgctcgacctaggcatgacgggccggcttaatgccaaaacccgttccgtcttgaaagacatgattttcgcggtcgccaaacaggattcgcccgcgcttgccgacggtctgctgcgtttcgccggtgccgaggccgatccggaggattatccggcgttattggccgacttggatgtgatcgtcaaggaattcggcacagtggatttggccgagctggatatcgccgccatgctcaccgcgttgacgcaaatggcgcaacgacacggcattgaagtgccgagcaccgtcaccaccgtcgggcgtgcgctggtcactttggaaggcctgctcgacgagttcattccagacgtgaatatgattcagatcatctccgaccatatcgcagcaagcacgtcgaagaaggatttcgccaaggatgaggcgaaatcgctggttatcgaaggtcatcaggcgctgcacagcctgctcgctgccgccaatgagctgaaagtggcctcccgtatgcttacgcgcggccagttgcgcgtgaatatggagatggtcggttcgcaggaaccgatccatctgcttgccaacatggtgaacaggcttacgatggcgctgatcgtcgtcggattgttcatcggctcgtcgatcgtgtactatgcgggcatcaaaccggtgattttcggtattccgatcgttggtttcctcggctatgtgatcgcgttcgttttgtccgtctggatcgtgttcgacatttacttcaagggacgttccaacaaaaaacgatgacgctaggctagggggagggtggattcgcgttggatgaggcggcaggggagatattccgtgccgtggtggggctggccgttgatggcgtccatcaggtagcgggcggctttgtggccgatgagttccgtttcattgtcgatgctggtcagcggcgggcgggagctcttggtgagcacgtcccaattatcgtggccgatcaccgccacatcctcaggaatgcgtagatgctgcgacttcaacgcgtcaatgcatcctcgtgccagctgatcgctctggcataccacggcgtcgaacttcacgccttggtcgagcagcagtctggtggcggcacgcccccaattctcgtcccaacggccatagcgaatcgggccagccggttccagaccaacctcggccaacgcttccaacgcgcccttggtgcggtcggtggaggccgtatacgtttcatcgccgccaataatggcgatacggttgcgtccgcacgaaatcagatgattcacggccatgcgcccggcgtccacattgtcacacgtcaccgaacaatcgttggtgtcggtggaaggaccatacacatacaccagcggcacgccccaatcacgccccagcgacgggcgcggattcgtctcgcactgcacaatcagcaggccgtccactttcagcgacagcagtttctctacatggctgcgttccagcgcatcgtcaccgcgagcattggcgagtagcaccgatgtcgattgtgcgcgcagctcgttttcggcgccaataagaataggcgtggagaaacggccttgcagatcggaagtgaccaaaccgatggttccgcttctgccgcttgccaacgattgcgccagcttgttcggggaatagttgagttgccgcgctgcctccatcacgcgctcgcgggtgtcttcactgacgcgcggtttgccatgcagcgcctttgaagccgttgccaaagacacgttggccagcgctgctacatcttcaagccttgctgttgagtgagtatctgcagttgccatgatgttccccttttttacggtgtgacgaaaacgttggctgcgcgtcgatgcgcttcgccgcccttgtattgcgtaatattatacgacaaaactgcgaaagttttcgcattgtgtcaaaaagtggacaaaacggctttatatagccgattgctgacatttcacttgcaaattgcgaaactttcgcatttgcgaaaatgaacacatttttctttcgcattttctgcatctcacgtcattttttgctgtcataaacgattcttaaaatgctaagaatcgtttatttataacggttttatcgacatgaatacctttgcattctgatgtgcgaaagcgattttgcaaaatctggagaaaaccatatactgagaaaaggctttcgcactacggttcaatcgaaggagaacaaccggaaatcgtgaaggcagacggcggaaggcccgccggatggctcaaagctgagcgatacatagagaaagaagtagacatggtgtctttcaacaaggtcactcgcgttattgccggcatcgcggcaaccgcgttgcttattccgatggctgcatgcggcggtggttccagcagtggtggatccgcggctccggccgatattccggcagccggcactgatgacggcactgagatcactctgtggacccgttctccgctggagcgtcaggccaagaacgcggtgaaggcctacaacgcctcccacaagaaccaggtcaagctggaaatcattccgaacgacgatatggaaggcaaggttggtggtgcttcccagaccgattcccttccggacattctcgccggtgacgtggtgcgtattccgtactgggcttctgaaggcatcttcaccgacatcaccaagcagatcgacggactcgacaacaagtccgacctgcagcagggccacattgaagccggtaccgtggatggcaaggaatacacgctgccgttcatcaccgacgtttccgtgatggtatggaacaagaatctgtacaaggaagcaggtcttgacccggagaagggtccgagcagcatcgacgagttcgttgagcaggccaaggcggtcgcggccctcaacaaggacggcgtggcaggctcctacttggccggccagtccggtggcgctctcgtgttcgacctgttcccgtccgtgtgggctgacggcgaatccgtgatgaacgcagatggcaccgaagccaccctcgacaacgattccatgaaggccgtgctcgacgcctacaaggaactcgccaacaccaccaacggcttgggcgcaggctccaaggaagaaaccggtgccacctggaccgctccgttcgccaacggcaacatcggtgtgatgccgtatccgaacacctcttccaccgcactgttcgaagctgagaaggacggtggcttcgaagtgggtgtcaccccgatcccgggcaccaaggaaggcaagacctccacgttcctcggcggcgatgccatgggcatctccaaggactgcaagcacgtcgctcaggcttggaacttcctcgcatggctcatgagcgatgacgcccagaaggaagtcttcgcagccaacggcgacaccgcatccaacatccagaccctgaagaccgcctacgacgatgccgatcctcgcgtccagaccatcaactccgtaatcatcgacggcaatggccagaccccgaagtccgcagctttcaatgaggccttcaacgcagccggttccccgtggcagctgctcatccagaacgcagtctggggcgatggcgatctcaaggccgacaaccaggccatcaccgacgtgctgggtcagtgaggtgagccactgaaaacgaacttctcctcctttttctcctttccccgatttacataacttaagaacaactgaatatcgaataactgaatatcgaaaacaaaaatagacagaccacagttgtggtctgccatgaagatcgacaatacttcaaaaacaatgtcggtcttcatggcggatttcaacggccgcacgagacggaatcgcacttccaaacgcatatccaatcgcttggccatttatgtcgaaaaccccgaacgattcaagagagagtcgccaaaagtgttccaaggagggaatatgactactgtttccaagaacgctgcgccagtgaagacgcatcgttccaaggccaaggcggaggcaacccgtcgtggcctgctgtatgcgctgcctgattggctgatgatcatcatgctgttcttcgtgccaatcgtgctgctcgtcatcatggccggttcccgctggtcgttgatgggcggtaaccgtggttggaatttccctgagaatttcgtcaaggttttcgaaaataaactgctcggacagtcggtgttgttcacacttgaatacaccgtgatcgtcacgattttcctgctggtgctcggccttggcctggcgctgatcgtgcaggaaagcaccaagtggaacaatatgctgcgcacgtgcttcctgctgccgtccgcaaccggtctcgcctctgcttcgctgctgttctacgcgctgtactccccgcaggtgggccccgtcaccaagatcctgagcttcttcggattgatggatgagggcggctccgtgctcgccaccggccagagcgcgctgtgggccaccattattgtgatcgtctggcgtttctccggctactacatgctgctcatgatgatcggcctgcaagccattccgggcgacctgtatgaggccgcgcgcatggacggtgctggcacgtggcgcattttccgttccatcaccctgccgctgatgaagccgaccatcgtgatgtgtctgatctactgcgtcaccggttccatcctcgcgttcgaccagttcttcattctgaccaagggcggtccgaacaattccaccatgaccgtagtgcagctcatctataacttcgcattcgattccaagaaggatctgggcatggcggccgcactgtcgctgatcgtgcttgcggccctcgtagtgatcaattccatccagatgcgcggtatgcgcgacaacaccaagtgagcaaggggagggaactcacatgactactccattgtggaagcgcgtaatcgtctatattctcgaaggtctgctggctctggtcttcatttcgccgctgatctgggtggtggtctgctcgttcagtccgcagcctggttccgcacaatccaagggctggggtgtgaacaactatctgacgttgttcggctaccaggaaggcctgccgaagtacctgttcaactcggtggtggtgacgttggtcgccgtggtgttctccgtggtggtgtgcacgctcgcaggctattcgttctcccgtttcgactatccgggccgcaatctcggattcatggtgacgctgtccattttgatggtaccgtatgcgtctctgctgattccgctgatggtgtggtacaaggatattggtctgaacgattccttgctgggtgtcggtttggttattaccttgttccagctgccgatgagcacgttcatcatgcgtaatgctttcgatgcgattccgaaggatatggaagaggccgccatggtcgatggctgcaactccctgcagtcgctgattaagattctggtgccggtcgtcaagccgtcgatggtcactgtcggtctgcttgctttccttgaggcttggaacaatttcatgattccgctgtacctgtcgagttcgtcgaacgccacgctgccgctcgctttggtgaacatgcgtcagcagactatgggcgtcattgattacggtgccaccgaagctggcgtcgtgattctgatgatccccgcagccatcctcttcctagccctccagaagtactacgtcaaagggtttatggctggagccgtcaagggctgacacctggcgatgtcagcccttgggagacagcccagtggactgtttccaggctccggcctgagcagaaccgaaggcggagtagccaagagccgtcaagggctggcgaagtccttaatcttaaggaaatatcatgaatgtaactattacttctcctttctggaagcagcgtcgcgaccagatcgttgaatccgtcattccctatcagtggggtgtgatgaatgatgagattgccactgaagttccggatgatccggctggcaatcagcttgccgataataaaagtcatgccgtggagaatctgcgtatcgcagccggtgatgaggccggtgaatttcatggcatggtcttccaggattccgacatatataagtggttggaggaagcggcttacgcactgtcgtatcatcctgatccgcaattgcgggaactgtgcgataaaaccgtcgacctcatcgcacgtgcgcaacaatcggacggatatttggacactccgtaccaaatcaaaaccggtgaatgggcgcatcgtgagcgtttcacactgattcagcaaagccatgaaatgtatgtcatgggccactacattgaggctgctgtcgcctatcatgaggtgaccggtaaccagcaggcgcttgacgtggcgtgccgtatggcggattgcatcgatgccaatttcggcccggaggacggcaagatccacggtgctgatgggcatccggaaatcgaattggcgttggcgaagctgtatgatgcgaccggtgaggagcgctatctgaatctggcgcggtatctcatcgacgtgcgtggtcaggatccgcagttctacgccaagcagatcgccgctgtcgacaacgactacattttccgggatctgggattctacaagcccacgtacttccaagccgcgcagccggtgcgcgagcagcagaccgctgacggccatgctgtgcgcgtggcctatttatgcactggaatcgcacatgtggcgcgtattaccggcgatcagggcttgctggatgcggcgcatcgtttttggaacaacatcgtgtcgaaacgcatgtatgtaacgggtgcgatcggttccacacatgtgggggagtcgttcacgtacgattacgatctgccgaacgacaccatgtatggcgaaacgtgcgcttctgtggcgatgagcatgtttgcccgccaaatgcttctgttggaaccgaatggtgaatatgccgacgtgcttgagcgtgagctgttcaatggtgccatcgcgggcatcagccttgatggcaagcagtattactatgtgaatgcgttggagacttcgccggacggtttggacaatccggatcggcatcatgtgctttcgcatcgtgtcgattggtttggctgcgcatgctgcccagctaatgtcgcgcgattgatcgcgtcggtggaccgttatgtgtataccgaacgtgacggcggtcgcacggtgctcgctcaccagttcattgcgaatcaggcaagttttgattccgggttgcatgtggagcagcgttccgattttccgtggaacggtcatattgagtacatgctggaattgcccgctgaggcggctgattcggtacgtttcggcgtgcgtattcccacatggtcggctgattcctatgcgctgacatgcgatggtgttgctgtgaagacggctccggaaaacggtttcgtatatttcgcagttgctccgggaactgcattgcatgtggtgctggatcttgatatggcagtgcgattggtgcgtgccaactctcatgtgcgttgcgatgcaggtcgtgttgcggtgatgcgaggtccgctcgtctattgcgcggagcaagccgataatgccggcgatctgtggacgtaccgtcttgctgatggcgtggatgccgcggatgccacggttactttcgagagtgatttgcttggaggtgttgacgcggtgacgttgcctgccgttcgtgaggctgcggatgccgtggacgccccgttgtacatgtccgctcagcgtgacgcctcagatgagcggacgtcgctcaagctggtgccctactacgcatgggccaaccgcgaactcggccaaatgaacgtgtggttgcgcagctaaacaaaagaaagacttgctacccggcgctatgggtgccatggtgccgggaagcgggtgagcgcggcgtgatcgattggagccgaatgcgccgcgctgactggaatgagagaccggctgccccttatggggtggccggttttgtcatagcccctagtataagacgggaaaatgcgaaaactttccttttcgcataaaagccatcgtatggcagttcacttagaaaagcattggagaaaactgaaagaaaatttgcgaaaccgtattcgcgtcatgtattcttgaaatgtcggtggacgctccaatctcatgtccatcgcacgactctcattcctacagaaagaaagttggatgccagggaacgagccttggcaaccaagggccaacgatggtccatgtaggaggaattgatgacaccatcaacaaggaagaaagggattgtcacgtcattgggcgtgctgacggcagtggccacactgttgtctggcggtgtgacgaccgcatacgccaatgacgcgctggccaatccgaactctgccatggggtatccgagtttcaagggggccgccgacccgattccgggcaccggcgtcgctttcgatccctcgacaagctacctcaagcaggtgttcgatgcggatgttgccaacggtgccggaaccgacaccgcacacgacttctggatcgacaagatgctgacgcgcacaggcagcgcaccaaacggtaccggcaccaacgatgctggcgactacaactatgcgggcgcagacaagaacgaatacctgttctcacgtggccgtgccgcattcatgtacacgcatacgccggaagcacttggtttcgtaggagatgtcgcatactgggatcagaccggcaacgacggctttaccgttgaggtaagcattggcggttccaagcagaccctgcgcgagaacaccgacaagcgcaagcagacgccaagctacttcaccacggaattcaccaacggcgacaagaccattaccgtcaccgaagtcaagtacatcacctacaccaatgtgatggtcgcgaatttcaccatcaccagcaccaccggcggtgacgtaacgctgacagcagcctcgccattcgcacaagacggcaatgacggcgacactgaactgaccggtcgcttcaatgtgaagaacgatctgaccaccatctatccacggttctccggcaacggtttcaccgtaaaggacggcaaactcgcttccaccctcaccttggaagcgaacgtgccacaaaccaccaagctgcagcttggcctgatcgccaacgagttgccggactccaccgcggaatacgaagcccgattcaacggcgatctcaccgatccggccgcttcctacaaggattccgtgaccacctacaaccagtggtgggtcgataacattccttacgtggaaacccaggaacacaatatcgacaaaactgtgttctaccgctggtggctgagccgtttcaacatgttggatgctaatatgccgggcaatacgttccagtatccgacctccatcgaaggcgtgctcggatacaacaaccagatcgtgctgacatccggcatgttcatcaacgacaccaagtggttccgtaacgccgaatactcgtacggcacttgggtgtcggccgggcagacagccaagaaaggccagtccgggtattactactaccacgacaatccgggcgatccagccaattggaaccacagctacacgcagtacatcaccaaggccggttgggactcctacaaggtgcacggcggcccgtcatcattggctgaagcgttgggtgattacggttccgaagatgtcaaaggtctgctcaattcgcaaagcgagccagacagcaacgacaaccagaatagcaacggcaacaagctgatcgactggtcgtggtggtccatgaccggcaacgatgccgacgcggtgtcgttctccgaacccggtcgttccggccagcgtatggaccgtgccgacggttccgccaacatgtgggccaacgccaatgccgccgcgcaagcatacaaggctgccggagacaccgaaaaagccgctgaaatgcagcagatcgccgacgccatcaagcaggatgtgctcgacaacctgtgggattccgacagcaaactgctgctgcacaagtggctgaacgacggtcaattcgcgaaatacaaggaactcaacaactactatccgtattccgaaggtctgatgccgaccggcaatgatgattacgatagtgcgttgcgcttgttcgaagatgccgacgaattcccgattttcccgttcttcaccgcgaatcaggcagacaagaaggcgctgaatttcccaggatcaaacaatttctccattatcaatgcaactccgctgctgcaaatctattctgcgggaatccgtgattataatgctgcagacaacggatatatcacgaacgattcgttcaagaaactgctgtattgggtggcgttctcgcattatcagggaggcgacaaccagtatccggaccagaacgaattctggaatatggataataattccgcaggaagcacgattccggagaagaacgccgacgccagcaagaacggtggaaagatcacctaccgttcctggattcaccacacccagcttggcaccaccaactggacgattgtggaagacgtggcaggtatggttccgcgtgaagacaacaagattgaactcaatccgatcgagattcccggttggaaccacttcaccgtcaacaacctgagctaccacgggcaggatctgtcgatcgtatggaacaacgacggcacctacaacgctccgaagggatacaccctgtatgtggacggcaacgccgtgttcacctccgataagctcgcccacctcatctacgatccggccagtggaaccgttgaggttgccgatgattccggagcggtgatcaccggcgcgaccaccgccaccatgccgaacgccaacgaagtgacctacgcatcgaacagcagggttacgcagatcttcgcgcagtccggacagaacgtggacgaagcgtccaagagccaggccaacgtggccaaggacgccgatgtggaagccacttacgaaaccaagggatacccggcaaccaatgcagtggacggcaagaacgtgatggaatccttctggggcaccaagggatccaagaacgccaaggattcgctgaccgtaacgttcaagaacggcgtgcagaacatcgacgacgtgcgtttgtacttctaccagacctcgtccagccagacgattgccggctacagtgagccgtcggtgtacacgcttgaatatcaggatgaggccggcgcatggcatgtcctgccgaaccaggtgcgtacgcctacttacgcgggagccaactacaaccgcgtgcagttctccaaggtcgtggccaaagccattcgtgctaccttcactccgcaagcaggtcaggccattggcttgaaggagattcaggcctacgaaaccgacattgtgccggaaggcgaacctacgaaccaggcgccaagcgttgacgcctacattgccagcagcacctcgtccggtgcgcagctggtgggcacggtgaaggacgacggcctgccgtctgacacgctcaccaccacatgggagcaggtgtctggccctgaaaacggcgaagcgaagttcgtcgacgcaaccgctgccaacactacggtcacgttcaaccgtgagggtgactatgtgctcaaactcaccgcattcgacggtgagaagaccggtttcaaggaagtcaccgttcacggcattccttccgacggcacggtgaatgtggcttcacagtccactgcgagcgccagcttcaccaatccatatcaggcgaaggacaatgccaagaaggttatcgacggtcaggtgttgtataccaatactccgaatgagacctggaataattggggtgacaataccggtaccgagccgtggctgcagcttgcctgggatggcactgttccgttgaagaaggcgaagctgttcttctggactgacggtggcggtgtgccgatggtcaagtcgtggaagttgcagtatgcggatgagaatggcgattggcaggatgtgaagcttgccgccggccagtcttataccacgatgcagggtgaaggcaatgaggttcgttttgccgaaacggtggagacgaacaagttgcgtgtgctgttcccgaagggtgccattgttggtgctaccgaatttgaggcgtatgcgcttgatccggtgagcgtggatggcgtgaatcgtatggtgcagactggcagcaaggctgccgatgtgaatctgccgaagacggtgagtgccagctatacggacggttcccgtcgtgacttgagtgttgcgtgggatgccatcactgacgatcagcttgcttccgatagcgagtttgcggtttccggaacggttattggcgcgctcgctggaaccaaggccactattggcgtgcgttccgacgcgcagtctcagactgctggtgcggctcagccgatcgaacagacggtgtaccagaattccaagtcggtggctttgccgtctgtggttccggtgcgattccccaacggcatgcttgacgatcgcacggttatgtgggatgaggcaagtgttgccggcgtcaagttggacaccatcggcgattatgaggtgtccggcacggctgagggttcaagctcgcaggccaagattacagtgcatgtggtcgccgatccgaatggtggtgccgatcctgatcctgagccgacgccggatcccaagccggagcccgatactccgttgactggttggattgaaggcagggccattgacaccacggtgagtgccgaggcgagctggtctccggcttccggcaagctcaacgatggtgtgctggttgacgatacgtggccgtctgatgatgacgccgatgtgaatggccgcgtgtggggcagctggggtcaagcttccgctggcatgtacgcgcagtacacctggatcaaggaagccaccgtcgattccagccgtgtgcagttctgggccaacttcgcggagcgtaatgatgccaagggtggtttggatgttccggacagctggaagattcagtacttggcttctgatggtatatggaaggatgtggagaatgcgcaatacaccaccgtgcgtaattccccggcctcacgtgcctctgacgatgctcaaggctggagcgtggccacgttcactccggtgaagaccacgtcgttgcgcttggtgcttgatccgccgaccgccgagggcgtcaccttcggtctggcggttgccgagtggggcgtgcatgctgcggaaagcactcctgatccagaaccgactcctgacccggatccaacccctgatccggaaccaagcgtggacaagagcaggctcgaatccgccatcaacgcagccggttccgtgcaacaagctaatttcacgccgaacagctggaaggcattctccgaagccatgggtaacgctcaaaaggtgtatgcggacgagagcgccacccaggatcaggtggatgcggccatcaagcagcttgaagaagcccagcagacactggtgaagaaagccgacaccactgagttgaagacggttcttgaccaggcacagggcgtcagcggtgacctctacaccgaagccagcgccaagaagttggctgaagcagtggatgccgcctccaaggtgctgaacgatgagaacgccacccaagctgatgcggatgccgcagtcaagcagctgaccgaggccatcgccggacttgaactcaagccagcaccgaagccggacgacgacaagaccgaccccaagccgaatgccaagcctggaaacaagccggtttccaagtctgaagtcagtgccgcaatcagcagcaccggcagcaatgtcatcggcatcgccgtcgtaggaatgatcgtcctgctgacgggagccgccatcatgctgacgcgccgcaaccgcgaccagcgctagcaattgctcaagtcctcttacggatcgcacgaggaataccaacgtaacctaagcaatccgtaagaggacttttcaatatccaatcgtgaaaacaggaatattcatgagcttttcgcacatctcacatgcgtcgatgaagacgctggtggcaggcatcgcagccgcagccaccttatgcacgggagcaatcgcaaccatgcagacagccaacgcggccgacgcaagtaccgcgcccagcgtcgccggacacgcctacaacgatctgccggtcggcaatcccgacgtcaccgtcacacaaatcgacaacagtgcgttgccggcaacccttcgcaaccccatcgggcagaacgaaggaaccaatacccccaacgacctgtcgcaaaactactattccgcagacgcatccacccttgaatacgatggcaaactcttcgtattcaccggacacgacgaggccgaaccaacctacgggtccttcaatatgaaagactggggcgtctacgtaaccgacaatccggaatccggcaaatggacgcactacaagaccatcgccaaagccgacctgttcgactgggcaaccggcgacggagcctacgcaggacaagtagtagtcgacgatgctggcaccgcagacacggccgacgactggttttactactacgttccagtcaaagacaagaacgcagccgcgggagccgacccgttctccatcggcgtggccaaatcaaaaagccccctcggaccatgggtcgacgccatcggagcgccgttgctgactaccacgcagacgcaaatcgaaaccatcgatcccgcattcttcgtggacaatgacggtaccggatatctgcacttcggcaccttcaacagcgaactcgccgtaaaaatgcagcgggacgccaacactggccgcacctcatatgttgccgtggaaaccatggacggaacggcggacggagcgccgaaaatctacaatatgcgtgacgccgacgcgctcgccaacatacccgactacgatgccagcaaagacgtgcttggcagcgactatgcgagccaagtgaacgcgtcgctgaccttgggcaacaacggcggcgcttatgccaacgggcccaaaggcttctttgaggcggcatgggtgttccgtgaaggagacacctactacaacgtgtacgacggtggcaaacccgggtcgggagtggcaacctgcgtggaatccaactatcaggcgtgcgtgcaatactccacgtcggcaaaccctcttgggccgtggacgtaccaaggcgtaatcgtcgaatcgggatcgtccaccaccatgcatccgtcgattcaacgattcggcggcaaatggtgggtcacctaccacactggagacaagactggtggtactgacttccgccgtgcagtctgcatcgatgaagtgacgtggaatggcgggcgcataaacgccgtttcgcatccgaccaaagccgaacggttgcaaccctcacgcaacgtggccccctatgcgtcagtggacgcgacctacaccgaaacacccgcctacaagggttccgtgaacgacgggcgagtgctggaaactgctgtagtaccgccgaaccattggacgaactatcgaaagatgccacaaacacaatcctccgattcactgatctaccagtggaatggcgctgtacgtgtgaatggatcgaaagtctggttcgataccgatgcgaacgcattgcgtgcccctgcctcatggaaactgcaatatcttgacgcagacggttcctggaaggacgtgcccaattccagcgaatacggcgtggatacaggcaagaacgcgcctaatgaagtgacattcgacgcagtgaccaccactgcgctcaaacttgacatgaccgcgcaagccgttgacgggggctatgcttccgtcggcgttcctgaatgggaagtatacgcgcaacagggagcagttgtggctgaacagccagccgacgtctacgccaagaccggagacgcgccggaattgtcgaacacggtgaaagtcgcgtacggctcggaaacagtggaaactccggttttgtggcgcacggtgtctgcttcttcgtatgcgcaggcgggtgagttcaccgtgcaaggtgtggttgctggcattgagaccaagcagcaggctgatgatctgacagccggcaacgtagccgtgaccgtacatgtttccgacgattacgtaaaaccggctgataccattgctcctgccgtgcgtgtggcattggcaggcacggctggcaatgatggttggctggtcacttcaccgatcgctcttattacggcttccgacaatgcggctgcgccgatcgcaaaactcgaacttgcggtcggggatggcgcatgggtgaccgtcggaacgaatgtgaacactgcggtaaaggctgtgactggcgagggtatagtgagtgtgcgtgcgcgtgccactgatgcggccggcaatgtgagcgaaatcgctgctgcggaagcgcgtgtggatgctacggctcctacggtaaccgcctcggtagatacggtttcccgcactatgacattgaccgcctcagatggtgctggatccggtgtgaaaacggtggaataccgggttggaaacggcgaatggcagcaatatgaagaaggcgcggcgattactgcttcttcgtcgaagcgcgaaacggtgagctatcgggcttcggacattgctggcaatatgtcggctgcgggcgtcaaagatattccatccgatacgtcggtgccgttggccggctatatcgagcaagatgccgttgctactgacgtggacaaaaaagcgtcttcttggacagctggtgttgccgcgcttaacgacggcaaaaccattccgggcgattgcacggttgataacgcctgcatttggggtacgtggccgaataccggtgaaatgaagctcgactacgaatgggatcgcgaagtcaccatcgattccagccgtgtgcaattcacctccgatggagggggcttgggaatgccggcgtcgtggaaactgcagtattgggatgctggaacgaatgcgtttgtggatattcccgatgccacatatacattggtcaccaatgctcccggcgcttacggtaccgataacggcggatggagcgaggcaacctggactgacgcggtgaagaccactaagctgcgcatggtgattcaatccggcagtgcatcgccggctgccgccgaatggcaggttcatgcacctgaaccgactccggacccgacccccgatccgacgcctgagcccgagccggaaccaacgccaactccaaagccgactccggataacaataacaacggcaagcaggacggtaataatgccaagccttctgcgaaaccgcaatcatcgcagcaatctcagtctcaacgtaagaagaagctaagctctacaggcgtcgctactacggcaatcgtcattgccatgacggtgctggccacggcggggtgctgcatcttcgtagccaagcggggcaagctgcgtaactgaatccaatataaaagtggtaagttctcagcctcggcctctggactgaatatgtgtgctcgacgcactcaaggtaccgctacgcggtcttcgcggcaagccgctcacttcgcctgaggaaagcccattgggctttcctcttcacggctcagtggccaagcctacgatcaagcacacgtattcagccgccgacctttggagtccgacccctacgtttgtgtgaactcggacgtcatcggaccccattttgctcataactcgcctatgtatggcagatttgcgggtctgtcaggaagcatctcgcctatatatggcagaagacttcgctaaaaagccatatagggggtatgaaaacgcatgttttctgactccagtctgccatatataagcgagatgcctcgtgacgagactcaaaatctgccatatatagtcgagatatggctcggctgttggtggcttgagacggcgacatacgatcgcggatcgcgtaggtggtcgccgtttttgtgatttatgggctaatctcagaagagacagattcgatggccgcgaacggtgagaaccaacgcgagagaatgcgcgagcggccgcgtaagggaggaaagcccatgtccaaatcattcgtcaacaaggcgctgctcggcggcgcagtcgctgcaggcgccgcagtgtgggcgatcgcgccgcgtaccttctccgataagcgccgcaattatgtgccgtccattcccgacgtgtggtacgcgcatcgtggcctgcatgacgcgggttccggtctgaccgcgcagtatgccaacgagagcggcgagtatgtggcgctggcacgtcgcatggccatgaaggccggctatggcagccccagcgtgactggtgcgatcgctccggagaactcgcttgcggcattcgcagcggcttgcgaagccggctatggcatcgagcttgacctgcagatgactgccgacggcgaaatcgtggtggtgcatgacggcgatctgatgcgcgtcgccggagatccgcgccgtatcgccgatctcacgtacgatgagctgacccgcatcccgctgttcccgaccgacgcccccggtgccgccgtggcagcgccgttgccgggttcgcttgaaaatccgccgctggtcaccacgcctgacagcgctccggaagggtatttccagcatgtgccactgttcgccgacgtgctcaaggtagtggcgggtcgtgtgccgctgatcgtcgaatacaagttcgacgacaattccaagtggggttcgcgcgatgtcgagctcatggaaaagggcgacgcgctgctgcaggcctattccggcgcgtatgtggtcgaatcgttcaatccggctgccgtcaactggtataaggagaaccgtccggaagtgtgccgtggccagctttcctggtggccgcaaggggaggagaagccgtctgatcctgctgcgctcgccaaggaatatgcggccggtgcgctgattttcgactggatttcccgccctgatttcgtcgcctacgattggcatggcggcaacagtccgcaggtacggttggctcgtttcatgggtgccgttcccgtgtcgtggacggtgcgtagccgcgatgagctcgcccagtgcgatgactggttcgaccatcatattttcgaggcgttcgtccccgacgagcagtagaggttttacatattatttcggcctgccgccgcatgatttgcgttgtggcaggccgttttttattcgatttactcgattgactgattgggttgattcggttgagctctgatgcggtcagtcgatcacgccatacagacggtcgccggcatcgcccaagcccggcacgatgtagcacttgtcgttgagcttctcgtcgacggcgcacagcaccagcttgaacttaatggatgggtcgaggttctcctcaacgaacttcaggccttccggagcgcccagaatgcacacggcggtaacatcctttgcgccgcgctcggccaggtaatgtgttgctgcgaccagcgtgccgccagtggcgagcatcgggtcgatcaggaagcactgacggccgctcagatcgtcgggcagacggttcgcgtacgtgatctgctgggttgggttctcctcgtcgcgcttcatgccaaggaagccgacctcagcggacgggatcatcttggtcatgccgtcaagcatgcccaggccagcgcgcagcacaggcacaatgatcggcgccggggaagcgatgtgcttgcctaccatcggagcgacgggggtctcgatcggcttgtccacgacttcgacgtcgcgggtggcctcgtaggcctcaagcatcacgagttcggaaacgagctcgcggaacgtggaggacggggtgttcttgtcgcgaagaacggtgagcttgtggtccaccagcgggtggttcaaaacatgaatatccatgtcttctaagcgtagtccataatcgcgaggaaaagcgcgggaactgggaaaggagccaagaaagaaactgaaaatcgtatgaaaaaagcaacgaaacttaagaagagggaaagcgccgaaccacgaaagcgcctgtcggcgcaaaggccgctcgcagcggcaaaaaatggagcccggggctatgcatggcccggcgcgagttcctattctacagatgctgcagaccgtacgttacgtcgtgtcgcgaattgatggtgcgagcgccgtaaaacacttccggtagcggtacagaggtgggtgcagaggcaggtgcaggggacgggtacggaacgcgcgttactccagttttccgcgacgccacagattcgccccatggcgaaaatccttggccgtgacgaacagattgccggccgtgtgcatcaaacgggacgatttcgtacgtacctgcttttccatggcggaaatgccggaatcgctgctatcggaaccttccgcagctttcaatcgtgcgatcatattgcgtgcctcgatgcgcaatcccaacgcaaccacgtcggtgaacgcggccgcacgttccagcgcaaccgcaaaatcgccggtgaacgcgcctgcgagaatcgaatcggcaatatgcgcaatgtcatcttccgtgggcgcctgatcgacgccggcaatcgccgaggcggtagtggcaaccggctctccagcgcgccacaaccgcgcgatcgactcgcgattcttccgcatccacgtgcgcagcagatacagccgccacagaatgcccggcagcgaatccggctcggcgctgctccacagttcggcgatcacgtcaacgccctcgcggtccaccagcgtgagcacgcgctccaccagttcggcatcctgcgtatgatgcacgcggtccaacagtgcggccgccgaagcgtggctcatctcgttgatttgcgccggatcggcacctcccgcgatattgtcggccatcatctggtcgagttgccccgggcgggccggacgcggcgatccggtgttggtgaaaccggcggaacggcttggtacaaccgatccggaaccgtaatgcatgctagtagacaatgggcgaaaccttttgaatatcgataatgctgggaccttgcggcgtatcgattataaacagcgctacggcggtgccggtaggcatgaacggcgttttggcgatgagctgcttggagagcgctttgcgggcgcatagtccgcgcaagtgatcgaacatgcctccgataaccggtcggtgcatgcagatcgccgtggtttcgcgggtctcgagcgtgagctggatctgcttgaggaacgccagccatgcgatggtcgggtgctcggcgaaggcgtcttcggtgagcgcgtcgatgtgttccatcgggcgttcggtctgccagctaagcacctgcagtgtttcctggcagcgcagccatggtgaggttgcgaggcgggttgggttgtagcaggcgagttcgcggttgagtgcgaatgccgcggccgcgcctttcggagtgatcggccggttcgcgtcggtgcctttccaggatttgcgcgattcggctttggcgtgacgcacgatcatcagattctgcgcggtcgcggcaccctcctgtacgcggtccacaaaaatggcgagggtgtctttatcggtggaatgcgtgaggattttacgtgcttcacgcacggaaacccacacgatatcgttgatttcgcctacatccgcgcgatgcacggggccgaatgcgtcaagcagatgttccgcatcatctccggaaatcggttgcgccatccaatacaacgtgtgcttggtgtcgacggcgcgatcgtgtgaatgccgggttttcttgccttcttcggacagtggatattcgacttcgcacagatacgggccgagtgcgatggaaacgcctgtctcctcgccgatttctcgcactgcggcatgacgatgcgattcgccctgctcgagtttgcctttcggccagctccagtcatcgtactttggtcgatgcacgatgcacacttcaatgctgttgagttgttcctttggagttttctgcgctgcgattgctggattttccgcgatttcgctaccggttttccaccgccatacaatacccccggcggcttctacgacacgtctcatgctctcgctcatatctttcattgtaagtggttgggcacgggtttccccatgattgcgcgacggcaatcgtgccatccgagttttcctgcgttttcccacgatggtgatcgcgtatgccgcaacataggaaatggccgattctgcaacagcagaatcggccatttcctacggtttagtgccttgccggtcggcgcgtatgcttcttgatgagatattcctgggaatcgaccagcgggcgaccctcctcatccttcgcatgacgcacgtaggttccgtcggctgccatatgccacgaggtggtggaatcggccatttgcagatccacgtacttgatcagctcgtcgatctgctccggagcggtgatgcgtaccagcgcttcgactcgacggtcgagattgcggtgcatcagatcggcggaaccgatccacacttccggacctgcggccggaccttcaccgatctgcgggccatcggagttcgcgaatgcgtagatacggctgtgctcgaggaaacgacccagaatggaacgcacgcgaatgttctcggaaagtcctggaacacccggcttgagcgcgcagatgccgcgttccacgatgtcgatcttcacgccggcctggcttgcacggtatagcgcgtcgatggtcttctcgtccacgatggagttgaccttgatcttaatccatgcttccttgcctgcgcgtgccgcatcctcttcgcggcggatgcgctgaatcagaccggaacgtacggtacgcggcgctaccagcagacggtggaagctcgacttcggcgcataaccggacagctggttgaacaggcgggtcatatcctggccgaccaccggatcgcaggtcagcaggccgagatcggtgtagatgcgggcggtcttcggattgtagttaccggtgcccacatggcagtagcggcgcaggccgtcggcttcctgacgcaccacaaggctcagcttgcagtgggtcttcaggcccacgatgccgtacaccacgtgcacgccggcgcgttccagcttgcgtgcccatgcgatgttggcgtcttcgtcgaagcgtgccttgatttcgaccagtgccagcacctgcttgcccgcatgcgccgcgtcgatgagcgcgtcgatgatcggggagttgctggacgtacggtacaacgtctgcttgatggcgagcaccttcggatccgccgcagcctgcgctaggaacgcctgaacggaggtagagaacgaatcgtacgggtgatgcaggaggatatcgcgttcgcgaatcgctgcaaaaatgtcttgcgcgcgggacgactccacctcggcaatctgacgattggtggtcggcacgaacgaacggtacttcaagtccggacggtcgatgccgccaagttcgaagagcacggtcgcatcgagcggtgccggcaggcggtacacctcatcggcactgacgcgcagctgatcggcgagcagctgggaaaggaacgggctggtctcgtcggaaatctcaagacggatcggcggtccgaaacgacggcgcagcagctccttctccatggcgttgagcaggttctctgcatcatcctcttccacgtcgatatcctcgttacgggtaacgcggaaggatcgcgcttccttgatgatcatgcccgggaacagggattccaggtgcgcgatgatcaggttctccatggtgatgaagccgtagcgcacgttggtggcatcgtcgtcggtcatgtcgtcgacgggcacgagacggttcaggtttccaggaatcttcacgcgagcgaagtgggacttgccggaagccgggttctccaccagcacggcgaggttgatggaaccgccggaaatgtacgggaacgggtgggccgggtccacggcgagcggcgtcagaacagggaatacctgctgacggtagtagcgtgacaggcgctcctgttcggctgcggtgagcttgtcccagctcagcagcacgatctgttccttcgccaggtcgggaagaatgtgatcgatcatgtagtgcgcgtgctcgtcctgcaggcggtgcgcctgctcgctgatggcgcgcagctgctgccttgggctcaatccggaggcggccgtcacggcgatgccggtgtcgatgcggcgcttcagacctgcgacgcgaaccatgaagaactcgtcgaggttgttcgcgaagatcgcggcgaagcttgcgcgttcgatgatcggcagatcttcgtcttgggcaagttcgaggactcgcttgttgaacttcagccagctcaactcgcggtcgaagaagcggtcgttcggcaacggctcttcgccggcctgaagctcacgcttgtcgtttttatcggtctcggcgatatgctcagctatctggctgcgcaagatcgccttcgagggtgcgtcaaaaatctgtgccatactttcctactttatccttaagtagctggaaatgctgtaaaaagccggcaaaatttagctggagttaacattcgttcgctcattgtgcaaattagggtgtcgacacgccgtgtttttgtcgcaaacgcacgcaaacgaacaaacacgccttgcgtttcgcacacgatggagcatttttatgattcttgcgatcgtaaagcaacagttgcgacaaatacggaacatcagccggtttcggtttgcgattgccggattgctgagcataattacgaagtacaagaacaacttaaagagcagagcccacaaagagtgtatggccaagataggtcgttacgttgaacgggcattggatagacttaccgttacgacgatgttgttgtgcagagattctgcccttaaggttcttgcaaggaaggcccgctcggcgggccttcctttttgtttgtctgttctcagggagtttttcgggaaaacgacggacgccgattatcgtcgttgtgtggataacggtgcataacacgccggggttgtggataactcgcgtcctccgaccacggggccggttcagcttgcaatggtgctcgccgaagcttttcaatcgacggtatgagtaatgcaacgtctttttcgaatgttcctccggtgccgctgccgtcgggcgggctgttgccggtcgccggcgcgatcgcgccgcaagcgtcaccgccgacacaacacagaaccgtctctgcgcaacggttctatacgccgccgggatcgaatcgcggtggaacgcaactggttggcgctgtgcctggaacgtatggcatggttgcgcaatgcggtcgcgcatcggtggaggaaccctgcgatatgggcaatgtggtggttatcgactccgtggtggcaggagtgggcacgagcactctggccgccttactggcccgcgagctgagcgaacgcggcctcaaatgtgtgctcgtcgacgccgatctgcaaggaggtgggctggatgtgcttcttggcgtggaaaacgaggacggctcacgcttcggggaaatcagcgctccgcttggcaatatcgacggcaaagcgctactgcgggagctgccaatctgggatggtgtgccattgctggcatgcgatccttggaaaaccgaaaatccgcaatcgtgggaagtgcaagcgtgcattcatgcgctatcgcaggtgcgaagcgtggtcgtcgtcgatatggggcaatggaacggactgcaggatttgacggaactgcgcaaggccatccgcattaccgtggtcgaactgacggtacttggtcttgcgcgggccaaagcgaatctgcgggcgcatcacggttcaatcggagaacacgatgccgcaacgcaggaacgggaatttctcgtaggcgtgcaaccgcgcggaaccgtacgcgaccatggcacgacggcaatcgaggaagcggcggaatacctcgactgcgatatcaccgcggtcatcaaaccggatgccaagctttgcagcgaactcttggaagggcttggactgcgcaaacccaatcgtacgaacgcgaaagccatcgcaacgttggcggatctcattcaggaagcgttgggagaaaagagcatcagtcatggaactcgggccacttagcgacatcgcatccgagccgggcgtcaccgacatcgcggtaacctgcgacggaacggtgtgggtggatcgcggccaaggtatgcggccacatgcattgcgcgtgccattcagcggtccccaagccatccgcgatttcgccgtgcggctgtgctcgcagcttggcagaaggctcgacgacgcctgcccgatagccgacgcctccaccgtggaaggcgtgcgcgtgcacgcggttatcgcaccgctcgttcctcaaggcgccgccatcagcatacgattgccggacgttgttgcgcccagtctggaatctttggcggaaaacggcatgtttccaagcggatggatgcccttgctggaaggattcgtggaacgaagggccagcgtgctcgtgaccggcggaaccggagcaggcaaaaccacgctgctcaaagcaatgcttatgcgatgcgcgccgggggagcgcgtcatcaccgtggaggaggtgcgcgaacttggcatgctcaaccatgccaaccacgtgtcgctggtgacgcgcggcgccaacatggaaggcaaaggcgccatagggctgtcgcagctgatatgcgcgacgttgcgtatgcggccggaccgcattgtggtgggcgaatgcaggggcggcgaaatcgtggatctgctgcgcgcgctgaattccgggcatcgcggaggcatgaccaccttgcatgccaatcaggtgacggcggttccctcacgcttggtggccttgggattgctctccgggctgaatccgcaagccaccgcggcgctcgcgcaagacgcgttcgacgtagtgctgcatgtgggccgagtgggaggcaggcggcgcatcgcgcaaataggacggcttgaattcgcagaggggaaactgcggggaaacctattggccgggtggaacggcaaccaaatgcgggcttcgcaacagtggcctgatttcgtgcgcgtatggagtcgttgaatcgaggtgggcagatggaaagcctcagcattatttgcgtggtactgtgcggactggccgtatggctgtggcctcgccgaaacgtatgcgttgtgggcgaacggacgggaaacgtagtggggcgcgcaggcgaaagccttgatgaaaaacctgatggaggattcgatgggcggtctgacggaatcgaagaggcgaacatgccggcgaaaccattgcccgccatcggatgtgtggcgtgcgtggcttccctccgcgcatccgtgcgcagcggagccacattggtgcaggcgttcgaagaattgggtggaacgccgttcgccacacccgaacttaccaggcttcgcataaccatggtgatccgcagccgatgcccgcccaaagagcaatgcggccaagtcgaacggctgagcggcgagctatatgcggcctgtcagctgagcctgacactcggatgcgaaaccggccgatgcctgcaggcggtggctgaatcgttgaaacgacaacgattattggatgatctgcgtgccaacgcattcgccatgcccaaggcgacggtgaaactcctgatggcgttgccgctgatcactgtgctcttgggagaaggcatgggtgcgcactcattggccttccttgtttcaggggtcaaaggcttggcatgcctcggatttgccctctgttgctacacgttcggacttatctggatacgtgcgctgatgcggcaggatgatatgaaaggagccatgtgatgactggcttatggatgctgacggcggtggcgtgcgcggccgaagcgatatggctgaagcagtggaggccggttcgcgcgccctccgaccttgcgcccgccgaacgaatgcgggaacttcctctgccgttgatattggagatgctcagcgtcgccatacggcagggggcctccattccacgtgcgctgattgccgtgggagatattgcggcaggagaattcggcgcgggactacggtcggccggagaacagttgaacaaaggtgtttcctgggatgatgcgtggccagatgatggcgatcttgcggtagtacgcgatgcgttcgcctcctcatggcacagtggcgcctctccagtggaacgtttggaaacagccgtcgaacaattggattgggatgagcgctcgcagatcgaacaggctgcagcgaaattgtcggttcgtttgttgctaccgaccggattgtgttttcttcccgcatttgttgcggttggaatcattccgtccgtcatgtcgtttgtgcaatgacggcgtgtgcgcaacgacaacggaaaagcggggaatgttgggagacgataattcacggagttttgtggataaatgtggatgacacgccgtggttgtggataacccacgtcctccgaccacaaccctgaaaaaacgttccgacgggcacgatgatgcgcaacactgggtgcactcggccatctggccgaggttgttcgaacgaaaggaacgccatgaacaacgtaacgccaatcaacgtcgatggtttgccgggcctgatgggcagggcagggcaacggctgcatgccatgcgtgaacgggccggcaaagcggtatgcctgttggatgcgcgtatgcgcacgctgaccgtcgaaccggaggaaggcgctgccactgccgaatatgcggtggttttggttgccgccaccggattcgcagccgttttggtgggcatcatgaaatccgatgccatcaaaacgctgctgaccaacatcatcaagaaagcgctgagcgtcgggtgattcatgctgaggcaatggtggaaacgccataccgatgatgccgatgagggagcggccaccgcggaattcgcggtggtgctcccctgcgtggcggcggtggcgattttggtgttgtgcttggggcgtgcgtccgtggtgtctatgaattgccaggatgcggcggcggccggtgccagggctttcgcggttgatgatacgggcggcgaatcgaaggcgaggaccgcggtcatggcggctgcgggaggttcggcgacggtacggttcgagcgtggggcggacttcgtcaccgtcacggtgcaatgccctgtggtgccggatccgaccggtgtgctgcccactcgagttaccggcaaggcgacccgctacttctagcgttgctccgaagcgtgctggtctctgcgcagtgagatgcgggattgttggttgtggcctgtgcatggaggtctgtgaggtttggagcttgcgacatacgacgtgtgaaacatgttgtgaaacactattggcaaccatttgatggatgcgggtcggaaaggaatggataatgtgaaacgccttgtgaaacattggtttgcttggattcgcgggtccgatgagggttcggggaccatatccggtgtggctttgatcgcagtggccgccatcatgctgggcgcggccgcgtcggcgggcaatctgctgctgtgcttgcatcgcgcgcagaatgcggccgacctggcgtcggtagcggcggccaatgcgttgtattcgggatcgtccgatccttgttccgtggcggaacgcactatatccggcaataatgcgacgatcggatcctgcacgatagaaggtgaggatgtgctggtcgaagcgcaggtcggtacgcaaatgccattcgtatcgcatgtcggcaaacagtcacgggcggggccgattgtctgcgaataagcgtggtgcggaacggtacattgtgcgggaaatcgcgcttcgtaaaaagggatctttctacgtaaaggaacattcgttccacaaaacacggccatttgtatggaaagccgttcgcatgtggcgtgtggagcgaatcgcggttatcgtactgaagtatgagcgaaacgtcatgtgtgaatgcgaccgttgccgttgtcggcaatccgacgtcaaacaaaggcaagggtgccgaggtcggcaagcaggtggttgagctgctgcaagaggccgggcgcaagcatggcttcaacgtgatcgacgtgaccggcgagagcttcgacgattccttggcgaatgccaggaatcgcaggaacgaatacgactacctggtggtggtcggcggcgacggaatgattgcgcttggagccaatgccgtgggctgttccggtaaaccgttgggtattgtggcgacgggttccggcaatgatttcgcccgcggtcttgagctgccggtcaatcgcgtggaaaccgctgtcgacggcatcgtcggcgcgattgtgcgcggcacgcatattgacgttgatatgggtttggccacgtcgttgcagggcgggtatgccgtcgattccagtaccggcgatgatctggtcggcgattcggacgtgccattgcgtccggcggtcaaccgcttctacgcgggcatgctgtcgtgtggtttggatgcgagtatcaacgaccgtgccaaccattcccgcttgcccaacggttcggtgcgctatttcgtggcagcgattgtggaattgacgcatatgaagcggtacggataccacatcaaagccacgttggccgatggaacggtggaagaaagagacattatttcaccgttgcttacggtggccaattcacggcatattggcggaggtattgagatctcgccgtattcgcggttctctgatggtttgcttgacttggtgtggctcgaccatgtgcccaatgtcgccgaatgcgcggatgcggtggcgcgcgcctacagcggcaagatccttggatgcaaggtgtttggctggaagcgtgtgcgcgatatcgaaatcacccgcgcgcaagagggtgatgagccgccggtcttgatggcggacggtgaatatgttggtcgcctgcctgtcaaggtcgtagttcaagaccgtgcgttgcgtgtgctggtgccgccggccgtggcggaaagccaagctgccaacaccgaagagaaagtgctggaagccatcaagcgtgatcaccgtgatcctgtcaccggcaaaatcgacacctactacgcgaagcgctcgcggtagtgcgtgcacatgccggtcaaaccgcaacattgcatatcgaagatggcacgtatgcaactgattgcgtgatcggcaatcgtaagcaatcgcaaataatttcgcgataataacgaaaaatccagtacccgcaagatctttatcttacgaataccggattttctgtaactagcgaacgccgtaactatcgaatgcggattgcgatcaggcggcgacttcctggcgggcgagagcctgctcgtagtcgcgggtgcccttgaagacttcctgcagccacgggttgacgtgctgcttcttcgcgcggtacatgatgtagccgagtgcgagcacgttggccacgagcgcgatgatcgacacggtcaggttcacgttcggattgttcaccgactgcacggcgaacttggactcatcctggaacatggggaacacctgcgcgaacatgcaccagatggcgagcgtgttggcgcggttctgaatccagccgcccttgttccagaagaagttcgccacggtcggggcgagcagcagcgcgaggccgcaataccaggagtgggtcggcaggcagttgtaggtgtagcagaagttccaaatatcgtatgcgacgatgaatacccaagtcatgtcaggccacagcatgtcctgcttcttctttgacacgtaaatgccgaaccagccggtcatgcaggcgatgttgatcaggccggcaacgccgttgaacacattgtgccagccgccatacagcgtcacgccttcggtggaaacccatgtggtgccccaagcgcgaatggccgattcgaagtcggaggccacggcgataagaatgttgatggccacgatcacgaacgggaagcacttgaaccattcggatttgccgatcttgccccacttgtatttgagtgccatgaagccgatgcagcctgcggtggccgcatatagcttggcatagtggaaccagctggtcatatgcacgtaggtcggattgctgagcgcccattcggcacccatcgcggcggccacgtaaatggtgatgaagtagatggtcagaatggccggcacgatcaggaacgcgatcacgccaccggtcttggtgcgacgggccagctcattggcgccgatcaggcagcagaatacgaggatccatccgatccactggtatatggcggtgtcgccatagacttggaacaacatcgctcttcctttctctcaacacgtatgcgcgcggggtgagctgcgtttacatgtattcgttcaggtgcagcgtctgtgccgcgacctgtctgatgacggtgtcttcaatgtcgggatgcagtctgatcagcgaaatcaggccaacgatgagcgtatagaacgtctcgtgctcgttggtgatgggcatgccatgcaatttctcgaaatcgcgcactgtcgaattgcagatgtattccgcaatgcgatcggccacgcggtcgatgaatttgatgtacagtcccgcgttgccgtcttcgatcatgcgttggctgaacgggccctcatcggcgatgagggaacgggtcagtcgcaccacgtcatcgagcgctttcgagatgttgccgacttctcgattggcgttccactcctccaattgtgagatgacttcgtcgatgacgtcgttgagcacggcgtccgcaacttggtctttgtcttggaaatagtggtagaagagagatctggtcatgcctacgcgacctgcgatatcgctgatcgtgattttcgaaaagcccttttccaggcagattgcgcgggctgcatgcacgatttgcgcgcggcgtgcgtctccgactgttgttgcggaagcgttgtgctgtccgtccatggctttctctccttcgctcgagtggcgtctctcacctatgcgacacgttgacactctgtcaatttcttgactgccctcagtctaaaccgtaaattgacacaatgtcaatttcgtagtgtcgctgtcgtcactcccagcttaaacgttgccgcggcgcttgtctttggggacacgcgcttcaccgttacgggcaggctgtgcggccggtctttgagaaaaaacgtgtcgtaattaatcggtagcctagtgacaccacagcggaaggaattgcgatggcactggcactctatagaaggtatcgtcccgacacgttcgacggcgtgatcgggcaggatcaggtcacgattccgctgatgcgagcgcttgatgagaacaaacttacgcacgcttacctgttttccggtccgcgcggctgcggcaaaaccagttccgcacgcattctcgcgcgttgcgtcaactgcgcgaaaggcccgacctcgcacccgtgcggcgaatgcgaaagctgcaaggacctcgccacaggcggccccggttccatcgacgtggtggaaatcgacgccgcttcgcacaacggtgtggacgatgcccgcgaactgcgcgaacgtgccggattcgcccccgcccgcgaccgctacaagattttcattctcgacgaagcccacatggtcacgccgcaaggcttcaacgcgctgctgaaaatcgtggaggagccgccggagcatgtgatgttcatcttcgccaccaccgagccagacaaggtgatcggcaccatccgttcgcgcacccaccattacccgttccgcctagtgccgcaggaggttatgggcccgtacctcgagcagatctgcgaagacgagcatatcgaagccgagccgggcgtgctgcgccttgccatgcgtgccggcggcggctccgtgcgagacaccctttccgtgcttgaccagctcatggttggtgcggtcgatggcagcatcgcatacgactccgcggttgcgttgctcggtttcacgcctgacgctctgatcggcgaggccgtcgacgccgttgccgacaaaaatggcgaagcactgtatggcgtgattcagaaggttgtggtcggtggtttcgatccccgtcgatttgttgaggatttgcttgcccgcgtacgcgatttgctggtgctcacgttgggtggagagcgtgcggaaagcgtgctttccgacgatgcggccgccgagaacatggatgatttgcgtcgtcaggcttccgctttgggattgtctgcgctgacgcagatggctgacacgatcaatgcgacgcttgccaatatgactggcgcgatttcgccgcgtatgcgattggaattgcttgccgcgcgcttgttggccgggcgtgaggaagggatggctgccgttgcgtcatcttccggtatgcccgattttgctggcgattccggggcttccgccgctgcagaatcgctgcgtggatccatggctggctcgcgccgcggtacgacgagacgtgcagacggtgttcggccacaggattccgcgtcggcaattgatgctccttccgcgcctgtgaaaccgcctgtgcagccgtccgtggcgccgacgaatcctgccgatgccgtcgcatccggcgtggcttccgtgcttgctgacgtgcaacaggcgatgaatgcgacgacttccgtcgcttccgctgcgcctgccgcaacttccgtaccagctcccattcatgacgatcgcacccccgaccagaagtgggatgcgctggtcgcagcccttccggaagacgtgcaacgttacgtaagccgtgaaaaagtgcctcgcgtgctactgagcggcgaccgtctgtggatcaaattcgacaaggcgctcagcaaatacgcgtttgccaaagcggtggcaaaggaatcggtggacggcaataccgaagtggtgaaaatcgtccgcgccgaagtgcataaggcgttcggaccgagcgtcacgctcgcgcctgccaaaaagctggcggacgggtccgaatcggtgccgtggagcaaactcagcccggaagagcagagcaagatcaatgcgcaactcgtgcaggaacagcttaaagcggccacgctgctgacggccaatcttggtactgctgcaggtctcgaatcctccggcaaggagccggccggcacaagcgcgaagggcgccgaagacggtggcaatgccggagattccggcgatgaggagggccatcgagctgctgccggtggagccgaggaagtcgatccatgggcggccccgacgcaggaagtccatcatccggaacggcctgttccggatgatgacccttgggttgcatctgcacagccgatgcaaccgcaatcggtggtcgcaagcggcgtcaacgatgtgaaagcgccggaacaacatgcgaaacatgtggctgttcccgatgtcagcgataacgttgatccttgggcggcaccgatgcctgtaccgcagcaagcgccggtggacgacgatccttgggataaccccatgccgattcaggcaggaccggtggatcccatgcctgctccaacggaacctgagacggctccgaagcacgccaatcaccagcatcgcgcaccgcggcaggacgcggcaccgcagcaaggccagccgaatgccgatccgtggagccagcagttctccgtgccggcgcagccaatgccgcaggtcgccgcggaagatgacgaatattccatgagcgacgagtcgatcggggcgtcaaccgcgttaagcgtggacgatctgacccgactgttcgaggtgaaaaaagtcgaggatttcgggccggacgatgcaaaaaacccgcgcaacatgcagcagaagaagaatctcgacgactgatggcggtgcagtcgcaagcaaaaatgcgaaaccgagcaaaatcgacgaatcaacgcaatcgtaagcactgcataatcgcgaatcttatggaaaccaaggagaggtgaaccatggcactggcctatgacggcgccatccaacgactgatcgacgcgttcgcgcacctgcccggcatcggaccgaaaggcgcgcaacgcatcgccttctacctgctcaacgcatccgacgaggaatcacaggggctgatcgacgccatcgccgaagtcaaagagaaaatacgattctgtgacatttgcggcaacgtgtgcgaaaccagcccatgcccggtctgcgccgatcctcgtcgcgaccacagcgtgatctgcgtggtcgaagagccgaaagacgtgatgagcatcgagcgcacgcgcgaataccgcggcctgtaccacgtgctcggcggcgtcatcaacccgatggccaacgtgcagcccagcgacctcaacatcgccaaacttatcgaacggctcaaagacagcgaagtcgccgaagtgatcctcgcgctcaacccgaatgtggaaggcgaagcgaccaccagcttcctgtcgcagctgctttcgcaaaccgacattaaagtcacgcgattggcgagcggcctgccggtcggtggcgaccttgaatatgccgacgaaatcacgctcggacgcgcgttggcggggcgtcgcgcggtctgacgctacattgcctgcgcgttgcttatgctggcttgcgctggcatgtattggattgcgcaagcgtcgtacgggcgatctgcggaagatttgacggaacgtacgccgaaaaaaatgtgtggatcccatatattgttccgcatgttgggcgtgcaggggcttgacaaatcggatttttcctataattgaccagcctgcttagtatgttggcgggcaacacattgaagaagattggataagttgtggctctcatcgtgcagaaatttggcggctcttccgtagccgacccagaatcgatcaagcgcgtggcccgacgcatcatcgaaacgaagaacgccggcaatgacgtggccgtcgtggtctccgcaatgggagacaccaccgacgacctgatcgatcaggcgctcagcatcgactccaacccgccggcgcgcgagatggacatgctgatgaccgcaggcgagcgtatttcgatgagtttgctcgcaatggcaattcatgcggccggctctcacgcctactccttcaccggctcccaggctggtttcatgaccgacgcccagttcggtaccgcgcatatcaaggccgtgaagcctgaccgcgtgcgtcgtgcgctcgacaagggttccgtggccatcgtggccggcttccagggcgtgaatgagggtggcgacgccaccacgctcggacgaggtggatccgatacctccgcagtggctttggcagtggcgctggacgccgacgtatgcgagatttacaccgacgtcgatggcgtgttcaccgccgatccgcgcattgtgccgactgcacgcagtatccccgtcatcgactacgagtcgatgctggaaatgtcttcctgcggctccaaggtgcttgccctgcgttgcgtggaatacgcgcagcgattcgacatgccgttgcatgtgcgcagctccttctcccaccgtcgcggcacgctgatcgtgccggaagacgtcgatccgcgcacattgccgaacatctgagatatctgagattcgcattcggcaatcgcgagacatcgcaggcaatcgcaagaaaaccaagactttacgaacaaaggtaagaacatgagcgaaaacaacaaccagtccttgggagatctgttccccgatctggggccggaagtcccgatcatttccggcgtcgcacacgacaacaccgaatcgctggccaccgtgcgccgcgtgccgaacgagccgggcatggccgccaaggtgttcacgctgctggccgaggccggcgtgaacgtcgatatgatcgtgcaggcttccgcttccaccggcaccgccgatatttccttcaccgtgccgggttccgccgctgccaaggtgcgggatgtgttgcaggagaagcaggacgagctgggctaccagtccttcgacatcgacgccaacgtgggcaaggtggccgtggtgggcgtgggtatgaagacccactccggcttggctgccaagttcttcaacgcgctgagcgacgagggcgtgaatgtgctgatgatctccacgtccgaaatccgcatcgccgcgctggtcccgctcgagcagctgcaggacgccgtccgcgcgctgcacactgcctacggcttggatgccgagcaggtggaagccgtggtgtacggcggcaccggtcgctgacgcaataccgcgcaataacaatcgaaaaaagacttgactggattgcttgaggcgtctcagccaagtcttttttattcccatatctgttttacagatatttttttcagataatctgcaaataaaaaagcggaggattgctgaataatcaacaatcctccgcaatattatgttctgcagaaatcagatatcaccatgtacaatcatgcatgatcatgcgtaactgcagaacatatgcagatcgttatcacttcttggtgatgtagccgagtgccttcagcatttcggcgctttccaaagcgccgccggcagcgccgcgcaaagtattgtgagcgagccccacgaacttccaatcgaaaatggaatcctcacgcagacggccgatggaaacacccatgccaccctcgtaatccacgtccttcttgacctgcgggcgatcgtcgtcggtcaggtactggatgaactgcttcggcgcatgcggcaatccaagctcggaagccttgctcgtgtagttgaccaggcgatcgacgagctcttccttggtcgggttcttgccgaagttgatgaacacggtggctgtgtggccgttgagcacaggcacgcgaatacactgcgaggtgatcttcagcgggccgtcgaacggcacgatctcgcccttttcctcatcgacgcggccgaacaccttcagcggttccttctcggacttctcctcttcgccggagatgaacggaatgatgttgcccaccatttccggccagtcgttgaacgtcttgcccgcgccggagatggcctgataggtgctcacgataacctcgcgcggctcgaattccttccaagcggcgagcgccggggtgtaggcctggatggagcagttcggcttgacggcgatgaagccgtgcgtggtgccgaggcgcttgcgctggtgctcgatcacctcataatgctccgggttgatctccggcacgaccatcggcacgtccggagtccaacggtgggcgctgttgttcgacacgaccggcgtttcggtcttcgcgtattcctcttcgatggtgcgaatctcagccttcggcatgttcactgcggagaacacgaaatcgacgtttttgaccacgtcttccacgtcggccacgttcttgacgaccatgttcttcacgaattccggcatcggcgtttccatcttccagcgaccgccgatggcctcttcgtaggtcttgccggcgctgtgcgcggatgcggcaagggtgaccaattcgaaccacggatggttttcgagcagcgtgacgaagcgctgtccgaccatgcccgtagctccgagaatgccgaccttaatcttttcggacataacaacctctcgcttatgctggaacggtttcgtatgatttcacgcttgaggtcgaccagccggccccaaacgacgtcgtgggcggccacacgcgttgttcaatcttacgaaatccgcggaacaagcaggttcccctatccgtatgctggtctgcttcgagtatgagtttggcgattgttatgtgtggcaaaatgacgtacgctattggtatggctacagtaacaagtaacaggacatcgcggttggatattcgtttaacagcggagcagcgttcgttgattgagcgcgctgtctcgctgaaggggtccacgataacacaatggacggcgcagcatctactagatgccgcacgacgggaaatagaggaggcttcctcactcaaacttgagaatgaatcgtttgatgcgtttcttcgtgcgctcgatgagcctattccggctgagacgaaggaacttatgcggagggaacctcaatgggcgtaactgaagtgaggtttctcgagccgcgaagattgaatcctggcgagacgcttgaaggtttctcgtgtggtgtcgaactgatcgacaattgggcgaatcgccatgccccttatgcggcgaagcggggtacggcggttccatacgtgtgtttcacaacaagtggggaagttgcgggcttctatgcgattagtgcgtattcaattgatcgtgatgccgtgagaggtggatggcttaaacggaatgcccctgccaaaatacctgtgattctgttaggaatgctgggcgtggattcacgttttcagcatcaggggctgggatggatgttgctgcaggatgcaatcaagcgagctcttgcagtaggccgccaaatcgggtcccgcgcacttgttgttgatccttatgatgatgtctcgcgtggcttttaccagcattttggcttccgcgacgtccctggttccaacagtatgtttgtcagattggtttgaacgcaggacgcttcctgcctcacaggaacgctgcatagcctttcgtctgcgcgtggagcaataacaaataccggcgctgaatagtgcaacgaatgtttttgcggagcatgtttgccgttgctgtgcataatatgaaaaacggaaatcattctgcttccggagcgcgcaagtctacttcgcgcactttttggtatatggccccgatgtctttgaggttgatgcggaactggctgcgcgggctgcgaggcttttcgcactttgggcgtatcgctcgcgtacactggaagccatgtcgaaggcatcagaagaagcgcagaagcaattggaccgtatcgtggcgttgggctacccggatgtggccgatatgtcggccgccgcgttccgtgctttggcacgcccgctcatccgcgcgctggaggattccgatttgggcacgcagattctgttggtgcctacgcgcgagttggtttccccggaatcgttgatcgcgcgtacgtcgatcaaccgtatggctggtttcaccacgatgccgccgcgcgatatcgccagttttcttccgcaggatggtttcgaacctccggaaggtccgttttacctggtggtcgagccgcatacgggaacgtgctacatcaatcgagagcccgatgtggcgcgcaagctgatcgattccgacgagcgtttgccgcttacgttggaagagggtcttgcgattgccacgcagcatccggaatggttgttggagaagaacggtttcaatttgttgggatcgcgttccgcggatggtcgtgtgccgagtatttggatgagccagaatgcgcctcgattgggtgcggtatggccgaattcccgtcatacttggcttggcaacgcgttttgcgtgtctcgtcgcggcgtcagtttgttccactgacgttctgctgatatttcgcagattttccacagattttccgcattccacagattggcgattatccgactgttgcgacggccacgccttgcgtcgccgcacctagcgcttgaatagtttggcgatggcgtggccggctgcggcgcacattaccgatccgatgcccagcagtgtggcggtgacctgcgggcggcgcaattcgttgcggatgccgatcagatcggtcacgcaatggtcttcgaagaacacgcgcaattcgttgctggagtagcgcccgatcaagtcgccccacgtgagcatgcgcgtcacgtagctgaccggattgttttcgcggaattcgaacagccggatgcctcgcagccgcgatttcgggccgtagcattcaaaaccacaggtcggcgcgtaccccaaatcgatgtcgtgcacatgcccgacgaacgcgttcttatggtcatgcccgcagaacagcgcgaaatagccgcccgcatcgcgcaatgcctgcacttcgccaacgttctcatccgcacagccgatcgcctcgccaagcctcgagccaggtctgcacacgtcacgattcaacacatagcagtgccccgcgaacgttcgcgcaccctccaccgcattcggcgtgtatgcgggcacttcgcgcaggcaatcgtagaactcctgcggcggaatatgctggaacgcgatcgccggaaccgccaaaccgtcgccattgcgctcgcccaactcgcgttgcacttgcttcagccattcgatcgcttccggcgaaggcgtgccatagccgtcggaatcggccaaatcccatccgcgcgaattcgacgcgtattttgcgtaggatgtcagcgattcccgtcctcctgcagcattgccaacagtattgccggatttaccagtatccccagcatgctcgcgatcgccggaattactgcgatcgccgtcaaacgcattatccgcataatcgccggaattcaccatcatcacgctcatcgcaatgcgcccagacccgtcggaagcctcgatcggaatcgcaaacgtgcctggttcgagagccaaaggagacgacccggcaacgggattcatgcaaccggaaaactctcggtagaggtcatcctgttcgtcggcgagaatgccgcactggaaatcgtggttgccgtaggttgcggcaaaggggattcgcgcttccaatgcaggtccaaggaatgctgcgaacgtgtctcgtactttctgccgcgtgctgtcgagtatggtcgcggcggtcgcgcgattgatggattgcgcccatgattcaagcttgttggcggatccgttgcgcccgtcgcgtttgttgcgtttcacgagtttcggcgagtcggtgccgatgccgtcgatcatccaattgtcgtcggtcgggggctgttcgagcaacgctttggtgaagggatgtcgtttgatgccgcggattttcgcttcgatttcggtgaccgcgcgtatgtgcgtgcccggctgctctccgcgacggcgcaggaacgtgtcgatgtacgcggggtcgtatccgcgaatctggtcgccggtgaagacgatcagatcgggatgcgttttcttgatggcggcttcgatgagacggatcgtgtcttcgcgcacgtttggtccgtcctgaatatcggccatctgcagcacacggaaggtgccgtcgctgttgaatcgcaaggtcatgatgctcactgtaatgcgcgaaatctggatatggggtgaaaaagagacgaaaatcgtggtctgtccgtcatatggcggaatgccggcgatatatgggattggttgccgctactatgggcggcagtgcaggtaggtaacatgcacgtaacaatgtgggccggcagaaggcctgcccagctttacagataaggaggagtgatgggtcaggatcaatcttcagtgtttgatctcgcggcagtggctgcagcgtccaacggagggaacaacgacccgctgctgcctccggcgcgttatattggagctccgcaaaagcccagcaagatgccgtacaacaagtacgtcgcatacgataagcaggtgccgtttgattacccggagcgtacgtggccgggcaagcgactgcagcgtgcaccgcgttggtgttccgtcgatcttcgtgacggcaaccaggccctcgtcaacccgatggattccgagcgcaagctgcgtttctggaatctgctggtgtcgttgggcttcaaggagatcgaggtcggcttcccgtcggcttccgaaaccgattacgatttcattcgtatgctgatcgagcgtgagctcattcctgacgatgttacgatcgtggtgctgacgcaggctcgcgagcacctgattcgcaagacttacgagtgcctgaagggtgccaagcgcgccgtcgtgcacttctataactccgtgtccgtgctgcagcgtgaggtcgtgttccgcaaggataaagccggcatcaagaagctcgccaccgacgcggccaccctgtgcaaggagcttgagggcgaagcccagggcatcgacctgtattacgagtattctccggaatccttcaccggcaccgagccggagtatgccgttgaggtgtgcaatgcggtgatcgacgtcatcaagccgactccggagcatccgatgatcatcaatctgccggcaacggtggaaatgaccactccgaacgtgttcgccgatcaggtggaatacgtgtcgaacaatctggtgccgcgcgacgccgtggtgctgtcgctgcacccgcacaacgatgagggcatgggcgtggccgccaccgagctggccgtgcttgccggtgccgatcgtgtcgaaggctgcctgctgggcaacggcgagcgcaccggcaacgtcgatctggtcacgcttggtctgaacttcctcacgcagggcatcgatccgcagatcgattattccaacgttcctgagattcgcaagacggttgagtactgcaaccagctgaagatttccgagcgtcacccgtatgccggcaatttcgtgttcaccgccttctccggttctcaccaggatgccatcaagaagggtcttgaggctcgtcagatggccgccgatcgtgccggtgccgatttggacagcttcgtgtggctggtgccgtacctgccgatcgatccgaaggatatcggccgcacgtacgaggccatcatccgcgtgaactcccagtccggcaagggcggcatggcctacctgctgaagaccaaccacaatcttgatctgccgaagcgtctgcaggtcgagttcgacaaggttgtgcaggcgtacgccgatgagaccaagaaggaagtcaaggacgaggatatttggcgtctgttcaaggacgagtatctgccggtcgaagagtccggcgctactgcggctggtgcggtggtcggcgacagcaaggacgactccctcgagcagtggggccgtctgaagctgctgaaggtgtcggtgtcgtccggtgaagatggttccgataccgtgctgaaggccaggattcttgaccgtggcgtgaacgtcggcgttgatgagccggtggagcgtgaggtttccggcatgggcaacggcccgcttgccgctttcctgaacgcgctgagcaacttcggcatcgaggcttccgtgatggattacgtggagcacaccatgtccgtcggcaccgacgccatggccgcctcctacgtggaatgccagatcggtgaggaagaggatccgcggatcgtgtggggcgtcggcattgacacgtccatcgtcaccagctcgctgaaggccattatttcggccatcaaccgttccgagcgctgatttccgcgggttttcggttctcgtagctgaagggcttgtgatgtacttgcgagtacgtcacaagccctttgctttttgatttcataggattcccgagtttccggattttccagtttttgcggattattcggaaactcggaaattcaggattgcgatccccaaatgcagacattgttgccgattgcggagaacgtcatgaccggcttgccgtcgatctcgcgggggagtgttgcgaaccgtgcaatgtaggtcacgtcgtccaatcggatttccgcgtcgcttgcgcaacagttgaatccgttcacggcgccggaaagcggtttccacgatccgcaggtgatcggcccgtccgtcgacctcggcagattcgcgtcgggagtatcgaagaaacttacgatttcaccccgggtgatccgcccgtcctcatggaacgtatatcgcgtcggacgattgatgccaacgtacgtgccatcatcctcttgcttgccgttgaagaacgtatactgatcatgcagtacaacgttgtaatcgcctgtgatatcggcaatgccggtcggcgcgacggcaacggaaccgcggtattcgtatggtgccgcaaccagccagccgtcggaagtcggcagtaattcgcgtacgtgagattcgtaatcttcatcatcgccctcgctaaagcgttccgcgaaacgggtgtggtagacgaggaacatgcgaccgtccttcgaccgacgaatggcggaattatgcccctgcgagacttcgacatcggcaagttctgccggaccgccatcccactgtacggaagacgtcaatcgaatgccggtgccgcgctcctgattgtcgggaatctcaccgtacgaaatcgcgggattgccgttctggtccacgtacgggccaagcagcgattttgaacggaacagacgaatctgatatccgccggtgcgcccaagccagccgtacgacatgaacagataccaccatccgttttcacgaatgaagtacgatccttcgccggaattccagtagcctccggccactttcacgccgtaataaggatcggaggaatccttgaccagtgggtatcgcacggaataatcgcgcaagccggttttcggatcgagcttgaacatccagatgccgccgaaccatgaaccgaaactcatccacatttcgccgtgttcgcacaatgcgggcgccgcgtcgatggcgttgatgcgcgtgtctttgagcgacaggtagcgggtcaggtcatagccgacggtgccatcggttttgggctcaagttccagcactttcggcacgtcggtgttccacaggttgctctcgtcgaaaccggaatataccaccggccccacgtacgtccagtcgccgtccacatggtcggcggtcaacagcacgatcaccgagcggaactggtcgccgttcaccgacaggtacatgcaccacttgcccatggtctcgttccagatcacgtcgggcgcccacgtgttgccgagcaggtcgggattggaatcctgtttcggccatgcctgccaaatatcgccgagcagcgcgtacgggtcgcggctcagattgttatcgaaccgctcccaatgcaccatatccgtgctgcgcgcgcaccgacgatgcgtgccgaacagatagtagacaccgttttcctcgacgattgcgggatcgtgcacggccacccgaccgttggcgagcgtgtgctcgatgccgttgggcgaggcggccggtgccgcagatagtggttctgcagacgattgcactgcagcattcacggttgttgtgccgttttcactcacttctgcgacccccaaatgcacagattgtttgtgcccagagcgctgaaggtcatgactgccttgcgatccttgtctcgcggaagcttgtcgaacgcgccggaatacgtgacttcgccctcgtcgccggtgagcttaagcgtcatctggttggcgccttccacggcctcccaagtgcccgtctggtcgccggtcacggtgccgtcttccttcagggtgatgttgatgggcttgttcacgccgcgatagtcggtgctcgtcttgtcggtgaccttcttcgggcccttgaaatagctggacttgtcgtgcgtcaccatctcgtaatcgccggcgatgtcggcggtcttgtagcccttcttgtcggccttggtgcccgtgtattcgtacggtgcggccaccagccatccgtcggcggtcggcagcagctcgtgcacgcgcacctcatgcttttcgccggaaccggagaaacgggtatggtacacgaggtaagcggtgccgtcgtcgtcaacgaacgcggaattgtggccctgggagacctcgatgttcgcgttgtcgttgccgctccactggatcgagctcatcaggcgctcgccgatgtcgctttgccagttgttgccgatggccttggtggaaatcgcggtgttgccggcttcgtcaacgtacgggccggtgatgtccttggagcggaacatgcggatctggtagccaccggtctgctgcagcgcgccgtaggaggcgaatagataccagtagccgttgtcgtgcagcaggtaggagccttcgccggagttgccgaagccgccgccgagcttcacgccatagtaggcgtcggacttgttcgcttcggtggggtaggtggagttgtagtcgcgcaggccggtcgccgagtcgagcttgaacatccacatgccgccgaaccaggagccgaaggtcatccacatgtcgccgttgtcatcggttttcacgcacgggtcgatggcgttgatgccggtgtcggtctgcgaggtgtaacgggtgatgtcggcatcctcgccaagcacctgcggcacgtcggtcttcttcacgttcacgcgttcgaagccggaatagaccaccgggccaacgtacgtccaatcgccttcgatgtcgtcggcggtgagcaacacgatcacagaacggtagttcgcgccgttgatcgacatgtacatgcaccacttgcccatggtctcgttccagatcacgtccggtgcccacatgttgcctttgacgtcaggattggaggactgcttcgcccagccgtcccaaatgtctttgaagatcttctcgtagtcggtgctcagattgttggtgaaggtgctccagttgatcagatcgtcgcttttgagccaagcgcgatgcgagccgaaaatatagtattttccgttggctttgacgatggagggatcatgcgattcgccgcgcttgatgctggcggtgctggtttcggctttcgacgatgcggacgattgcttcgtcgaattgccggagcatccggcgagcgttccgaccagcatggctgcggcgatgatgcctgccgcgatctgctttgctgttatacggaatttcatttttccccttccttgcggatgacattgatttgtacaacgatgtaatttcttgtatagtgtacaacgttgtaaagaaaagtcgaatcataaggggtttctcgatgtcgagttcctatgaattgctgtgctacacgcgcgaagctaccggccgtgaaaaggcgaataatgaggacatcgcctatagcatgcaccttgcgttgcgtgccgatggggccgcccaatgggagccgctcaacgagaattacggtattttcttcgccgccggcgtgcctattcaggccgccaccgccgagtcgcgccgagcgtgcgtcgcggcggcgcatttcgtcgccgatccgttcgatggggcgcatccggccaccgatgccgtcgcatatggcgcggtgatgccggggatcgacatcacgttgaaatccctgaagaacccgtatctgttccgccttgcggatggccgattcgcgctcgccgccacccgtaccgcgcgcggcggcgagccggatggctccgagcgatcggcgttcctgttggccgtcagcgacgatctgacctccttcacgcagcttggactggtgatgctgcgtaccggcggtggcgtcaatcgtccgtctgtcgcattcgacgcggacgcctcccgttatgtgatttcctggacgtcgaacgacggcaaatcgtatgtcgcgaccgttgccgatattgtcgccgtggccgaatccggcgagccgatcgatattgcggaagctgtggtaacggcggaatcaagccgttcctgcgattgcaatattcccaatgccgttcctggcaacgtgattgccgtcactgaagaagaagcatcgaaactgatcgaacgattcggtcgtatttacaacgttgaaacatcggtggcgacgcagcatatcgacatggcggcaagcagggaagcggcccgtgaagccgtgcaggcactcaccaaggtccgcgccgatctcgtctacagcgacggttccggtgccacccgtgccgtggattggaacaaagacgaacttgaggcgattgcgcaggacgccgccgaaggcaagctccagccgggcgacacgcgcacggtgagcggccgcatccgccaaaccgtatacccggtgccatttgccgtggagcgtgcggacccgtcggtgttcgcttggaatttcaacggcaagccgatgttcatgttcatcgccaccgacgataccgacggcaactgcgtcgatccgaacgatggcgccacgcatatgccgttgcgcatcgccgactccatcgaagcgctttccgacgcggcgggcggccgtgccaaggaaatcgatctgctcaaatgcggtgattacaacgctgaaggacgcgccatgaccggctgcttctgggcgccggaactgcatgtcatcgatggaaaactgtcggtgctcttcatgccatgcttcgatgggccggccaccaatccagacggcacgcccaacgatcgcgcgggcaagccggacatgtggacgggcagctgccatatcatgcagctcaagcagcattccgacggcacggatttcgatccgcgcgaacccgaaaactggacggtgccgaagccgattctcacaccgaccggcggcgtgctcaatcccatccaacgtatctcgctcgacatgaccgtcatcagcgattccggccgctggtattacgcgtggcagcaggtcggcagcatttggatcgccagcttcgatccggcccgtccggaacggcttacctgcgagccgaagcaggtcgttgtgccggaattcgcgtgggacaatatgatcgccgaaggtccgaacgccatcgtgcatgatggcacgatctacctgatttattctggctcgctggtcggcattgactacaccaccggtctggtcaccgccccggccgggcaggacgccgatctgaccgatccgaacgtgtggacgaagctcgactatccgctgcagaaatccggagtatacaacgggcaatggcagctcggcaccggccatggcatgtggtccaacgacgaggacggcaatctcatctatgtatttcacaatgcggaatacgagaatggacggtatggcggccgcgacgcccaggtgcgccgcgtgcaccggtccaaggagggtatgccgatactggacatgcaggcggcggaagagctcaatccggactatgctgatataacgatgaaaatcgtggtttccggcaataaaggctgatttcgttggcttcagcgccgcaaggggcgaaagtcggtgttgggtccgaatgtatgagacgtttttggtgaaaaggggttgacatgccgaagcagaatggcgccaacggcgagcacgtggtgaccatgcgcgaggtcgcgaaggcggccggcgtatcgatcaaaacggtgtccaatgtggtcaacgactacgagttcgtgtcgcaggccacgcgagacaaggtcaacaaggccatcgacgagctcggctacacgctgaacgtgtccgcgcgcaatctgcgcagggggcggaccggcatcatcggcctcgccgttcccgatctgcagatgccgtacttcgcgcagctttcgtcgctggtcatcgaagaggccaagaagctgggcctgcgcgtgatcgtcgagccgacgcaatactcgcgcgaaggcgagattgaggcgttgcacggctcccagcagacgatgatcgacggcctgatctacagtccattggaacttgatcaggatgatgtcgaccaattggacgtggactatccgctggtgcttgtcggcgaacgcatcttcaccgacaaggtggaccatatcgccacggaaaacgtggaaggtgccaagcgcgccacgtcgtatctgctgcagaccggttgcaagcgcgtggccgtggtcggcgtgcatccgggcgagaagatcggctccgccgcgctgcgctatcagggctaccttgaggcgttggaggaggccggcgtcgaattcgacgagcgtttggtggtcgagtcgggcatgtggcatcgtagcgatggcgtgcgcgtgatgaacgcgctgcttgattccggcgtggttcccgacggcgtcgtcgcgctgaacgacatgctcgcctccggtgtgatgcatgcgatccagatgcacaatctgcgcattcccgaagatatttcggtgatcggtttcgataattccgacgattcgcagtatttgtctcctgcgttgacgtcgattgctcccggtcttgaggcggtggcgcgtctgtcggtgaaattgctgaaggatcgtatcgacggggtttcgccgtcgaaggatctcaggccggagcagaaggtgttccgcaaggtttcgtcgtcgttggtggtgcgtcagtccaccaagctgcccacgaattccttggtggtgtgatcttccttccttctttttcttcttcttttggaaggaaggaagtgactggtgcctcggcgcttgcgtccggttttttacggattgccggtgccgaggtttttgttttccctttctggcgagtgtctgttgccgggtactgcgattcgattcttccgaggagtcggatgcgagaaacacgcggtgcgttcctccgatttgttacaacgttgtaatagtgatatattcaacgttgtaaattactggaacagcggattgaaaaggaatagacatggctgtttacaacaatccgatcgtgcttcagcgcgcagatccttgggtcctcaaagttgacggcgagtactacttcactggctccgacccggaatacaactgcatcgccattcgtcacgcatcgaacatcaacgacctgcagaaagcccccgaaacggtggtgtggcgcaagcatgagtccggaccggcgagcatctatatctgggcgccggaactgcaccgcatcaatggcgcttggtacatctacttcgcaggcgctgcaacggatttcgaggcctccggcctaccgacccaccgcatgttcgtgctggagaacaccgatgacgaccccaccaccgacaactgggtggaaaagggtcagatcgtcaccccgatcgactctttcgcgcttgacgccaccaccgaggtgatcgacggcgtgcagtacctggtgtgggcccagaaagatccctccatcgaaggcaattccaacctgtacatcgccaagatggcaaacccgtggacgctggaaagcgagccggtcatgctcaccaagccggaatacgactgggaatgcatcgacttcctcgtcaacgaaggcccggccttcctgttccacgagaacaagatctacatcacgtattccgcctccggcaccggtgtgccgtatgccgtcggtctgctgaccgccgagcgcggcagcgacctgctgagcaaggattcctggaccaagagcccggtgccggtgttcaagacctgcgccgaaaacggccagtacggccccggccataactcgttcaccaagtccgaagacgattccgaagacctgatgatctatcactgccgcaactatacggaaatcaagggcgatccgctgttcgacccgaatcgtcatgcccgggtcggcgtggtcaagtggacggagtacggccccgacttcggtgtgccggaacccgacaatctgtggactccggacacgacggatgtgttgccggccgacggcggcgctcttgcgggaacgccggtagcgaactgacttgcgtaatcgtaagaaacgttgcgattccaacaaaaacgaataattgaagattataaagaaaacagcttttccatcggcgtgtttccgatttgtacaacgatggaaaaagctgtataatcaaaattacaacgttgcaaacggcagtgcagctgacgaagcgtgaacgacatcgcaaacaaggttgttgatgaatgtcactgcaacggttggaggaaatgtcttgggagaccaagaggaaaaggagaaatccatgaagatcaagaagagcaccaaggctctcgcggccgcggcctccctggctatgatggccaccgtcggcctgtccgcctgcggtggcagcagcaacgacgccaagacgaccgctgacggcaaggtcaagatcacgatgtggcacggcttctctgaggccgatggcaagactctcgagtccatcgtcaaagacttcaacaagtcccaggataagtacgagatcgatgctcagctgcagccgtggagcaccatcggcgagaccatggtgaccaaggtcacctccggcgacggcccggacttcgtgaccaccggcgccgacaacggccagggctggtccatcgacggcaccttccagtgcgtcaccgatttctatgacgacaaggacagcggcaccgatgagtacatcgagaacgtcgttgaccagatcaccttcaacatcgacggttccgaagagaagtgcggcgtcccgatgggctacgcaccgaccgccgtgtggtacaacaccgacatgtggaaggctgccggcctgaccgacgccgactacccgcagacctgggatgagctgctcgaagtcgctaagaagctcaccaagtccgatggctcccagtacggcatcgctctgccggatctcggctgggctccgttcctgaagggcaacggctccggcatctacaccaccgatggcaaggtctccatcaacaccaaggagaacaaggccttcctcgagaagatgcgtgacttctacaagggcggttactccgtgtctggcatggatgagaccgctgctcgtgaatccttcgaatccggccagtccgcaatggtgatcgtcggaccgtgggaggatcaggcctccaccgacaagggcatcaaccacgacctgttcccggttccgaacggcgacggcacctatgtatacccggacggcaccaagggctccaacaccggttccaccggtctgtactggtgggtcacctcccaggttggcgactccgctaagaagcagggcatctacgacttcttcaagttctacaacaaccacgacaaccaggtgacctggtccctcggttccgcctatccgccgaacaacaccaccgtcactgccgatgagctctccgagcgtccgctgatcgccaagatcggtgagaacaccagcaagtccttcatcggtatcgcaggcctcaagggcggcttcggtgacatcgccgcctccgtcgacaccctgacctccaacaccgcccgcaccgacgacgacatccagagcctgctggacgacgccgaatcccagatccagggctacctcgacgagtacaccgagtaagcgaagcgggattcacctacaatcaacaagtgagcggggctaacccgctcaccaccccagcaaaaggccacggtgctggccctcacgccagcgacgtggcctttgctgtcttaaaaaaacacatccctggtgtcattaaaggaggagataatggcacaagcaactgccgtcccaggatccgcgcattccgcggtggccaaggagaacaagaaggcgatccaggcccgtaacctgcgcaccggcctgctgttcaccgcaccggccctcatcgttctcgcaatcttcgttttctatccggcaatcaagacgttcatcacgtctctgacttccgaccgcatcaaccgcgccggcaagttcgtcgtcttcgacaactacgtcaagctgttccaaagcgccgacttctggaccgacgtcaagaacaccctcgtctacgcagtggcctacgctccgatcgttgtggtcgtcgcactcgcgttcgcactgctgctcaaccgcaaggacctcaagttcgtcggattcttccgtacctgcatgttcctgccgttcgtcatctccctgactgtcgccgccatcgcatggcagttcatcctctccccatcgctgggcttggttccgtactggattcagcagttgaccggcatcgcgcacgtcgatctgctcggtacccgtgaaaccgccatggctaccatcgtcttcatcaccgtgtggaagaacttcggctacttcatggtcatcttcctcgcaggtttgcagggcatctccgccgaactgtatgaggccgcctccctcgatggcgcctccgcatggcagaagttccgctacatcactcttccggcactgcgcccgaccttcaattacgtggtcatcttcggcctcatcggttccttccaggttttcgatcaggtcttcatcctgacctccggcggtccggcacgcgccaccgaaaccatcgtgtatcgcatctacaccgaagcattcggcaacggcaagctcggctacgcatccgcactgtcgtacgtgctgctgatcatgacgctcatcgtgggcctcatccagctatataccaacaacaagcatgagaaggaggaaatcgcatgagcaccgcgactctttccgcacaagagcaagagaatgcccgcatcaacgccgaaaacgagcgtcttcgcaagcaggcgacccgcaagcgccgcatcggcctgggcttcagctacttcgctttgatcctcatcaccatcctgatgatcttcccgctgctgattgtcgtgctggtgtcgttcaccccgaacgccatcacgcagacttggccgccaaagctcgtcccgaaccagttcacccttgagaactaccagtcgctgttcgaacgtctgccaatcggtcgagaaatgctcaataccgtcatcttcgccggtgccgtgaccatcatctccgtgttcttcgactccctggccgcctacggcctgtcccgcgtggatttcaagggccgtggcctgctgctcggcgtgctgatcgccaccatgatgatcccgggcatggccctgctcatcccggtgtacaagctgctcgccaacatgggcctcatcaacagctactggggcatcatcatcccgcgtatggccgacgtcggcggcatcttcctgctgcgccagttcttcatctccattccgaaggacctcgacaacgcggcccgcatcgacggcgcaggcgaattccgcatcttcgcgcagatcatcctgccgaacgccgtgccagcaatcctcaccgtgggcatgttcaacttcatgggcaactggaacgatctgctctggccgttgatcatgacctccaagccggagacccgcaccatcaccgcaggcctcgcaatgctgaccggccacggttcctccgtcaccccgtacggcgtggtgatggcaggcgccctgatctccgcactgccgctgctggtggtcttcttcttggtgcagaagcgcttcgtcgaaggcatcgccatgaccggcatgaagtaaagcccgacttcatccgatcgaaacgatccataactgaacatccataatcaaaccttgttttccttccttcgataactgcgctgttgagtgcgtagaacaaggccgtcggcgtggctcctccccacggtggcggccttgttctgtattctcgtaaaaaacgtttgtacacgtattcgatacacgtatgtagacgacgcaaaggagcgcgcatatgacttcgcatattctcgaacgggtccccctacagcaggtgaggctactgccaggagaacattttgacgcgcagcaggccggcgcgcggtacctgcttgatctcgacgtcgatcgcctgctatatcccttccgcagggaggcgggactgccgcagccgaccgatgccgacggcaatccggtaacgtcgtacccgaattgggaggaaacggggcttgacggccatatcgcagggcattatctgtcggcttgcgtcggattcgcgcaagtcgcagacgatccgcaaccgttcatcgaccgcgccgccaccgtggtgcggtcatggcatgaatgccagcagtcgtttgccggcgatgctgtgatgcgcgggtatgtgggtggtgtgcctgattctcgcaccgtgttcgggcgccttgccgcaggcgatgttgaatcgcagaatttctcgatgaacgacgcatgggtgcccatgtataacgttcacaaaacgttcgccggtttgttggatacatgggccgattttgcttctatcgatgaacagacttcgcagctggcacgtaccgtcgtgcttgatctggccgattggtggtgccgtatcgccgagccgctggacgacgagaccttcgacaggattctggtgagcgaattcggcggcatgtgcgaatcgttcgccgaactgtacgcgcgtaccggcgaggagcgctaccatgtgatggccgaccgcttcaaagaccacgccatcttcgacccgctggcgcaaggcgaggatgtgctcaccggcatgcacgccaacacgcagattcccaaagtgcttggatgggaacgtttgggcgcgatttgcaacgatgaacaggccgacgccgccactaacaccttctgggattccgtggtacatcaccgttccgtaagcatcggcgcgcattccgtgtccgagcatttccacccgacggacgatttttcatccatgatcgaatcgcgagaaggcccggaaacctgcaattcgtacaacatgtcgaaacttgcggaacgactgtggctgcgttccggcagcgccgactatatcaacttctacgagcgggtgctggaaaatcacctgctgtccaccatcaatccgaagcagccgggattcgtgtatttcacgccgatgcgatcgcagcattatcgtgcctattccacacctcaggaatgcttctggtgttgcgtcggttcgggattggagaatcacgcccgatatggacgattgatttacgcgctgcagcggccggctgcgcaggattcggctgattcggctgctgctggttttgccagttctgccgccgagacgggcaataccgtttcaaacaatgccgaggcggaagctacgcgcctgctggtcaatctgtacatcgattccaccttcgactgcccggagcagggtctgcgcatcacgcagcgcgccgctcgcattgaggatggcgtcgattacacggtgacgttcacattggaatccacggccgagcatgttcccgatactcccggtggtttgcgggaaaccacgctgtttctgcgccgtccgtggtgggcggagcattacggcgtcatggaggccacatgcgccgtctgcacgcttgatccggcacgcaccaacgatattcccgaaggatatctgccgttgcgtctgcgctggaacggcgttgcggaagtggtgatgcggttgcggccgcggatcaccgtcgagcgtatgccggacggttcgccttgggtcagtttcatgaaggggccgaaggtgatggcgctggcttcggatagcgacgatatggacggcgaattcgcggacgccggccgtatgagtcatattgccaccggtccgttgcgtccgctcgtatccatgccgatcatcaacggcaatccggtcaaggcgtgcgcgcaggtttccagaccgtacgtgcatggcctcaccgttgccgcgacggacgtttccggccgtaccatgctgttcgacatgcatgagttcagcagtatgcatggctgccggtattccgtgtatctgccggttgccgacgatggcaacgtgtgtgcgttgcgcgcgcaactggccgatatcgatgcgcgtcaggccgctagcgagcagaccgttgtcgacaccatcgcatgcggtcagcagcaatcggaagtcgatcatcggtattcgggcgataacgacatgatgggtgccgacggcacgttgcattggcgtcgcgcgttggctggtggcgaattccagtatgcgatgcgcgggcgtggtcaggcgcatcgtttggaaatcgaggtgattgccgattccgcggaaagcgacggtgaaaacgcggcgtatgaagtgacgctcgacggcctgccattgcagcgtggcgagcatcgtcgcatcgacggcgatcccacggcaatcgacgtgtatccgctgccggatgccatagaaactgcggaaaccgcggaaaatattgagaataccggagaaaacgacaatgctgacgacgctgcgatcgtacgcatctcggcttcggcgcatgacggcgcgaaaatcaccgccctacgattgcataagtaggattgcagcgatgaaaatcgcgatatggcagacgactgaccgtccgggggcgtctgccatggcgatccggtgattggaggatgctgatacgcattgtggcggcaacgatggtattcgttgccgccacaatgttttttgcggttgctttgccggttgccgttccggctggcgtcggttgccgtcaatgagtgggtgccttgcctgccgccgacggttgttgcgacggttattgggctccgttcgactggtcgtctccggagttgtcgccactgctgttgccgccgttgccgccgtccccggagttgtctccgccgttattgccgctgtctccgctgtctccgccgtctccggagttgccgccgtctccgttaccgccgctgttctgatcgctgttttgcgtaggatcgggtgtggtctgctcggtgttctcttcggccttcggcgtctcctgattctgccgtgtctcggtcttctgcgcgccggtgccccatgtgccgtccgggccgccgatcttgccgttgtcggtcggttcggtgaaggtcagcacctcctgattctgcaatgcgagcgacatgaactcctcgaacagatgcgacgggtagcccgtggaggaaacgccatagcctgcgaacgatggcacttcctgcgcgctgccgtcttccgcaggattccaaatggcccacacattgagcagctgcggcgtgtagcccacgaacgaagcggccttctcgtcgtttgcggtaccggacttaccggccacctgacgtccgagacgtgtcgaaacgccagccgcggtgccatacgtggtggtgccctgcatggccttctgcaccagatggcaatcgttcgcatcgaacacctgctggttctcctgagccgtcttgtacagctccttcgaaccgtcggacgtgagcaccgtgtcgacgatgtgcagcgtgttcttcacgccatcattcgcaatggtggagtggccttgcgccagatcccacacggtaatgccgttgatgcccagaatgttgtaggtggtgtcttcggcgatgtcttcctcaatgcccgcctgatgcgcgatcttggcgagattcgcggcgccgaggtgcttgttgacctccatgaacaccgtgttcaccgaattcgcggtcgcctgatagaggttgatatacccccagttggtgttcaacgcgttcggcacctgcgcggtggttcccggcgtcgtctcaaacgtcaggccggaattgccgttgaagatggtgttgaaattcacaccctcctgcgcggctcccagcaagccgaacggcttcatcgtggaacccggttcgaacgtggcctgcgtggcgttgttgagctgcttggtgaggtaatcgttgcccgcatacatggctttcacggaaccggtcttctgatcgaccgcaataccgcccacctgaatactttccggcatgccctccggtcgggtgtcgccgacctgctgaatctcgtcctgcatgtccttgtcgagcgtggtgacgatcttgtagccgccggtttccagatcatcggcggtgaacgccttggaattgaccagttcgttcttcaccgtggtcagcagatacccgttcgcgccggccatctggttgctctgctgtatttccgccacggcagggaactgcgcttccttcttctcctgggcggtgatgtagccgtcttccttcatgatgctgagcacgcggtcgtatcgcttttcggcctgttcctgattgacggccggatcccatgagctcggcgccggaatgataccggccaacatggcggcttccgacaaggtcagatcgctggcgttcttgttgaaatacgccttcgccgccgcctgaatgccatatgcgccacgaccaagataaatcgtgttcatgtaattgcatagcacctggctcttatcttgtgcctgcgcgatcttgatggccaggaacgcttctctcagcttgccggaatacgacgtggtttcgcccaaatagtagcgttccgcatactgttgggtgatggtcgaaccgccctgacggctgcctgtggtcagattcgtatacagcgctcgcgcgatgccatacagatcgatgcccttgttggtgtagaaggaacggtcttccgacgcgacgatggcattgcccacataatccggcaataccgcacagtcgatgatttcgcggttctgttccgcgtagctgccaatttccgtagtgccgtcggcatagtagacggtggttttttcggcgagggcgaacttttccggttcggggatttccgtggtgatatacatgtatgcgaacaggccgatacctgccgcgagcagcgctgcgaagatgccgagtacccacttcagcacgagatgcttgcgcttgttctgctttttctgaggtccgttggcgcggtgcgatccgtggttctgcggcttgggcgcgctatgggatgcgttgctgcgattgctgccggcgccgccgctgcgggcgcttcttgagcgtgagcttacgcttcgtgtgtgtgaaaccataggttccaccgtagctgattgacttgagaaatcaggtgaaaatggggtgagtttgcccttgggagggcattttttgcgcagctcttttacaaatcgacagtttgtgggtcgttgtctcaatatcggcttattttcagggttttatcagtttttcaggtgccttttcgctgtttcgcaggtatgcttgaaatttggtacctgtgaaacgcatatatgcatatatataacagaggagtcgtttacagatgagcattcgtgtagctatcgctggcgttggcaattgcgcttcttcgctggtgcagggcgttgaatactacaaagacacgaaggacgaggataagattcccggtctgatgcacaataatttcggcggatatcgcgtgcgcgacattgaattcgtcgccgcattcgatgtggacgcgctgaaggtcggcaaggatctgtctgaagccatcgaagcgtcgcagaacaacacgatcaaattcgccgacgtgccgaatctgggcgtcgaagtgctgcgcggcccgaccaacgatggtctgggtgaatactatcgccagatgatcgaagagtccgacgccgagccggtcgacgtggcccaagtgctgcgcgacaagaaggtcgacgtgctcgtttcctacctgccggtcggttccgagcaggccgacaaggcatacgcccaggccgccatggacgccgggtgcgcgttcgtgaactgcctgccggtgttcatcgcatccgatccggaatgggctcagaagttccgtgacgccggtgtgccgatcgtcggcgacgatatcaagtcccaggtcggcgccaccatcacgcaccgcgtgctcgcccgtctgttcgaggatcgtggcgtgcgtctggaccgcacgtaccagctcaacgtgggcggcaacatggacttcatgaacatgctgcagcgctcgcgcctggaatccaagaagatttccaagacccgcgccgtcacttccgtggtgccgcacgatatggatccgcataacgtgcatatcggtccgtccgattacgtggcatggcttgacgaccgcaagttcgcgttcgtgcgtcttgaaggcactacgttcggcgatgtgccgctgagcttggaatacaagctgcaggtgtgggattccccgaattccgccggtattgtgatcgatgccgtgcgtgccgccaagatcgcgctcgaccgtcatctggccggcccgattctggctccgagctcctatttcatgaagtcgccggccgtgcagcacgaggatggcgaggcccgccgcttggtggaggagttcatcaagggcgaggtcgaaggcagcgaagagcagcttgacgccgatgtcgccgccgccaaggcagctggcaaggatgtgtggcgcgcctgatttttagttcgcctgatatgaggaatccccaatctaccgtcggtggattggggatttttaattacgatttggaaacgatgcgtattgtcacttcttgagaaggggttcgacctgttcctcgtacgcggtcaacgcggtatcgatcacattgtgcatgtcgtagtacttgtacgtgcccaaacggccgccgaacaccgtcttcggctcggccttcgcgagctcctcgtacctcgcgtacagcgccttgtcggcctcggtgttgatcggatagtacggctcgtcgccacgctcggcgaaacggctgtactcctcccataccacggtcctgtcgggattctgcgaggcggcgcgctccggattgaagttcttgaactcgatcgcgcgcgtgtacggcacgtccgcgtcggagaagttcatcaccgggcagccgaaatggtcgccctcgtcgtaacgcacctccttgaagtcgaccgtgcgccacttgagctcgcccagcgagtagtcgaagtagcggtccaccgggcccgtgtacaccaccggtacgccggccgcggccaaagccgccttgttgtacggctgggacccgtcgaagaaatcggtctccagggtcacatggatgcgcggatcgtcgatcatgcgctccatccacgcggtgtagccgtcggccggcaggccctcccacgtgtccttgaaatagcggttgtcgtagttgaagcgcaccggcaggcggttgatgatgcccgctggcaggtccttcggatcggtctgccactgcttgcccgtgtagttcttgatgaacgcctcgtacagggggcggccgatcagcgaaatgcccttgtcgttgaggttctggggatccttgcccgccagctcgccggcctgctcggccacgagcgccttggcttcggcgggcgtgtagtgcgcgcggaagaactggttgatggtgcccaggttgatcggcagggggtagacctcgccgtcgtgcgtggcgtacacgcggtgcacgtagttcgtgaacgaggtgaacctgttcacgtagtcccacacgcgcttgttggacgtgtggaacaggtgggcgccgtacttgtggatctccgcgccggtctcctcgtccatgtagctgtacgcgttgccgccgatgtggtcgcgcacgtcgatgatctccacgcgcacgccgagcctctccacggcctgctgggccacggtcaggccgaacaggcccgcgcccacgaccaccagatcgggatattccaccgcttcagtcataagaacaaccttccgaacttaaaacaaacacacaatattcgtgtgcgattcctcatcaagcatacccgtccgccctccttaacgcgggatgctcatggggaagcggcattttgacgtttgatttccctgtgtcgctggtcgtggggctggctgcttcacggatcatggcatggtctgtgtggttcgtgcgcggcctgtggcgcgggttgcgctgcggttcgtgcggcttgcggcgcggttcggtccgggcatggtgtacactggtctttgcctccgcgtggcggtacgtcacccaactcccccagggcaggaatgcagcaagggtaagtggcctcttccgggtgcgtggaggttttcttatatcttcatgccattcgcgcataccgtagagccaatgccgtattctcgatgattatgaccgacgaattcaagccaatcatccgagacccgcacaagtccgcgaatatgctggaacagccggtcgcgcccgttcccgtgccgcagccgccgtctgatccgatcgaacaggtgctttccccacgtgaagtgagcgaagggcttgccaaagccgatccgctgacccgtcatccgcgcgcgtcgagcattatgctcagcgtggtgttcggtctgctgctgcttgccgccgcggtgggcgtctggtggttgggcgtgcgcacgatggaaggccaaagctatgaagacatggtctggtcgaaattcgatgcggccctgccgggatggctggaaccggtcgtgcatgttttcaccatttccaccgttgtaatcgcaacaagcgcgattatgtcgataatcgccctcgccgtacttatcgtaagaaaacgatggctgttgattgctcaactggcggtattcggcggaatctgctttgccgcagcagagttgctgaagccgctgctgccacgtccgtacttaatcaatctggaatcaaatcccaataattccgcgccttccgggcatgtcatactcgccgccgcggcaggaatgatcctactatgcgccgtgcctcgcgtatgccgtgcgctcgttgccgtgatcggctggctgtatgcggtactcgtcggattgtcggtgattgcgggacagtggcaccggccgaccgacgtgatcatggcgttgctgatcgtcggcggagtggcaatgatcacgcttgccgcgacgtttgcgaacggcatggatgagcccggttcgcgtgcgtcgtcgccttccgtgcagatcgtcggcagcgtgctgttgacgttcggcgtgctcggcaccctgtatggcgcatacattatttggcagattcagccgggacttgcgatgagtgcggaatggacgaattccggtgcgcacttttccacggtgattctgacggcttccgttgcgtcgttggtgttcgggctggtgttgaccatgcgtcagctgaccgcctcgccattgacgaaacttgggcttgtcggcgcacctccggcccctccgaaacgctgacggcaaaacgtacgatcacgccgaaaatttccggcaccggtcgctcgcgccacacggacggtttgccaactgcatacggtcagtgagtattattgcgttgcaaacgctagtaataaggagtggctatggctaccggcagcaagctcgtgattgtggagtctcccaccaaggccaagaaaatcggtgggtatttgggctccgaatatacggtgatggcctcggtcggccatattcgagatcttgcgcagccgagccaggtgccggccgccgacaaaaccaaattcggcaagttcggcgttgacgtggaagacggattcaagccgtactacatcgtcgacggcaacaagaagaaaaccgtgtccgagctgaaaagcgcgttgaaaaaagccgacaccctgtacctcgcaaccgatgaggatcgcgagggagaggccatcgcctggcatctggtacagacgctcaagccgaaagtgccggttaagcgcatggtgttccacgaaatcacgaaggaagccatcaaagcgtcgcttgacaatactcgcgacgttgacgacgacatggtcgacgcccaggaaacccgccgtattctggaccgcctgtacggctatgagctttctccggtgctgtggcgcaaggttgggccgggtctttccgcgggccgtgtgcagtccgtcgccacgcgtttgatcgtggagcgcgagcgcgagcgtatggcgttcgtgcgtgccccgtattgggatgtcaccgcaacgttggaagcgccggatgccgatggcaataatgttgcgttcgattctcgtatggtgtcgttgggtggccgtcgtttggctggttccaaggatttcggcgccgatggcaagctgactgcggccggtgcgaaggatcaggtcgtgcagttggacgaggcgcaggcttccgcgattgcgcaggcattggaatttgcaacgtttactgtcgcgtcgatggaaaccaagccgtaccgtcgccgtccggttccaccgtttaccacgtccaccttgcagcagaccgccggcaatcgtctcggcatgagctcgcgtcagaccatgcgtgcggcgcaaggattgtacgaaaacggctatatcacctacatgcgtaccgattcggtgacgctgtcgcaagaggcgatagcagccgcacgcgaagcggtcgtcaagcatttcggcgaaaactatctgtcggacgcgccgaaacaatatgccacaaagacggcaggcgcgcaggaagcccacgaatgcatcaggccggcgggcgcgaaattccgtgaccctgcggaaatcgcaagcaaagtgccggtcgaccagctcaaactgtacacgctgatctggcagcgcacgcttgcctgccagatggcagacgcaaccggttccacggcaaccgtgcgactgtccgcgtcgaccgaatcgaatggggaagccatgttccaggcttccggcactgtcatcgaattccccggctttatgaaggcgaccggtgaaggccgccgcgcatccgccgaatcgaagaagggcgatgctgctggaagcgttgaacaggctgcgcaatccggtaaatccagcaaagcggataagaagtcggatgacaatgtgtcgcttccgccgatgaatccgggcgatgcgctcgccgcggtggcggttggtgccgacggacacgaaactcagcctccggcgcgttacaccgaagcgtcgctcgtgaaaacgttggaacagaaggaaatcggccgcccgtccacgtatgcgagcattatttccacgatcatcgatcgcgggtacgtgtatgagcgcggtcgtgcgttgattccgtcgtggctcgcgttctccgtggtcaaattgctggaaacgaagttcccgcggtatgtggattacgagttcactgccgatatggaaagcggtcttgaccagatcgcgagcggtcaggagaccggcaggaattggctgacccgcttctatttcggttccggtgagggcgccgcgcagtctgcggacgaggcgcatgccggtttgcagcagcaggtcgcgcagttgggtgaaatcgacgctcgcgagatcaatacgatcgagatcggcgacggtttgcatgtgcgcgtcggtcgatatggcccgtatttggaggatatgaaccatctggatgatgagggcaatccgaagcgtgcctcgctgccggatacgctcgctccggatgagctgacggtggaagtcggtcatgatttgatcgagaaccattccggcggtccgcgcgctcttggcgtcgatccggtttccggaggcaccgttgaagtgcgtaatggtcgtttcgggccgtatgttgcgctggtgatgccttctgccgatgccggcgatgctggtgatgctgccggtggcgctagtgagaagccgaagcgcggcaagggtgcgaagaaagccgctgccgatcgcccgaagatggcgtcgttgttcaagacgatgagtccggaatcgttgacgttggatgatgcgttgcgtctgctgagcttgccgcgtgaagtcggttcgtatgaagaggtggatgcgcagaccggtgaagtgcagacggttaccgtgcaggccaataatggtcgttacggtccgtatttgacgaagaccggtgccgatggcaagtcggatacgcgttcgcttgcttcggaagatgagattttcacggttgatgtggataaggcgaaggaactgttcgcccagccgaagtatggccgtgggcgtggccgtggtgctgcgaagccgccgctgcgcgaattgggcgtcgatccggaaacgcagaagcaggtgaccatcaaggaaggcttctacggcgcgtatatcaccgatggtgagacgaatcgtacgttgccgaagcagtatgctcctgagtcgatcgaaccggccgaggcgttccgtttgctggctgagaagcgtgcgcagggcccgtcgaaaaggcgtggacgtaagaccgccgccggcaagggcggggctaagaaggctggtgctgccaaggcttctaagacttccaaggcggcttccgtcgataaggctcgtgccgatcgccgtgccaaggtgcgcgagttggccgataagggttgggccaacacccgtatcgccaaggagatcggttccacgccgaccacggtgaaggccgatgtggaatggcttgccgccaacgaaggctacacccgtcccgccgtagttcccgcccggtgatgaacagtccggtggactgttcgtagcagtgagcagcggtagcgttgcgaacgccgcaatgtagagtgatgaatatgcaaggcatattcatctcctttgaaggtgtagacggcgtcggcaaaaccacgcaggttgaacggttgcgtgcgtacgttgaggcgcaggggcgcgaatgcgtggtcacgcgcgagccaggcggtactgtgcttggcgtggcgattcgcgagttgctgcttggcggcgtggaaggttccgatgcggatatcgctccgcgtgcggaggcgctgctgttcgccgctgaccgtgcccagcatgttgccgaggtgattcgccctgcactggaacgcggtgccgtggtaattaccgatcggtaccttgattcttctcttgcataccaggctggcggccgcgaattgacggcaggtgaaatccgcgacttaagtatgtgggcaacgtgtgagctattgccgaatcgcacgtatctgctggatcttgaccctgtgcaatcgcatgcacgactgcagcatgatgaagatcgcatggagtctgcaggaaacgatttccaacgtcgtacgcgacaggcgtttcttgacttggcaaaggcggaatcgcaacgcttccgcgtgattgatgccagccaatccatcgatgaagtatgggcgcatattcagaacgattttgcgcaaatcagtcaaatgaaaactttccaatcggaggccgccctgtgagcgtgtgggattcgattgtcggccagcagcgggttgtcgaacaactcaaagccatcgcaagtggcgatccgaaagccattgcgcaatcctggttaatttgcggtcctccgggatcgggtcgttccaatgtggcgcgcgcgtttgctgcggcgttggagagccccgatcatggtcttggcgacgagccgaccaaagccgcgcagcaggtgcttgccggcactcaccccgacgtgaccgtgctggccaccaacaaagtgaccatcggcatcgacgaggtgcgaaacatcatcactacgtccgagcagatgccaagcactgcgccgtggcgcatcatcattatcgaagatgtcgatcgcatgctggaacgcaccaccaacgtgttgctcaaggagattgaggagccgagtgagcatacgatttggctcttgtgtgcgccgagtgcgcaggacgtgttgccgacgattcgctcgcgcactcgcatcgtcaatcttgccgtgccctccacgcaggcggtggctgcatttctggagcaaaatggcggattcgagccgaaaatcgcggcgcgtgccgcacgtcttgcggaagggcatatcggcatcgccaatctgtatgcgaaaaacgagcaggtcatgtctgaccgcgacgagctgatcgtgggcgtgctgggattgcgccgcgcgtcggatgcggtactgcttgccggcaatcttatcgacagtgcgaaagcgcaggccgaagcggaggtgaaggtcaaggcggcggaagcggaagctgattttcgtagggtcaatgggcttggtgcgaaggatcgtattcctcccaaactgcgtggcgcgtacaatgcgatcgcaaaaaaagacgagctgaagcgacagaccacacgattgacgcgcgatgtgctcgaccgtgcgttgaattcgatcgccagtgtataccgcgatgtggccgtgctgcagaacaatgccgaagattcggttggcttgattaatttggagaatcgttcgtcgattaccgatctgtcggtacgtcttacgcgcgggggagcggtgcggcggctggaggatattgccgttgcgcgtcgccgtctggccggcaatggcaatcccgtactggtctttgaagctctcttctgctccctcatcgccagctagggctagcggcgttggcacatactgttttccgagggcagattcttccagcgggtggggaaatggttgtttggctgtatgattctggcttgctatcgtgcgataactgccggcaaaattgcaaaaattgcgatttagcgctggcagttggtggattcgcggacgatgagttgcggcgcgagtgagatgtgcgcggggctgccgggggcgtcgttgagtaggcgtagcgcttcggagacgatttgtttgaacggcgggcgcacgctggtcagcgccggcatggtggtgcgtgcgatcggcgaatcgttgtagccgatcaccagcacgtcttgaggcacgcgaagcccgagcgaatgcaacgccaccatcacaccgaacgcgatcgcatcgtcggcgcacaccactgcctccggctgtacgagtggttcggagaacagtcgcatggcgcagtcgaaaccgcgttgcacgctacgatcgccgaacttgttccattcggcttcggtgttcaagtggtgcgcgcgcacctgcgtgtggaacatggcgaacagttccgccgattcgaaggagatttccttgccggccatgtatgccacggatgcgatgccacgttcggccaaatgcctgatcacgatttccatggcggcgttttcgtcgatgctcaccatggatgtgcgggatgagcatcgacggccgcccacctgcacaatcggcaatgtggaggcgtaatgttcaagttcctcggaaaggtaggctccccaggcgggcagtacgatcagcccgtcaacatggcggtccaccaacgattcgatgcgttggatctgcgtggcctgatcgccgccgatgccgagcagcagttgctgcgaatccacgtcgatgacgggttcgatttcgtcaagcagttgcgcgcagaacgggtcggtggcggttggaatcaccagtccgatggtgttggtgacggtgctgcgcaatgcgctcgccgcataattgaccgaatagttgaggtgtgccgcggcggctctcacacgtcgtgcgatgtcgtcgtctttggtgcgttttccggaaagcacgcgggagacggtggcgatggagacgttggccagcgcggcgacgttcgtgattgaactgttcgccgaagtagccgaagccgaggcgttgtcggttgtgcgtgccatgctctcctcccaaaatcattcgaagtattggattattcgaattgctgccgtgtctcaatcgcgtattcaggaataaaacagccacccgtcgaatgcggcaggtggctgaagcaagtatcgcaatcatgcatatggaattgcgatcgcattgcgatttcgtaactgaagattgttgaatatcttgcgaaatcctcgaaaatcttcagaaaagaagatcactcggcgttgacgaggatgttcagcaggttgtctgccacggtttcgtcgtcggcgccctgcacgtcgatgaccacggaatcgccctgcttgatgcccaggcccatgatggacaggatggagcctgccggaaccgggttgccgccttccttggcgatggtgacggtgcagccggaggcggtgacggcctgggagaactgtgcggccggacgagcgtggataccgacgggatcgttgatgacggtggtgcgggttgccatgatggacactcctttgagtcgttattgttgattgttttctgttgtgttatttgaaagtcgtgctgcttgccgagcgaaatgcatcggtgcgccgctggtgattactatagcactttttccacgaaacgcagaaaacgtttactggttgtgtgttgcggtttaaagcgtgtatactgtgggcaggctgaaaatgatttaccggcaaagacggtggaaatcattgcggtaactcaacgcgcaaggcaggcgcggaaatcacaagaacacgttcggctcgcgttcctttcgcgagcaaacaacaaacgcaaacgacaaaacaaggaaacaggtcaaaggagttcacatgatcatcaagggtgttggcattggtcgcggcgttgcagtcggcccggtcatccgtatggcgcagccgctgccggaaccgtcggacgccccgcgtgcggaaggcattgccgccgaaagcgaaatcgcccgcgtggaaaagtccctcgcactggtgaacgccgacctgaaccgtcgcgccgaagaggccgccaatggtgacgaaggcgccaagcaggccgctccgattctgcaggccatcgccatgttcgcttccgatccgtcgctggccgaatccatcaaggggctgatccagcagggcaagaccgccgaacgcgcggtgctcgaaggcttcgccgcggtggaagacatgttccgcgccatcggtggatatcaggccgagcgtgccgccgatctgcatgatgtcggccagcgcgtgatcgccgaccttatgggcgctcccgcaccgggcctgccgcagagcgaaaccccgttcgtgctcgttgccgaagatctttcccccgccgacaccgcggcgctcgacatgagcaagaccctcgccatcgtcacctcgcagggcggcccgacctcgcacaccgccatcctggcccgtgcccgcggcatcgtggcggttgtttccgcagccgaagccgagaatctgaccgacggcaccaccgtggtcgtcaatgcggccaagggcgaactggtcgtcgacccgaccgaagaggagatcgccgcagccgaagccgccaagtcccgcgcggccgcagccaaggaactgcgcggcaatccgggctccaccaaggacggccacctcattccgctgctcgccaacgtgggcaagccggccgacgcagctaaggcgctggaatatggcgctgaaggcgttggtctgttccgtactgaattcctgttcatcggcaactccgagccgccgaccgtcgaagagcagacccgcgcttacaccgagctgttgagccagttcccgggcaagaaggtcgtgattcgtatgctcgatgccggcgctgacaagccgctgccgttcctcactccggaagacgagccgaatccggctctcggcctgcgcggtctgcgcaccctgcgcgcccacatggacgtgctcgaaggccagctcaaggcgctcgccgcagccgatgccgccaccgacgcgaacctgtgggtcatggccccgatggttgccgaccagcatgaggctgactatttcgtgaagcttggcaagagcttcggtctgaagttcgtgggtgcgatggctgaggtgccgtcgatcgcgcttatggccgataaggtggccgacgtggccgacttcgtgtcgatcggcaccaacgatctgacccagtacacgctggccgccgaccgtacgctcggttccgttgccaactatcagaccgcctggcatccggcggtgctgcgtgccatcaagatgatctgcgacgcgggcaacgccaagggcatgccggtgggcgtgtgcggcgaggccgctgccgatccggacttggccgtagtgctggccggtcttggcgtgaactccctgtccatgactccggtggcactcgacgacgtgcgtgcctcccttgccgaagttaccttcgaagaggctcaggcccgtgccgaagccgccctcaacggcgacttctaccacccggccaactgagccgtactagctgtgcctatcgcctgtaacgccttgtttttcaagcgatgtgaggtctgataggccctgtttcccggaccgacccctgcccgcgtgccccacaggctcgccgcaggggtcgtttcgttatgtttcgttatgccgtcaattgaaaccttgtatgagtcagacgcttgagggatactgggtgcatgaagatttccgcagatttcaccgtcattcccgacgcgtttgccaaggcggcgccgcctgagaactgcatcgacggtacgccgattgtttccttccccttctacattgatgcgcttgatcctgcagtgcagttcctgcattgggaattcgttgatccggattcaattccggtatgcggtttccagtggaatcattggtccctcgcgaacctgcccgtggatgcgctgatgtacgatttcaacgattctcacgcgctcgcgattccggctgatttctcgcgcacggtttccgcgatgattcctgaaacggttcagggacgcacgtccgccgcctcgccgttgctgcagggccgcagcagtgatcccgcagtgacgatgcgttacaacggtccatatccgccagatcaggatcatgactactatctgcatgtgtggggtaccacggctccgctcgccggcctcaatcagggattctggctcaacgaaatggaacgtgcgctgcgtacttccggtacaatcgttgatcagggcgctattttcctcactggaaaagcctgatttgtgaaagaggatctcaagtaaggccagaaatttgatttccgcagcaatataacgatataaagatgcggaaatcagaaatatatccgacgaaaacgtattgacaataatcgaaaggattgctgaataattatggcgtgcaccacgattttggttggcaaagacgcaagttatgacggatcgaccatcatcgcccgtaatgaagatagtgcaaatggtgagttttgcccgaagcgcttcatcgtagtcaagcctgaagatcagccgcgcaagtacaagagcgtgctttcgcatgttgaaatcgatcttcctgacaatccgctgcagtatacggctgtgccgaatgccgatctgaaggaaggcatttggggcgaagctggcgtgaacgaagcgaacgttgccatgagcgccaccgaaacgctcaccaccaatgagcgtgtgctcggtgccgatccgttcgtggaactcacgccggccaaaggcaaggaaggcgaagagggctatgagccggaagtcgccggtggcattggcgaagaggatttccttactctcgtgctgccgtacgtcaccaccgcccgtgagggtgtggaacgtttgggcgctctgcttgaggagtatggcacgtatgagatgaacggcgttgctttctccgacgtcgacgagatctggtggctggaaaccgttggcggccatcattggatcgccaagcgtgtgccggacgaagcgtatgtgaccatgccgaaccagctgggcattgacgaatttgatcttgaagatgcgtttggcgagcaggagggccacatgtgctccgccgatctggccgagttcatcgaacgcaaccatcttgacctgtcggtggagaattccactccgttcaacccgcgtgacgcgttcggctcccactccgattccgaccacgtgtacaacactccgcgtgcctggtacatgcagcgtttccttaacccgtacgacgagcagtgggatggtcaggatgccgaccacaagccggtttccgacgatattccgtgggctcgccagccggaacgcaaaatcaccatcgaagatgtgaagtatgtgctgagctcccactatcagggcactccgtacgatccgtatggaaagcttggcgaccagcgcacccgccacatgttccgcccgatcggcatcaaccgtcagagccagcttgcggtgatgcagatccgcccgtaccgcccgcaggtgagccgtgcgatccagtggatcgcctatggttccaatccgttcaacacgctcgtgccgttcttcccgaacgtcaactccacgccgaagtatttggaagacaccaccacgcgcgtcacgtccgaaaacttctattgggagaaccgcatcatcgcggccctgtgcgattccagcttcgccgacaccgccaacgccgtggaacgctatcaggagaagaccggcgcgatgggccaccgcatggttgcctctaccgacgagcagatcgaacgtttggtgggtgacgtgaccgacgaattcgatgcggaagacgaaatcggcgatgttcagcctatggaaccggatgcaatcatcgaagccgtgcgcaacggcgaagcccgtgaaatccttgccgcagccaacgagaccatggccgcgcagctcaaggaggaaaccgacaagcttcttgattccgtgctgtacaccgccagcatgaacatgaagaacggcttccacatgtcggacttctaaaatctcactattcggctctcgtgaccacgttgcgggagccaattactttccgcaatacaacatcgttagaatggcgtgcattccaatttgaagaaaggaaccccagtgaccagcattgaggatttcaccagccagtacggcttggtgcagaagattgatgcgttcggctatctcgattatttgaagaatgatccggatgctccacgcaagcatggcaaggtcgtgctcgtcaccgccgatactccgctgaaggcgtctcgcggcgagggcaagaccaccaccacgatcgcgctgatcgacgcgttgcgtgagcgtggcattgatgcggccgcagtgctccgtcagccgagcatgggcattaccgctgccggttccaagggcggcgcttcgggcggcggcaaggcttccctgacccaccctgagctgatcgactggggtctgtgcggcgaaatgggcgctatcgaagcggcccagaacctgctggtttccttcgctgagaaggccatcgacgacggcaagctcgacgatatcgccgtgccgcgcgtttccgaagtgccgtcccgttcgctgcgtcagatcgcggtggaccgcggcaagggcaatgtggccgagcgtgtggtgctcactccgacctgcgagctcatgcagatcgtggtgctctcccgttccatggatgagatcgccgagcgcgttgccaagatgattgccggcacgaaggacggcaaggccgttacgttcggtgaattcgttgatttgtggcgcattaccggcattctttccgatgcggtgaagccggcgaagacggaaacggtgaatggttctcccgtgtatgtgcacggcggtccgttcgcgaacgtgtcgatcggcattccgacgctggtttccgtggaaatggcgtgcgccctgcatgatgtggtgatcgtcgaggccggttacggtgctgacgcgggcgctcagaagtggcttgacattgcttgccgcgagtatggcgcacagtggccgtccgccgcgattgtggtgacccgcgcttccacctggcgtgacgatccggcgcttgcctggcgttacccgttccacgtgcagcgtttggaaggtcttgatattcctacgttcccgctgattaacctgtgggatggcgaagacgatcaaattccggcgttgcagcagaccgccagggatctggagttccgcgagccgattatcggcaacctgtatcgcgatggcggcgatgcgctcgccccgcagcttgacgcgttcgttgacgcggtggtgaatggttccatgccggccacgccgcacagccacaagggtatggctctggtggagaacgtgcgttgggttgccgaaaacgcgtacggtgtgccggcagatcgcgtgatcctgaaggacggttttgctgaatcgcttaataaggcggtggacctgtgcgccagcgccggtattgatttcggttcgcttgcactggttgcggtgaagtctccggccacgatgactgacaacgattccgctccggctgaagagcgtacggtgacgttgaagaaggttgaagtgcattccggcgccggtttggtgcatgtgaatctcaccgtttcgctgaccacgccgatgccgaagatcgtgtgataaacgagtcgtagcgttctgatcgcaacattttagggcggtcacttgcgtatatgcgtaggtgaccgcctttttgcaccttaatttcggcggtttctagcgaacgtcgcaacgccatgacctcgaaggaacggtagaaacttcgtcagaagttgccgccccgaaccgtgaagcgggaaacacggtgtgtttccccgtaggtgaggtgagaggttcgcaatatgggcgaacctcgaaggaacggtggaaacttcgtcagaagttgccgccgttccagccccagtcggtggtggcggtgtagcggatgtacgtgcggtcggccggaatgcccagttccttctccaatgcggccatgatctgctcggtcagcttctcccaagcggaaccgggcacggaacggccgaacacgttcacttcgacgtatgcggccggcttggaatcgtcaccgccgaaataaatcggcatattgtcttcaaacgggcacatcagccagccttcggacttgccgggaacggcggtgatcgccttgccgtatgcggacttcagcgcctcgcgctgctcgggagtggtggaaacggaaacatgagtgtggatgactggcatgatgctctccttggattgttggaatcagcctttgcgtgttcatctccagtctaggcgtcaaacggctcagacggggtggctgtgtgagaaattttgggctttgtctggatatccgccaaggtggtctgcgtgcgcgtgttaaatattcgttgtgagaaaactgattgaacagcttatgaaatttggcctcgttggcgtgatcgccttcattatcgactggggcattctgaatcttctcgtcggcgtgttccatatgcacaacgtgctcgccgcaaccatctcgttcattatttccctgattttcaactacattgccagcatgaaactggtgttcaagcaccgtgacgacatggcccgttggatggaaatcctcattttcgtggtcggcgcggtcatcggcctgttcatgaacgacgccattatctggatctccacgtatggcatgaaccatgatgcctacgtgtcgcagagcaccgaatacctgatccgcaccaacgtcggcaagctcatcgccaccgccgtggtgatggtgtggaatttcctgacgcgcaagtggctgctcgacgatacgcacaccaacgccatgaaccgtttgcgcaaagccgacaaccgcctcacgccggaagagctggaagccaagtggcagaacagcttctcgcacaggctcggtgtatggtcgctggagcacacccccaacggttggcccaagtagtcctgaattcggaaaatctgcctgcacaacccggaaatctgccctgataaatctgccctgattcccgactcgcgcagacggccggacagtcctgaatatgaaaaggcggtgcttacacctataaaggtataagcaccgccttttcgtatgctctgcatgctttacgtgcgaaaggtcacacgcttacggtggtaagcatgggctgctcggtggagtccttgatctgcttgaagccgaacagggcgatcgccagcgaggtgagcgccagagccgtcactacaatgaaaccaccgtgtgatcccatacggtcgatgaactggccggcaatcgccgagccgacggaaccgccgattgagttcatcgcacccatccaggccatgccttcggtgaagcgtgtgggcggcaccaagtgcagcatcagctggttgccgttcacccacgtcggtgcctggcatacgccgatgaacaggtagatgatcatgatcacccacagatgtttggcgaacatgaacgagccgatgcccagatcgaccacggcaaggcagaagtagaaacgcttccacagcggaatagtccaattctttgcgccatacacgagcgcgccgatcagcgagctgaacgagaagcaggcgaacacgaaaccggtgtactgcttcatattcgcttccgtggcgaacgcgacgatcgaaatgctggcggccgactggaacgcgcccaaaccgaaccacgtcacgcatacggcgattaggcccggcccccaaatcgattccttgcgcccggcattcacatcggcggcggcctgatccatggcggcctgcacttccgcagccgttttgccttcggaacgtgcgcgatcgcgagcgtactcaatggccgcttccgcctgcaacgccttggaacgggcggcttcgcgctcacggtattccttgcgggtcatgcccgcttcgcgagccagctgcgtctgcgatttcggctcggtggaaagttcggtgaggaacatgagcgcaccgaccaccacacacacgccagtgaatgagaatgccaacagcccggaaatcacggccagtgtggaggcgagcggattgccgatcacccacatgcattcgtcgaacacgccggaaagcgaaagcgcgcggttggttttctccgtgtcacctttaagcagcgtggtccaacgctgacggctcatcgcgccccacggcggaatcgccgccatgaacggtacgatacagaacagaatccacgacggcactcgggcggtgatgcaggaaaccagtgcggtcgccgcaatcatccacacgatgattgtcggaatcgacacctgacgctggccgaacttgtcaaccagcttgccgagcaccgggctcgcaacggccagcgcgatcgcctgcacggccgtcagcgcgcctgccagcgaataattgccgtaataatgctgcacggaaatcgtaatcgtcatgccgaccatcgggaacggcatgcatgcgatcactgaaccgaccgaaaatcgggcggtgtgcggtatgcgaagaagctccgcgtaccctccgaaaagatgttggccgatgcttttggcgccggcgaggactgaattggtcatgttttgccgctcctttctgctcacggttggtgcttgcgtccgctgcgttgcgttgccgcggaccgcttgacatacccttgttctgtcttgattgttttctctccagccccagtctctcacttcaaccttgcttgaacgtcaatcgattgacgttcaagcgtgttgcatagggggtggagattggttgtgtgccattttcttgaactagacaactttatgcggaggtactgtcgcaacacgcggtgcattgaggttggcagacataattcgattggctattttgtaagtactcaccacacgttcacttggtggacgaaaagatgtccggcgggcgaaagacggttgttgcaaaatggttgcgcaacgcttccacagcttgcgattgcaggattttcgttccatcggtcaacgtcagcagtccggcagcatcttgcggaaaggcggtagggatgcccgcaacaaccatccatttcgtacgtcacggcaaagtcgaaaatccagggcatttgctctacgaacgactgcccggattccacctgtcggaagtgggtgtgcgcatggcgcaggcgaccgcgcactacattgccgtcaatccacgactcaacacagtttccgccatctactcgtcgccgctggaacgcacgcgcgaaacggccggcgaaatcctcaccgcactcaacgaagtgcgtgaaacccgtggcgaggagccgctggaactcaccaccgacgagcgcatcatcgaagcgcgcaacgaattccgcggcacgcgcatcggctacggcgaaggcgcactctggaaaaacggcaactggaagctggtacgcaacctgtggaagccaagctggggtgaaagctaccagtcgatcgcgcatcgtgtgcaagcgttcgccctcgaaaaagtgggggagcatcccggcgagcaaatcatcgtagtcagccatgaatcgcccatctggagctacaggcacatgctggaaaccgggcacccggaacataatatgctgctacgccatacggcactcgcctccatcacttccattacgtacgattgcgatacacgcaaagtattgtcgatcgcttacgtcgatcccgcggccgacgtgaaatagcgcataatgcggcatggaatcgccggattggaaacttctgaccgagacacgcgacaatgagtgcggcggttgttgaaagaacggggattccatgcaatcatggaagggctggatgctgttgggtccagtgaggaaaacaaaatgtcgaagctgcaaaggggcacgcatggctttcactatcaacaacggagcgctttatcaattattcgataggcctcatatgaaaattgccatcgaaagctgtgttggagtggtggaattatggccgctgcaaaccgttcaggagatggagaatgacgcaaagtacacggaagatctgcaagtaagattctcctgcaccatggcaagggcaatgctgcgattgtcccacgggattaacccgtccgtggcggaagccgtgtacgagggaatggacgagattccgggttgcgatccggaaattgtgcaagcgctcacgcgggccaatcaggcatacgatgtgatgcgcaattattccgaaaccaacaatgccgacctgttcttcgaagcggccgacattctgggcatcttcatcgacgcccatgtcgagacggaagtccgcaatatactgcaaaagatcgtggagtacattcggcagagcgtcagcctgggcttcgacggcggagcgctggaagatgtcaactactgctacgctttcaccacgaccccaaggacgctcaccgggcgattcctcgcggcgctcgcggtgggtgacggtctgatgaatctcatgtgcgaaggcattgacgatgtggacgaacagaccgtgcgcgtgctgccggtgatgctgtacatcaacgagttgtgcgagcagatggctgttccgccgatctatgtcggcgacgtgaccttgtctcgaatggttgcgctgcgtaatgctgtgcgtgaggcgggcagggcaacgccactcgaggagaattccttctgcgacaacacattcaccataaccgcggacaatgtcattccgtgcgcgggtatggagtgggatcatcatgcggagtgcctgcgttgggatccgaagagggccgagcaggaagccaaagatgaagatgaacgtaagagcaaggaagcgctcgctgaaaagttcaatttgatgacggacgctatgaaaagtatgagctacatggatgattccgatgattcgggtgattcaggcgaaggtgcggatgctgcgtgacgtgggcaatccgagataatccgaattagtgggaattatcgatataggaataagaaaatcccggcacttgcgattgcggtgccgggattttctttatgtagtactgattattgcaagttcggttcttaagttcagtgctgaacctgcatatttcgtcagtgctgtatgttgccgtacacggtaggatcgtcggaatcgtcggaattgtcggatccgtacggggtctggccctgcgaatcgttgccgaacgtggggcgatcgaactgcgtctggtcaagctgggtggactgttccggaaccgtaggcagcggaggcatgctcggcatggaaggggcttcgggtgccggggctgcatgcggagttgccggggcggccggagtgtactgggcggctggagcggctggcatcgcaggtgctgcgtactgatcggtcggagttccgtaaggagcgccatacgggttgccgtacggagtgttggtggctgccggggctggggtcggagcgccatacgggtctgcggtgggcattgccggagtcggcgcaggcattgcaggtgccggagcggctgccgtatacggatcagcggttggcgtcggaacagccgctgcgtacgggtcggcgaccggtgccggagtgccgttcggggcgtattgtgcggttgcggtcggtggcatgcccggggctggggcgtagccgttgccggctgccggatcgtcgaagcgtgcgccggctggatcggtcttcttggccatgagcacaatgagcacgatcgacgtggccaggcatgcgatgaaaccgatgatcaacaggagtatgccggctgtgccagtcgagctcgatccgccaccgattacggaaatggcgccaagtcccgtcatgacgaggccgacgctcagcagaacgccaccgatgaagtcaatcgcgtagaggatgaccagcgtggtgccggccttgttggtgtcgtgcaggcggcgaacggaaagcgcaagggatggaacaatcgttgccagtgcccaaatggtgttgacgaagcttcgcattccattggctgtattgctgtcgatgatggcgcccaacaccgcgaagatgacggcaaacgcgatctggatgatgaatgtgcacagaacccaccaccagaattcgccgcgggaggcgcggcccttgaacgtggcgtactttttccagaagcggatgaacgcctcgccgatggtgcagttgtaggccggctggtcgagcggagcggtcagtgcgaagaagctgccggacccctgtggctgaggttgcggtgcgccgtattgcggctgctgctggttgtatccggccgcattgccgtattgcggtgcgctgtattgaggcgcgccatactggggtgcctgctggccgtagtcgggtgcgccgtattgcggtgcctgctggccgtaatcattctgaccgtaggagccgtaaccgccatattgctgggcctgctgcgggttctgcggattatattggttggggtccgtcattagattaccctttcggaaagtgaatcgacatcaaaaaagtgaagtcgattaacacaatactcttgcatcgccaaaaataccgaaaaatattgcagtgtgggacaatcccgacggaccccgcaaaaatcccctttgacttgggcatcttctgacgcgttggggaagtccgtcgatggcgcggctcatgcccagcatggtgttgtaaggattggtggctgcgatcatcgggtcaattagctgcaggatgttcatgaccgcgaaaagcgagttggtgcgtgggactggatggcacgtccggtttgcggggcacaatggagcttatgactgaagctgaaaacaccaaaccagaacttcctgagcatgttcgcgtgcgtttctgcccgtccccgaccggcattccgcacgtcggcatggtccgcaccgcactgttcaactgggctgaggcccgccataccaagggcacgttcgtgttccgtattgaagatacggacgcccagcgcgactccgaggaaagctacaaccagatcatcgaagccctgaattggctgggcatcgactgggacgagggcatcaacgtgggtggccccgacggcccgtaccgccagtccgagcgtggcgacatctacaaggatgtcgcagccaagctgcttgaagccggctatgcatacgaatccttctccactccggaagaaatcgaagcccgcaacgtggccgccggccgcccgaaggctttcggttacgacggctacgaccgtgatctcaccgaagagcagaaggccgccttccgtgccgaaggccgcaagcccgccctgcgtatccgcatgcccgatgaggatgtcgcgttcgacgatctgatccgtggccgcatcgagttcaaggctggttccgtgccggattacgtgatcgtgcgcccgaacggcgatccgctgtacacgttgaccaacccggtcgacgacgccatgatgaacatcaacgtggtgctgcgcggcgaggacctgctgagctccaccccgcgtcagatcgtgctctaccgttacctgatcgagctgggcgtggccaaggaaatgccgctgttcggccacatgccgtacgtgatgggccagggcaacaagaagctttccaagcgtgacccggaatccaatctgttcctgcatcgtgacaacggtttcattcgcgaaggcctgctgaactacctggcgctgctgggttggtccatcgccgccgaccgcgacgtgttctccatggaagaaatgatcgaaaagttcgacgtgcgtgacgtcaaggccaatccggcccgtttcgacctcgacaaggccatttccatcaacgccgagcacatccgtatgcttgagccgcaggacttcctgaaccgtgccgtgccgtacctgaaccgcgatggcgtggtctccgccgattcctgggatgcgctgaccgatcgcgagcgtgaggtgctgtccgcttccgtggagctcgtgcagccgcgcgtgcgcctgctgggcgaggtcgccggcatggtgggctcgctgctctccaccgagggctacatcgagcctgatgatgacgccaagaagcagttgaaggattccgctccggcagtgctcgacgccgccattgctgcgctttccgacgttgctgaagatgattggaagaccgacttcctgcatgagacactgaacaagtcgctgatcgaagatggcggttacaagccgcgtctggcgttcggtccggtgcgtgtggccatgagcggccgtcgcgtgtctccgccgctgttcgaatccatggagatcgttggcaaggagatcaccgtcgcacgcttgcagggcttgcgcgagcacctgtgatgcgctgatggtgtgattttgccgatcgcatgactgtcgacccgctggaatgttccgttccagcgggtttgttgttctgggatgctgtttaagaatggcggaaaatggcgcgacacgccgtgacttgcgcacttctacggattcgcgtatatttatcactcgttgcggttcacggctcagctgagaatcacagcaataactcaagcccccgtcgtctagcggtctaggactacgccctctcacggcgccaacaccggttcaaatccggtcgggggtacgacggacaacttttcgaagttgccacgcctgccaaattgggatgtggtgtaattggcaacacagctgattctggttcagccattcttggttcgagtccaggcatcccagccaatgaccctcgcagatgcgagggttttttgtttttcgcaagcatgtctgccagtacaacatagtccaagaaaattgcactaccctaggaagcatgactgaattgcagaacgcagcaaaagccgccgccacgcgaccgcgcatccaaccggcggaagaaggcgacgatcgcccgctttccgtatccgcgcgactgggacgattgcaattccaccaatccggcaaattccgcgttctgcagcttgccgacattcaagacgggccgaaagtcagcaaagacaccgtcaaactcatcgaagcgtcactggatgccacaaggccggatatcgtcatcttcaccggcaatcagatcgcaggatatgatcccgcatacgcgcaaaccacgcgcaaacgtcgttggagcgctgccgcggggatttcctccaaaaccgcttcatccaagtcttccgaagcgtcagaacggttcgaagctgcgctggaacgcacctgcgcatccgtgcgcgccactgtcgaacagctcgtgcgtccgcttgccgatcgcggcattccgtgggcggtgacattcggcaaccacgattttcaatgcgggctcagcaatgcggaaatcgaaagcatttgcagggaatttcccggatgcgtgaaccctgagcctacgggaggcgagagcggcctcgggggcgcaaattctgcaaattctgtgggaagcatggattctgcggaagatgcaggtttcgtgcaactccgggcggaatcgtatttgccgaatcagcgcgtattcgcttgcgagccgggcaccttcgcattgccggttgccgatgtggaccatacgatgtccgtgctgggcttggtattgctggattcaggcgattacgcacgttccggcgggtacggaagtccgtcggcagccgcattgcagtttcttgccgatatgccgaaagcgatgcgtgcgcaatcgcaggaaattgggcgatcgcaggaaccggcggtcccgtgtatggtattccagcattttccggtgcaacagtattaccaactgcttaagccggccgcggcgaatgcggcgcgtgcgattgagggctaccgcaatttcgctggaaaacattacgttttggatgaggaaaaaacgcttcccggcagttatctgggggagggtgtcagctgcccggatgccgacagcggtgaattcgcgatattggaacagcatgactattttgcgatttccgcgggacatgatcaccgcaacgcattcgttggaacagtgccggtttcgcgagaaatggcctcggctgatgcgcagacggcggcttcgccaggcaaggttggcggtctgatgatgatcgcgtcgcccaccagcggtttcggatcgtatggtccggtgccgcagaagcgggccgcgcggctgatcgagttcgacatccgccatccgtacgagccgcgtacgcagctgcttgaatacggcgaattggtgggcaaaccgagcgcgggcaaggcgtacgcgtacggcatgaccagtgaatcgaagcccgaatccgaaggcgtggatctgctgcatcggccgacatggtggagcaaactgttgacttggctgcgtaagaagtagctgaaaagagcgaaatgacaaatcctgcaaggaaatggcaaaacttgcggaaggcaggaaatagcaaaaccgtgtcctgcatgcatcgcggaacacggttgagaggctgtatattgcccgtcagcgaccggaagaagccttaatcaaggcgtcggtcaaatacttgccggcagccataaccagcggggcgtaacggcgtccgggattggaccccatacgaccgtccgggccggaaatcgaaattgcggcaatcacctgaccggaagcattgcgaatcggcgcggaaatcgagcatacgccctcatcgcgttcgttgaccgactcggcccaaccgcgcttgcgcacggcggtaagcttggccgcggtgaacttggcgtgacgcaacccctgatgcaggcgttcggaatcctcccaagccagcaaaatctgggccgcggaaccggcctccatcgacagcatcgcaccaaccggaatggaatcacgcaaaccggaagcgcgctccacggcggcgatgcacacgcgcatatcgccctgacggcggtaaatctgcgcggattcgccagtgcgatccagcaacgtctgcaaaatcggcgcggctgcggtcagcaaacgatcctcgccggcagcagcggccaattccgcaaaacgcgagccaagcacgaaacgaccatgctgatcacgcaacacaaaacggtgacgctccaacgcaatcgccagtcgatgcgcggtcggtcgggccaagcccgtcgaggaaaccagctgtccgagcgttgccggaccggattcaagcgcgtcaaggattttgacggtcttgtcaagcacacccacaccggaatgaatctcattgctttgagaagacgtcgtgtggtgggtctcagctggaagctcagtctcatccgactgcgattcaggcatggtggtgcttgtattcgaagaagtcataagagggattatgccatctcacatattgaaatgcaaaatgtacgcaatgtcggactgcggtagagcaggtattttaatctttactcagttatggaaaaagctggaaaaaatctgaattttcaacgattttgtaggtacatacggggaggtatgccacaatcgcggcgattttgacatgatctggagtgaacttggcccatatgtgatgtgtgcgttgcatgcaagtatctcatataccggcataaacgcgttcgaaccaggctcgaacaccataggcttatagcacgaacaacgcgggttggcaataccgcgaggaaaaagcgaggaaaaattcgaggaggtcccgcaatgggaacgacattggccgagaaggtctgggccgatcatttggtacgcaagggtagtgatggggctcccgacttgctgtacattgatctgatgctcatgcacgaagtcaccagtccgcaggcgttcgaaggcttgcgactggccggacgcaagccacgtcaccttgaccagctgatcgcaacggaagatcacaacacgccgactgccgacatcgaccgcccgaatccggataagatctccgcgctgcagctaagcacgctcgaaaagaactgcaaggatttcggcgtacgtctgtgcccgctgggagacgccgatcagggcgtggtgcacgcgttcgcgccggtgctgggcctgacgcagccgggcatgacgatcgtgtgcggtgactcgcacacctccacgcacggcgcgttcggtgccatggccatcggcatcggcacctccgaagtcgaacatgttatggcaacgcagaccctgagcctgaagccgttcaagaccatggccgtgaacatcgaaggtgaactgccgaagggcgtcaccgcaaaagacattattcttgcgattatcgcgaagatcggcaccggtggcggccaagggcacgtcattgaatatcgtggtgaggccatcaagaaactgtcgatggacgcacgcatgaccatctgcaacatgtcgatcgaagcgggcgctcgcgccggcatgatcgcgccggacgaagtgacgttcgaatatctgaagggacgcccgcacgcgccggaaggtgaaatgtgggacaaggccatcgaatactggaagacgctgaaaaccgatgacgacgccgtattcgacaaggaagtgaccatcaaggccgaagatctcgagccgtatgtgacgtggggcaccaacccgggtcagggcatcaagatttccggcgtggtgccggatccggcttcgttcaacgacgaaaccgagcgcaccgcggccgagcgtgccattgcctacatgggcttgacgccgggcatgcgcatcaaagacattgccgtggataccgtgttcatcggctcctgcaccaacggacgtctcgaggatctgcgtgtggccgcttccattatgaaggggcatcacaaggccgaaaacattcaccgcgtgctcgtggtgccggcctcctctcgcgtgcgtttgcaggcggaaaaggaaggacttgacaagatcttcaaggacttcggtgccgaatggcgtaacgcaggctgctccatgtgcctgggcatgaaccccgacaagatggtggcccgcgaacgttccatctccacttcgaaccgcaatttcgaaggtcgacagggcaaggggtcgcgtacgcatctggcgtcgccggcggtcgccgccgcaacggccatccgcggtaccatctcgtctccggctgatctgtgaatcgttgagaatgcttgaaaacctgagaaatcttggatttccggcattctgtgaatcgttacatcgaaagaaatagtgaaatggaaaaactgactactcttaccggcgtggccgtaccgcttcgccgttccaatgtcgatactgaccagattattccagccgtgttcttgaagcgcgtgcagaagtccggtttcgacgacgcgctgttctatgcgtggcgtcgcgatccggaattcgtgctcaaccagccggaatacaagcggggcaagattctcgttgccggaccggatttcggtatcggatcttctcgtgaacatgccgtgtgggcattgcatgattacggcttccgcgtggtgatttcgtctcgtttcgccgacattttctacggcaacaccgccaagaacggcgtgctggctgcgattatgccgcaggaatccgttgagttgctgtggaagctgcttgacgaggagccgggccgtgatatgacggtgagcctggaggatcgcacggtgacgtgcggcgacgtgacgctgccgttcgaagtgaacgactatacccgttggcgcctgatgaacggctatgacgatatcgatctgacgttgcagtatgaagacgatattgtgacatacgagaagatgcgtgccgaaaagttcccgttcaagccgaagacgctgccggcgaagcgtgagccggagcagttgatcgcgtccgcgcgcgaaggcgaatacccggattggcagggcccgcttgccgatcgcggcatcatctgagttggcggctggctaggtgcgcgggctgtttgcggggtgattcctccagtgggcggaaggaacaccccgcttgcgttgttgcgcgggctgtttgcgggaggatttttccagtgggtggaagaattgggacgtcgggatgattgttcgcgggaggattcttccagtgactggaaggattgggatgttatgtgatgcgtgagcgggaggattcttccagtaggtggatgtttttggactttgagacggtccgtagcggggtgattcctccactgggtggaggttttgggacgattaggggactcatattgtccggattcctccagtgactggaaggattgggacgttgggattgctgattatgtgagatttgcgcgggttttgcatatgagacgcgctatggtgggcttattgtttcgtgctttcgtagctttcggagagaaaaatgagccagggtttcgcgccgttttatgatgtcaatcgcacgtatgaagacaactatttgcaagggccgttcggcgcgtttgccgaagtgttgcgggctgatgcgtccgattctgcgggatcggtcacgtctgttgttgctgaggttgcgtccgattcctccagtgaggttcagggcgttcagaccattcaggccgctcaagcgcaggaattccttggttttcgtgtgaatctgccgttcggtattccagctggtccgctgctgaatgagcgtttcaccacggccgctttccgtatgggcttcgatctggcggtatacaagacggttcgttcccgcgcatggggctgcaatgcgttcccgaacgtgctggccgtgcatccgcggaatgccgatggttcgctggttccgggcagtgccgaacttgacgagggtgtgcttgccgatacccgttatgagcttccgatttcgatttccaacagtttcggcgttccctcccgtgatcccgacgaatggcagccggacatgcagaaggcaatcgccgcagccggtgacggccagctgctggtgccgagcttccaaggctcccgcgtggagggcatggatcgtgaagcgtatatcgccgatcatgtcaccaccgcgcatttggttgccgaaactggcgctggcctgatggaaatgaacaccagctgcccgaatgagggacataatcgtctgttgtgccacgatccgcatttggtcggcgagattacggaagcggtgaagaacgaaatcggcgatcgtccgctgatcgtgaagctcgcatacattccgaatgatgccgatctggaaatcatggtgaaggaaaccgccggccatggcgcggtgcagggtttctccaccattaacacaatctccgcgaagctggtggatgcgaacggcaatcaggcattgccaggcgcggggcgtgaccgttcgggcgtatgtggcaatgcgattcgtggtgcaggtctcgatatggttggccgcctgaatgcgattcgcgagaagctgggtcttgattttgcgatcgttggcgtgggcggtgtgattcgtccggaagattacaaggcgtaccgcgaggctggtgcaaacgcggtgatgagcgctacgggtgccatgtggaacgcccgtttggcgcaagacattaaagccgcactgtagtcacaggttcaattgcgcctgatttgcgctctgttgcgtttcaccgtccttttttcccattcgctggaaggattagtgcagcacgggggtagctgtccgtcctgattcttccagtgactggagggttttgcccgctgagatgcagtttggtgggatgattcttccagtgactggaggtttttggacggtggaggggcttgtatcgggaggattcttccaccgactggaagtttttgcctgctgggatgcggtttggcgggtggattgttccagtggctgggtattttggtcgaaagtcgaacgaaattgggagatactgcgctgaacgcggcatttcacgagcccactacatgccttatggcaaactgagggttagtgtgtttcaagcttgaaccgtataagggaagcgaaagaggttgagcgtgtctgacaacaacaacgacattctgcacgtcgaaggtggcaagccgctgaacggcaccatcaaggtgcgtggcgcgaagaacttcgtgagcaaggccatggtggcggcgctgctcgccccgggtacgtccgtgttgaagaatgttccggagattcgcgacgtgcatgtggtctccgacttgctgcgtctgcatggcgtggacgttacggtggatggcgatcacggcgtggtcacgatcgacgccacgaatgtgcagcttgccgatgtggccgacgtggatacgctgtctggttcgtcgcgtattccgattctgttctccggcccgctgctgcaccgtttgggtgaggcgttcattccggctctcggcggatgcaatattggcggtcgtccgattgatttccacctggaaacgttgcgcaagttgggtgccaacgtcgataaggaacataaggacggcattcatatcaccgctccgaacggtttgcatggcgcgaagattcacctgccgtacccgtcggtgggcgctaccgagcagacgttgcttgccgccgtgcttgctgagggcaagacggagctttccggcgctgccaccgaacctgaaatcatggatttggtgtgcgtgctgcagaagatgggcgcgattatttccgtggatgtggaccgtacgttccgcatcgaaggcgtgaaggaactgaagggctacacgcacacttcgctgaccgaccgcatcgaggccgcttcctgggcttccgcggcattggccacgcatggcgacattttcgtcaagggtgctacgcagcctgaaatgatgacgttcctgaacgtgttccgcaagattggtggtgagttcgacatcaccgataacggcattcgtttctggcatccgggcggcgatttgaagccggtcgcgatcgaaaccgacgtgcatccgggcttcatgactgactggcagcagccgttggtagtggcgttgacgcaggcgaagggcctgtcgatcgtgcatgaaacggtgtatgagaatcgtttcggtttcacgaagccactggtgcagatgggtgccacgattcagctgtatcgcgaatgcctcggatcgctgccatgccgtttccagcagcgcaattacaagcattccgcggttatcttcggaccgaccccgctgaccggccgcgatattgacgtgccggatctgcgtggcggcttcagccatctgattgccgcgttggcggcaaagggcccgtccaatgtgcagggcatttcgctgattgaccgcggttatgccgatttccgtggcaagctcgaagctctcggcgcagatttcgactgatttgttgcttgatttatcgctgatatagcttgattggcttggtaaggccggtgttcacaacagtgggcaccggctttttgcttacatattgccgttgctcgttctcaaaaacttagtaattcagtgtataaattattgaacttaatttagggggttatggcgcataatagtgatgcaaaagctttattgtttttgaaaataatgtcgattttcggcagagattctttcggaatagcattatgattgtcgatatcgaatggcgtttgcaacgaggtgaacagccgaagatataagggtttccctcatcgttattgtgtttactgcatgtccagacggattctagggatagtcgcaacatcttcgtcgtcaatcgtcctccagcctatccaccagttccgcctttttcgtatattccgtgtttttgtatttcgtgtgtgcgtcgtgcatgagcgcaatcgttccaaccaagcggaatgggtggtggcagaatggaacgcatggcatccaaaggaaaaccctcgccgcgttccgcggtcaaaccgttaagcgacgaacaagtcgcaaagctcgcacagcgtcaccatctcgttgacccaacccacgactttccatgcgggccgcgcaaagccaatgaagccgaaatcgcggcgcagaatccgaaagcgacccatcgtctgctcaccggatgcgacatcgtattccgcaaccgcaccaaactcaaggcgtggggcatcgaacacgtgccggaaaccggtccgttcatcaccgcggccacgcacgtcaccatgtttgacgtgttcgtgcccatgatctccatgttccatcaaggccgccgtccgcgctacatggccaaagccgaaatggcctcgtggccgctgatcggcaaatggttccaactggtaggcatgcagcccgtgcaacgccgttcgggcaaggcgaaagccatcgaggaaacctccgtggaaatccttacctccggccgacccctaaccgtatggccggaaggcacggtaacgcgcgacccgcagaaatggccgatgagcatgaaaaacggcgtgggcatgatcgcgcttgaggcttcgcgccgactcggctaccagattccgctgtattgcgcggtaacgtggggcgcggcaagcatcaaccattggtggccgtggccgcgtaaaaacgtggtcatgtgctacgacgaggcgcttgattatgcggatctgctcgccgattgcgattcctggggtgaggaagtgccggaggatctcgccaacgaacttacccgacgcatccgcgtgcgtatgaccgaagtcatggccgaaatccgcggcgaacaagcccccgatggatattgggattatcgtacgatgagccgagtgaaggactgaatcgaagaaggccgaatcgaaaaagaccgcacacgcgattgctgaaatgcggtaatcgaaatactgccagccgattgcgcatacgtatggcgcgtattgcggcatatatcgcggtgtgcgtagccggcggtagcataggaaaagcaatttttgagccaagactccgggttatgaatgatgcccggagtaatgcaaggagcaaatatgacgaacgtgacggtactgggcgcaggagcttggggaaccgctttcggtcaggtgcttgccgatgcaggcaacaatgtgactatgtgggccatcgaaccggagattgtggaaggcattcgcgaccaccatcacaacggtgttcgcctgcccagcgtgaaagtgctgccaagcaacatgaccgccaccggcgaccgtgccgaagccgtagccaacgccgacattgtgatcgtggccatcgccgcacagttcgcccgcgtcgcgctcgtcgaattcaaggacctgattcccgaaaccgcactcgtcgcctcgctgatgaaaggcatcgaacgcaccaccggcaagcgcatggatgaagtcgttatggaaacgctcgacctgccggccgaccgcttcgccgcgatttccggaccgaacctgagcaagcagatcgccgaccgcgagccggccgcaaccgtggtcgcctgcgaaaatctcgacaatgcgcgcaagatcgcagccgcttgcaccaccgactatttccgtgcgttcgtaacccgcgacgtgatcggcttggaaatgtgtggatcgctgaagaatgtggtcgcgctggccgtgggcatggcccgcggcgccggctacggcgaaaataccgccgccatgatcgaaacccgtggcctggccgaactgaccgccctgggcgaggcggcaggcgccgatccgaagacgttcgccggtttggctggcgtgggcgacctgatcgccacctgcggatccccgttgagccgcaactacacgttcggatccaacttgggcaagggattgagcgttgaggaagccaccaaggtgagcaacggcgtggccgaaggcgtgccgaccaccgatgcggtggtggcgctcggcaagcagtacggcgtgcctacaccgctcgccacggccatgagccacgtgctttccgatggcatctcctgcgcgcagatgctgtccgaacttttcggcgaaggcatcagcgaagaataagctttccgcaacatcgcgattgcagataagaccgcactttcaggtgcggtctttttatttttcgaggcatgcgattgcgtaaaacgtcaatcggaatgtgtcaatcgtcaatcgccatatatttcggcaataatagtaaatctgtataaaaatagtctaatcgtgattagtctaatcgtgattagacaaagcgattaagctcggtttttcaggttgcaatcgcatcattccaacgtttgattccgtattctatgattcatgaaaataggacatgagtgacgggcgtgtgcaattatggttcgtcgtgtgtgggctgtggggtgcggtttgtatactgaactgcgatattgcgaatgcgtggtatcgcgggcgaacagaagtgcgaaccggcgcgatattgcgaagacagacagtacagacagtattggcagacggtattgggcgcgcgtgcgttcaacggaccaacttatggagcataagacaaagatggcaaaacagcgcattgtggtgatgtatggcggcaaagccgacgagcattcgatttcctgcatctctgcggcgggcgtgctgcgcgcgttggatactgacaagttcgaagccattgaggtgggaatcaccaagaacggcgagtggatcgtaggcggcgaggatccacgcaagtggaacatgagcgaaggcctgccgatggtggagaagacggattcctccaaagatgtggtgctggatgtggcactcggccaggatggtttcttcgctcgtgaagatgacggcacgctgacttcgcttggccacgtggacgccgtgcttccggtattgcatggtccgtacggtgaggatggcacgattcagggcctgttcgaaatgatgaacgtgccgtacgttggctgcggtgtgctcgcttccgccgcttgcatggacaagcattatacgaaggtattgctggctgcggccggtattcccgtggctccaggcatcacgttggatgtgcgcgattatgatgccgcttccgaattcgccgccgaggcggacgaaatgcttgccgcggtgcagcaggccggattgcagtacccgctgttcgtgaagccgtcccgcgccggttccagcttcggcgtgaccaaggtcgaacatgagggcgatgcggccgagcttgccgccgcagtgttcgaagcgtcccaccatgattggcgtgtgctcgtggaacagggcatcgacgcgcgcgaaatcgaatgcgccgtgctctgcccgaaggccggcgaggctccgcaggccagctggccgggcgaaatcgtgcttgacaagcgtgccgagggcgacgaccagttctatgatttcgacagcaagtacgtgaactccgacgcaagccatgtggaagtgcccgcaagcctgccggaagaaactctgaaccgcgtgcgcgaaaccgccaaaaaagcgttcatcgcagtcgacggcgccggcctgagtcgtgtcgacaccttcgtgacggccgacggcgaagtgatggtcaacgaaatcaacaccatgccgggcttcaccccgatttccatgtatcccaaggcatgggaggcaaccggcgtgagctacaccaacctgatcaccatgctgatcgagggcgtgctgcgctgatttcgattgtgtggttgctcgctttagtctgattcgatttgcatgagactggcatcaatgctgacactgcgttggtgccagttgacatattccgccaatttacctgcagtttgggaaaatttagttttttcgattcaaaataaactgcatatttactgtaaggtcagtatcgcgttgatttgagggcttatcttctttcttgttgttatgaacaaggcataagaaagatattgatttccatgatttctctgcgcaaactggctgccggctctcttgctgccgttctggctttctccatggccgcctgcggatcgggcagcacggattcctccgctgattccacttccggcaaggccgtgaagattgatgaaaagtccgcaaaggccacttccttggctgatttcggtacgatggacgatttggttgccgccgccgaaaaggaaggccagcttaacgtcatcgcacttcctcacaactggtccaactatggtgaggtcatcaacggcttcaagaagaagtatccgaacattaagatcaacgagctgaacccgaacgcctcctccaaggaagaagtggacgcagccaagactaacaagggcaccgacgctgcccccgacgtgttcgacctcggcttggccgtggcttccaccagcaccgacaacttcgcatcctacaaggtgcaggcctgggataagattccggattccgtgaagaatgctgacggcaagtattacgccgactacaccggcatcatgtcgatcggttggaacgccgacaagtacggcgacatcaacagccttgacgatctgatggatccgaagttcgccggcaccgtggcgctgaacggcaagcctgccgaagccggcgccgcattcaacggttacctcatgatcaaccagctcgcaggtggtgacatcaacgacttgcagccgggcctcgactacttcaagaagctcaaggatgctggcaacctcaccaccgttgacgtgaccgacggaaccatcgattccggccagaccggcgtggtgatggactggagctacaaccaggcctcctatcagaagagcctcaaggagaagggcgtgaactggaagttcaagaccttcaagaacgcccaggtggtcagctactacaaccaggccatcaacgtggacgctccgcacccggccgcagcacgcctgtgggaggaatacctgtacaccgccgatgctcagaacgaatggttcaagggcggcgccaatccggtgctcctcgactccatgaaggaagacggcacggttgaccaggacaccctgaagaccgccatcaccatcgagggcgatccggtgacctataccaacgatgattccactcgcatcaccgaatggctccagaacaactgggacaagaccatcggcaactgattggcaaccgctcgcaagcaacgcaaacgagctggatcgcaatcgaaaataatgcaatctaaggccggtagaccggcggacacgacgggctgaagcaagttccccgacgtcttctgccgcaacaaccggccttgaagcatgtctccagcgcaatagcggaatcccacaatcctatgcaatctcaccgcatatcaatcgtatgaaagcacgcatgcaaccatgactgcagcaatcacccccaaagcgggagtcatcggcgggcgtaacgcacgcgaagcccgcggaacgcgaggaaacggcccctccgcaacctccgatttcgccacgcatcgccgcgaaatcggtacattcgtcgtgaccatcccgttcttcgcctacaccgcctgcttcctgcttgtgcctaccgttatcgtgattgtcggcgcattccagaacgtcgacggcggatttaccctcaacaacttcagcaaactcttcgaagcgaacaccatcgccgcgttcgccacctccattctcgtttccgtgatctccgcactcattggcgcggtcgtgggtgcggttgcctcgtatgcgctggtgattggcagcaaaccgaacggactgctgcgccgcatggtcagtgccatttcgtcggtgctcgcacagttcggcggcgtgatgctcgctttcgccttcatcgccaccatcggtatcaacggcgtcggcaccatgctgatccgtcagctgaccggactgaccgtcaatccgaactggttgagctccctgcctggcctaatcacggtctactgctacttccagattccgttgatgattatcatcttcctgcctgcggtcgattcgattcgtccgcagtggcgtgaggcttgcgaatcgctcggcggtaacacattccagtattggacgcgcgttgcggggccgatactggttccgcgtttcatttccgcattgctgttgctgttcgccagcgcgttctccgcatatgcgacggccgccgcattgttctcacagcgttcgattctggtgccgcttatgattcagggtgccatgcgcaacgaaatggatccgaatcagcagggattcgcgcaagtgctcgccttcgcgatgatcatcgtggttgctctggtgatgatgctgagccacgctgtggaaaagaaggccggacaatggcagtgaatcatactgaagcaatgcccccgcagctgcgtgccgcccgcgtgcgcaagcagcgcgtgatcaaggcgattattctcacgttcacgctgctgttcctgttcgtgccactggtgtctatgtttgtgttcaccattcgacacccgctttccggcaagtggagtttggatccgtggattgcgattttcaccggcgatggcagcgcgcttggtgctgacttgtccacattgtggagcggtcttggatcgtccatgggattgtgtgtggtgactgtggtcatcatgctgctgctcatggtacccaccatggtgatcgtgcacattcgctccaagcagctggaacgcgccatcgaatgggtggccactctgccgctgaccatccccgccatcgtgctcgtagtcggcctggggccgatttaccgttggctcagcgccgacgtgctcagcaccaacccgatctggctgtgcttcgcgtacgttattctggtgatgccatttgcattccgcgcgctcgctgtgggcctcaactccattgacgtgaaaacgctgtgcgaagcatcccgctcgctcggagcctcctggccgcgagtgttcttccgtgtgctcatccccaacctgtggcagtcgatcctctctgcatcgttcatctccatcgccgtggtgctgggcgaatacaccgtcgcatcgctgcttggacgcatgaacctgcaggtggcgctctaccagcttggccaatccaactcccaaatctccaccgccatgtcgctgctggcactactgttcggcgtgatcctgctggtagccctcgatcttatttccgacgcactgcgtaaatccaaagaaagcaacgaatcatgactctcgctgatcagaaagcaaccatcgcacgcacttcggaagcgttcgtaaacgccaatccgagcgccgaaaccgtaacccgagccgcacgcgaagtcctcaacgactccgcggaacgcggcggcggcgtgcaaatgcttaatgtagacaaaatctacccaggagccaccaacaaggcgctcgacaacttcaacctagaaatcaatcctggtgaaatggtcgtgctgctcggcggctccggctgcggcaaatccaccgcgctgcgttccctcgcaggcttggaagacatccaggccggccgtattctcgtcggcggccaagatgtgactggcgtgcccgtcaacaagcgaaacatggccatggtgttccaggcgtactcgctgttcccacacatgaccgctctgcagaacgtggaattcgggttggaaatccgcggcatgggcaagacggaacgccgtaagcaggccatggagaagctggaactcgtaggtcttgccgatcaggctggcaaatacacgcagcagatgtctggcggtcagcagcagcgtgtggcgctcgcccgcgcactggccgtgaacccccgagtgctcctgctcgacgagccgctttccgcacttgacgccaaagttcgtgtgcagctgcgcgacgaaatccgccgcatccagctcgaagccggcaccaccaccgtgttcgtgacccacgatcaggaagaagcgctcaccgttgccgaccgcatcggcgtgatgaaccacggatgtatcgaacagatcgccgacccgcagacactgtaccgccgtccgggcagcgaatacgtggccaccttcattggcctgaccaaccgactcccaggcatcacgaatggtgaggaagccgtggtgtttggccagcgcgtgccgttgctcgaagcctccaagcgcgacgcctccaccgtgctcgtgcgaccggaaaaccttgtgatcactctagccgcaaacgatggcaacatggtaggcgagcatggtcgcgtcgacatggtgcacttcctcggtgcgctcgcccgcgttgacttgacggttgccgcaggtgtgggccacctgcccgtcaccgtgcagctgccggccaatgagcttcctgccggcctgacggttggatccgaagtggtggtggctccgcgtccaatcgccgcgctcgccgtatgagctgtttcgttgcggacgcccatgacgacggtcatgagattgtaagctgatattcagcattcctgtactaaggtgctgaatatcagcattttcgtatatgcaccccgtgcacgtcgtcgcaaaggcaaatatgacgtttccgcagtacccccaatatccgcagcggccgcaacaaccgcatccgcagcagaatccacaacagccatcccaatatcagcaacaaccgcagtatccgcagccacaagccaatccctacgaactgtggctcaggcgcgtgaaaagcgtgttctcccgcatcggcgcaggcatgtgcctgatggtggtgatctggtatgcgcttgcaacggtgctttccggcatgctctatcaggtactgcataccacgaatctgccgaattgggcggtgtatgtggcgtcggatgcccctttgtatctcgtggccatgccgctcgcagtactgatcatgggcaaatcgtcggtcattgaaacacgcaagttcgacatgaagccgggccaattcttcaaactgcttatcatgtgcttcccgctcatgtatgggggcagtctcatcggcaatatgttggcgtcgctgctgtccggaggcaaagccagcaattcggtgagcgatctggccatgcaattcgacgtgtggaacgtggtgttcctcgtaattctcggaccgttgttcgaagaatggatcttccgcaaggaactcatcagccgcacgcgcaaatacggcgaaaaaaccgcgatcgtgttctccgcgctgttctttgctctggtgcacatgaacctgttccagttcttctacgcattcgcattgggtcttatgttcggctacgtgtacgtgcgcaccagcaaactgcgttattcggtggccatgcacatgatcgtcaacttcatgggtggcgtggttgcgccgtgggtggtgacgaacattgacatcgacagtctgatgaacgtgctgaccagtgcggaaaacggcgacggaacggtcatgatgcagtggatgggccagaatgcgacgggaatgatgatattcggcatctatatgctgctatattacggtctgatcatcgcgggcatagtgttgcttatccgcaatcgcaagaactttgaattctataccgcaccggaagaactgcctcgcggcgttcgcacgagcacggcaatactgaacgtcggtgtagttacttacattgtagtgacggttattattacgtcaatcaatctaatgatgcaataatttcagtataaaaaagtgccgcatgtggactactgcatgcggcactttatatatatgggtcaaccgcgatttcttatgttcgcgaggatattacgattctttgttaatggcgcgattctcaagaaaatcagcattggcgatggaacgtgccacggcgttgatcatgtcgggaagcaacgattccggcttggcgtacgcgcacacttcgacattgatgccgtaaggggagtagccggtcagtcttactttcggagggaagcgcggatcggccaaatcggcggtatcgcgctgcacggcctgaaccacctgacgggtcatctcgtcgatgtcggtaccggccttggcggtaaacggcacacgaaccagcatctcattggacggattgagtttttccagtgacgcggtgttcagaatcgaattcggaatgatcttgacgttgccattgcgctcgcgcaccacggtctgacgccagttgatgtcttcgaccacgccatcggtgcccgccacattcaccagatcgcccggctggattacacggccaagcatcagaccgaaaccgccgatgatgttcgcgatcgtatctttcataccgagcgacaccgcaagaccaccaatgccgagcgcggtgaaaatcgtggtcggattaatgccgaacaccggctgcagcacagtgcccacagccaacgtccacaccaccgcgcgcagaatattgatgaaaatcgaagcgttcggcacttgcgaacggtccagcactttgctcacgattcgggtaagcgccttgtcgataacggccgcaagcagtgcaacgacaatgagcagaatgatttttccggaattggttttcagccaatccacaacgattccaatcggttccatagtgttctgaagcgtcccttcataagtttgattcgcatgcattactggtgcgcgcgacttgcgttcgctgcgtctgcgatgcgtgttcgagatgcgtgttcgcaactggtgttcgcacatatcctacagtgcgtggctgagtcggtttgagcgtgggtgtgcgggggcgtgcgcgagaacatgtgggaatgcgcgtggtgacatgtgtccggagccgtgaacggactaaagttgaggcatgggcaatgttgtggattatgtgcgccgcgagttccgcgggtttggcgaattggcgttcagcaatgtcgattccttggtgctttccgagctttcctacatgcgattgccgggcttggttccagcattcggcgaggccaagtcggtggcgaccgtgccgatccgtgacttgctgcgcgccgaaagctacgatgagatgtttgtttcgaattcctctgaaatgaatgattatcggctttcgttgctgcgtgcggtttgcgaatcgccgcgattccgcgggttgcgggtgggggagtatgccgaacgtttggatgagggcgagcagcagcaattcgctgcgatgaccttcgatttgggtgccgatttcggcttatatgttgcgttccgtggcactgacggcacgctcgtcggttggaaagaggattttaatatggcggtgcgctgcccagtgccgtcgcaagaatcggcatatcgatatgcggactcgattctggacaggacggaacgtttcctctcggcgaaaaaatcacccgacattatgatcggcgggcattccaaaggcggcaatatggcggtatatgcggccatgcaaatcacgcaaagcgatattgaagcgaccaacgaacgcgcgcaacggctcggactgctgccggcgctcggaggaagcgtgccgggacgcaactgcagaatctcccgcatcttctcgcatgacggtcctggaatgtctcaagtcatggtgcatagccgcgcatatcaggcaatcgcggcacgaatcgacaaaaccgtgccggaatcctccattatcggcatgctgttgcaatcgcaaatcaaaccaaccttcgtcaaagccgacgccataagcattctgcagcatatgggatcaagctggcaagtgacgcaatccggcgaattcgagcaggcaagcgagctgacaggcggtgcgcaactcatcggcaaaaccattgacggatggttcgaccgcgtaagccaggaacaacgcgaacgggccatcaaccagatatacgacatcttcgcagccgcggggtacggtaatatcgctgatctggtggcgcattggacggattcgctgccgaaaatcgtggcagccgccagaggtaccgacgtgcaaacgcgcgaactcatcaaagacgtgttcaaggcgattccagccagtgcggcgaaagtcgctgtcggggaactgcgcaacgacaaggagggggatgcgtgatgagcaatattattgactatgcgcgcacggaaacgcgcagtttcgaggcattgccgttccgcgaggctgacgcattggtgttggcgcagctttcgtacgacgaagtaccggaatgcgtgctgcgattggacgatttggtagcgaaatacggtacgttgcaggcgcgtgcgaagcaattcgatattcggcgtccgatcgcatcgttgcgtatgctgcgcaagcccccgtttggcggcgtgacgattgcgcgtgccgatgacgagctgaaccacgacaagcccgtggccgaccatgatgtggagaacgtgggattggtcgatccgcaggtgacgcacgacttctaccatgctgtggcggcgaatccgcggttttccgacgttgagatgagcgcgtattgcgagcagttcgatggtggtgcgcaaacgcagttcgcggcagtgactttccggctgccgtcgggaacgctggttgtggcgtttcggggtactgatgattcgctggtcggatggaaggaagacttcaacatggccttccaatacccggttccagcacaggtttccgcagctgaatacctgaaaaaagtcgcctcgctgtgggatggaccgatactgctgaccggtcactccaaaggtggtaatctggccgtatatgcggccatgaacgccgaagacgagatcaaggaccgcgttgaacgcatttactcgctcgacgggccgggtttccccgaagaagtggtgaaaagtttcgaatatgcgagcgtgagcgaccgcattgtgaaaatcgtgccggactcctcggtggtgggcatggtgtttgaaacccccgaacgttgcgtggtggtgaaatccgacgtggacggcatcatgcagcatttcgccttctcgtggcagatgcacgggggtgaattcgccaaggccgaagatgtggccgacagttcggtggtgttcaacaagtcgctgaacggctggcttgcgggactttccaaagaacagcgtgagcatgcggtcgacgcgctgttctccgtgcttgaggcttccggtgcgggcagtatttctgcgatcgtggcggccggtccgaaagtgattcctgaaatgctcggcacatatgttggcttgagcagtgcggatcggcgcaacatcaatcaggcgttggtgattctgttgcaggcggcgctcgctcgcaatccgaaagttcagcgaaagtgaagcgcgaatgaggcgtgagtactgtgcgaacgtgggcgggcactgttcgcgtagcgtacttgtgttgtaagcgtgaattcgtatacgacatttgccgaaattcggtctagacaacttgtacaataaaacgtggttatgaggcaacgtgactaattattagggggtactgatgccacgaccacgtagggattcggaaatcctgccagcaaaagatcgtctcgaaaacgccttctgggagctgctttcggaacgcgagtacaacaaaatcaccgtcaccgacatcgtgcgcacggccgacgtgaatcgcaattccttctactatcatttctccggactgccggaattggccgactccgccattctgcacgccgtcgaagacacgccaatgccgggcgtgccaggacgggatttcaatcctgacaccgaatggcgcaagcacgtcaccgcgctgctgcgcgatcccgaacagcgtcagcgtctcgaccgactggcattgctggccggcccgcacagctcgccggaactcgtttcgtcgttgaaggaattcgggcgtttgaccatgatctccgtgctcggattggatgccgacagtctcgacctgaaaaccgatctcatgctcgatttcaccgtcggaggcatgctggccgtactgcagcgctggccgaaactgcatgaaaaactgccgctcgacaccgtattcaacgaggacgtcgccgtactcgcggcaggcatgttcatgtcaatgtcgaaagcggacatgctcgaatactggcgcaggatcttcagcgaaggattcgtacccggcatggcgatttcgcaacagcagccgccgtctgccaagtgaccatcgaaagccggctgtgacaatccagtggtagaaacgatatagcggcgtttttccgcggattgttccgtggaaaaacgcgaacgtgcgaaatgaacgaacgacggggaggttgtccatgatcaacgaagcttacaaggccatgctcggcggaaaatccgtgatccgcgagctgagcgaatacgcgaccgcgcgcggtgccgaaatcggctacgagaacgtgttcgactattcgttgggcaatccgagcgtgccctgcccgcaaagcttcaccgacgaaatgatcgccctgtaccaagaggcggaaccggtcgcgttgcacggatactcgccgtcgctgggcattacctcggtgcgcacggccattgcggaaagcctcaaccgccgcttcgacatggactatacgaccgactacatcttcccgaccacgggtgcggccggcgcgctggcccacgcactgcgcgtggtgaccaagcctggagacgaagtcatcacctttgccccctacttccctgagtaccagccgtatgtcaacggaaccggcgcgcacctgaccgtggtgccggccgacaccgaaaacttccaaatcaacttcgaagcgttcgaacaggcgctgaacccgggaaccgcggcggtgctcatcaacacgccgaacaatccttccggagccgtctattccgccgaaacgctgacccgactggctgaaatcctgcgcgccaagcaggtcgaatacgggcacgacatcttcctgatttccgacgaaccataccgtgaaatcgtgttcgatgggggtgtgcagccgtacccgagcaagttctacgacaacacgctctcgtgctactcgtactccaagtcgctgtcgctgccgggcgagcgcatcggctacgtggcggtgaacccgcgcgctaccgatgccgaactgatcgtgccgatgtgcgggcagatcagccgcggaaccggccacaactgcccaggatccagcgtgcagctggccgtggccaaggtggtggacgaaaccagcgatctttccgtgtacgagaagaacatgaacctcttgtatgacgcgctggtgcgcctcggattcgacgtggtgcgcccgggaggcacgttctacatcttcccgaaggcgcttgaggatgatgcgaatgcgttctgcatgaaggccaaggattacgacctgattctcgtgccatccgacagtttcggcgtgcccggctacttccgtatggcgtactgcatcgatacggaaaaggtggagcgttccatcgccgcattcgaaaagttcgtgcacgaagtctacggccgctgatccctgtgtgcgctcgctggaggaattcggacgcaaataagccaaaggggtgtgtatctgccttatatatggcagaaacacacccctgtccggagctatctcgcttatatatggcaggtcggttggctaaaacccgccaaatcgtacccccgaagtgctgttttgctgaggacgtctgccatatataagcgagataggcgttcttaagctgtgtggagtgtccgtttctgcagaatcggacgttcataggctggtttttggtgtttggatgtccgtttccggtgaatcggacagttgggctgatgtttttggttcctgtttgtccgtttctgcagaatcggacattcaaagcactctcagtgggtggcgatttcgtcgatcttggtgacgtggccgccgaactgggcgcgcatggtggagacgacgcgcagaatgtcgtccgcgccgccgcgggaagtctggcgggcatacagcgcggccgcggtggagggtgtcggcacgcccagttcgagcgcagcctcgatcatccacttcgcctcgccggattcgttggccaccggcggcatggattccagcgtcggatcggacttgaacgcgatcgccagcaaatccaacagccaggactgtaccacggaaccgtctcgccatgaagtcatcacggccgccggatccttgatgagatcggacttcaccatagtggcgaaaccctcgccgaacgcctgcatcatgccgtattcgatgccgttgtgcaccattttggcgaaatggccgccgccgaccgggcctgcgagcaccagtccggaatcgccttcaggcttgagcgcttcgaaaatcgggcgagcgcgttcgaaatcctcttcgctgccgcccaccataagcgcgtatccgcggtcaatgccccatacgccgccggaaacaccgcaatccatgaaatggatgcccctcggctcaagttcggccgcgtggcgcgcgtcatcggtgtaacgggaattgccgccatcgatgatcatgtcgccgggttccagcagctccgccaattcgttgatggtgctgtcggtcgcctcgcctgcgggcaccatcacccacacgatgcgcggcgcggtgagcgctgccaccatctcttcgaggcttgccacggtgcgatccgattcgggggagcggtcatatccgaccacctcgtgcccggccgccgcgatgcgcttcgccatattgccacccattcggcccagaccgatcattgccagctgcatgatgttcttctttctacggttttgtttgatatggaatttgattgggattggtgccatccacccgctttcagcatcttccgcaacgcagaaaagaagatgcggaaaacgaatggacggcaagttttttgtatttcagatatgttttttcagatatgatgcgcgcgaatcgcaatcgcaattcgtgtgcgaagtgttgcgtcaaagcaccagcgaaagcagcatgacgcaacccaagccggtgaccgacagaatcgtttccatcagcgaccaggtcttcaatgtctgaccgacggtcataccgaagtattccttgaccagccagaatcctgcatcattcaggtgcgagaagaatacggaacctgcgccgatggcgagcaccagcatcgccagatgcgtcgggctcatgccggtggcgagcggcaccataatgccggatgcggtgacggtggcgacggttgcggagccggttgccaggcggatgagcacggcgaccagccagcctgcgatcagcggattcatggcggattcggtgatcgaattggcgatcacgtcgccaatgccggaatcgacaagcgtctgcttgaaaccaccgccggcggcgacgatcagaataatgccggcgacggagctgaacgactgcccgaccatgccattgaccgcgtcgcgagtgaacttctgcatgtagccgagcacaaccatcgcgaaaatcgtggtgatgagcagagccaccagcggagtgccgatgaaggcgagcgcgcgtccccacacggtttcgctctggccggtcagatccacgatggaagatgcgagcataagcacgaccggcagcaggatgacggcgattgcggaagtgaaagacgggcggttttccgcggatttcggggcttctgcctcagcagtgttttctgggaccgcgatcggcacccacttggcggcgagcttgccgaacagcgggccggagatgatcacggtcggaatggcgacgatcaggccgagcgccagggtgatgccaaggtttgcgttcagtgcgccgatggcggtcagcgggccggggtgcggcggcacgaatgcgtgcagggtggacaggcctgcgagggctggaatgcccagcagtacgaccggagctttggcgcggcgggcggcgaagagcaccaccggaatgagaatgaccacgccgacttcgaagaacatcggaatgccgacgatgaacgcgatcagtgccatggcccacggcagacgctgcaacggcgtcttggacatgatggtgtcgacgatggtgtcggcgccgcccgacttgaacaggatcgtgccgatgattgagccgaatgcgataagcaggccgacgttagcgatggtggaaccgacgccggacgtgaaactgtcgaatgccttgtcgtattccacgcccgcgcacacggccatcgcgaatgagccggcaagcagggaaaggaacggatgcactttgcataccgcgataaggagaacgatgatggcgatgccgatgatcgccgcagcaataaggttcatgaatcctcctcgattcatggggttggcttgctagatttgtccgattctggagattcggacatatggaagcccattttgggtgcgtacatgtccgtttctggtgaatcggacagttgggctgctgtttttgggttctgtttgtccgtttctgtggaatcggacaaacatgcaccggttttgggttttgtctgtccgtttctgccgaatcggacacatgcggactggggaatggtgggttaggcggcctgggttgcggtttgggcggccacagttgcggcgtaggcgttcagcgcttcgatggcacggtcgaccatttcgtcgacgctgccttcgatggagatttccacgccgttctcttcggggacaagcggctcaagaatggcgaactggcttggtagtagcgcgggcggcatgaaatggcccttgcgttcgctgagcctctgctgaatgagctcgtggctgccgttgaggtgaatgaagaatgtgggcacgtctttggcgagtacctcgcggtagctgcgctttaacgcggagctggacaccacggtgttttcgccgagcgcctcgcgtgccaccatccaggagttgatgacgttcagccatggccagcggtcctcatcggtgagtggaatgccggctgacattttgtcgatatttgcctgcgggtggaagtcgtcgccttccgcgtacacgtatccgagtcgttcatggatggcttctgcgacggtggatttgccgcatcctgcaacgcccatcaccactacgtgaatgctcatgttgctctccttgctattgacgatcctgtgccgctccgcaccaggaataagactactataaaccgtaaaagtagtatcagtcaaataaaaagtactacgaattggaaaaatcgtgtgacttgctatgctgaagatagtgcaaaatggcggtaaatcacgcaatcgcagatacgcaatcatctgcgattggtgattgccgtgcgtgtcgcagaatacgtgaaacataccgtgaaacaaagcaggcatggtgtgaagtggacaagggaggagcgatcgatggctgaaggcacggtaatcgcagaaaataccgtcggtgagctgatgcaggattcggtgagtcgaacgctcgccatcgaaatgctcgacggcgtgtggaaggctggcgaaagccttacgttggaagccttgcaaagtcgtttcggtatttccagaaccgtggcgcgagaagtcgcgaaaacactggaatccatgaatgcggtactcgtcaaacgtcgcatcggacttgttgcacgtccattcggcgaatggcaggcgctcaaccatcaggtgatcgaatggcgtctccactccacgcaacgcgaacggcagctgtcatccctcactgaactgcgactggcggtcgaaccggctgcggccgcctccgccgcacgtcttgcccccctcgacgtcaaggcgaaattccccgtgtatgcggcgcgaatgcggcagatcgccgaagccaacgaggaaggcgaagccgggcttgcgcaattccatgatcttgacgtggaattccatacgctgattctgcatgaaagcggcaatgagctgttcgccgcgctttccgacaccatcgccaccgtgctgcgcgggcgtgtggaactcggcaaatacccgatgaagccgaagtccgacgcacttgacgcgcatgatgccgtagccgacgcgatcgccaagggggagcctgaacgtgcgcgcagcgccatgctcgacatcgtcgacgaagtggcacgtgccctcaatttcttctgattttcgaatcagcattgcttctttcgtagactctgaagaagattgcaattgcgattactatgcggccgactcttgccatgcgtgacttttcagacgtaagttgacatcggaaatacggcatgaaggcagctctgccaacgtttctttaggcaaatatgaagacgccagagggttccctttgacggcttggagccttccttgttaccgggagaaagcttcgccatgatgacaaaatgcgcatgcagaatcaatcggttgcggtgattgaatctacatgcgcatttagtagacaagtactacttgcgggtggggtctttttgcaggaggaggaagatgagggcgacgatcagcaggattgcgatcgaaagcacgcccaccgaagcgttgccggtcagcgacgtggtggtcgcaacgaggaaagtgccgataatcgaagcggtcttgccgaaaatatcatagaaaccgtaatattcgttggcacgattctttggaatgatcttgccataatacgagcgcgacaacgcctgaatgccgccttggaacaggcctacgagaatcgcaagaatccagaattccgttgcggaacgcaagcagaacgcggcgaacagcacaatgcagatataggcgaccacagccgtggtgatcatggttttcgcgccgaaacgaccggcaagcttgccataagcgatcgcgctcgggaatgccacgaactgcgtgaccagcagcgccattaccagatgcgtggagtcgatgcccagctgcgtgccgtacgaggtgctcatggaaatcaccgtgttcaccgcgtctatatagaagaagaacgcaatcatgaacatccacagcggcttgttcttgcggattgcacgaaaagtggagccgagctctgcgaatgtgccgcggatggcctcaccggtctgacccgcggtagcgcggtagtgcacctgcttatagctggtgagcagcggaatggtgaacgccacccaccacaatgcggtgattacgaacgaagcgcgcgtgcatgccaccgtggaccatccaagcaacgacggaccgccgaaaatcagcgcgatacaggcgataaacggaatcgtggagccaatatagccccatgcgaaaccatgcgaggacacgcggtccatacgttcattcgacgtgatatcgaccagcatggaatcgtagaacgtgagcgaaccgttcaggccgaccgtggcgagaatgcacaccaccaagaaaacgagccagctgagcggcaacgccatcgcacagcaggcgaccacgcccgtcaggaagaatccggtaaagaacttcaccttcatgccctgcacgtcggccatggatccaagcacaggcatcatcaccgcgatgatcagcgacgcgatggtctgcgcgtacccccatgtcgacacgatattcgattggccggcggactgcagcagcgagttcgcgtagattggcacgactgcggtcgacagcatcacgaatgcggaattgccgacatcgtagacgatccacttcttttcgcgggtggtaagttttgcgttggggtccggcatatgctctggggcagtctctgaggccatgtcggacgtaggtgcggatgcgggcgctgttgcgcgttcggacatgattgttgactctttcgaataaaccgtcaattcactattgtatatactacagttcatcttaagcggctgtaaggggagcgctctgccgttacgcatgaacattgcatgaacattgcgactgatgtgtgatcgacataaaaaatctgaaatatcgaaatgctgcaaataatactgggaatactgaaatgacggagatgaacatgtgcagattgtagattgcatcatctgtatgttgatgtcgtatgttgatgtcgtgaaaaacgttcgcagaacggtatattggaacgtgtcaaaatactgggaaacacgaactaagtttgctgtgtgtgactgccgccgcgctgttgcgtcggcatatttctgcgaagagtcgaggagtctgtatgagtggggaagttccggacatgcttggtgcgaacgctgaaatattgcgctcgatattgagccagccattgcctgacacgcttgacatgatcatctggcgtggcgtcacgaactccgcgcaagcgttgccattcgaacgattcgcggcacgacttttggtggaagccggtgctgcgggcatccgagacattgctgccgaaaacgattttgatgtgatccgactgagcacgacgaaacgattctggctgcgctgcaacggcaacgatctttccaatgaacaattcaatgttgtgcaggcggtcgaatcggcgcttaaccgcatcgactatgccgacgacgaagcgcgcagggcggtgcacggaggtatgccggaagcgtgcatcgacgaaaacttctatattgcgaaatcgcaacagtatctgcgaaacgtgtcgggtgcgatcgtggcaatcgacggtctgcaggaaggtgaaaacaacttccgtagaatgaggggtacggaaggggcacgcggcggaaattgggatatcagcaccagattcgccaatgtttgcgaaaatctcgaattgcctttccgcttgcattaccgatttgacgtcgatgcgtccagcggcgtgatggtagtgcgtttcagcataccgaacacggcgatcatgccggttgcgtcgcaatatcgcgacggattcgcctccgcgtatgccgtgcgattggcgggcatgcttgcgtgggcggcgttctcgtcaagcgtacgactgacgcaagtcaatctgaccggttgcgtgggggatgctgacggcattcccgtgatttccatgggattcgatcgcgtgccattcatgatgggtgcgctgcctgccatgaaaaacggacaatgcgacgtggttccgttggatgtcgatccgctggcgctgctcaatttgctgcgcccggtgcgttatgtgggtttctttgatgggaaccgtgccctgacgccaatcacaccgctggcaacgccagccgtattcttggagaaacgtgtttccgaatggcaggatcaacgtgcgctgcctgaaggattgcggggattcctacgtgccgaccgtgcctgcgaacttgacgtgatgcatgacgaatcgccggtttccaccgatgatgtgaacgcgattatggaagaaaacgaaggatcccccatggtcgccgaactccaattggaagccgcgttggcgcaacttggcgaaagcggtgaagcaggtggggtgtgcgaagcgggcggaactgacgagacaggcgtagcgaaaattggcgaaaatggcgaaattccgctctactgcagccgtccaggcgtgcgactcatcatctccctgctagacggcgacgaacacacgcgctactggaaactgccggatgctgtagtcgacgtacaccagaatcttggggaactcgccaaaaacaatggcgactatgagcgcgcggaacgtgagctgcgcgcctgcatcaaacttgccccaaccagcgtacgtttctacgaggaactatcgcaggtatacgcaagaaccgacgaatacggcaaagcggccgacgtgctcatcggcgcgttgaaaatcgcagtgctgcctatcgattgcgaagtactctactatcgacttggctacgcattgtggcagttgggacgtctgccggaagcgctcgcctgctatgcgatgatggtcaacggcggcacgccattccgtacggccgcgcgcgatgaggccgaagaagtgagtaggcagatgggattgccttcgccggatatgaaatatggggatgcgtgcgatgcgctgcgatccggcggcgtgccggttgcgccggaagacaaggtgttagatacgattgcccgcgccgcgatttgcctgacggatgctggtttcccgctactggctcaggatgcggcttggatgcttggaatgcgcgatggcggtgatgtgatcggcgcggttgcgatgagcctgcgttttggagccgaagggcgttcgaagaactagcgcgacgacgccgggtggggtgtgctgggcggtttgactggctggcggctcgggctatgactggctggcggcgtctatgcgcgggcaaatggtggtttggatgcgctgtctgccgacctgacgcatgttgaccagacagcggcattccggggaatttaaggcgattgctatccacaaatttgcgattggctggggctggttgtatagttgagaagttgtgtgttctgccttgcattcagttgcggggcatcgaacgcgcagacttgcaagtcaatagtaattatagggagtccattatggcagctcgttgcgcagtgtgcggcaagggaccgcagaccggtttcaccgtttcgcactcacatattcgcaataagcgcaccttccgcccgaacctgcagccggttcgcaccaccatcgacggcgagaacgttcgcgttcgcgtttgcgtcaagtgcatcaaggctggcaaggttcagcgcgttgaagcgtgaatcgcgaaataacagcttgaaaccccggtagaccaatggtcaccggggttttgctttatcttgatcccgccagggctttaagcgttcggatttctccactcgatggagaaatcttcccgcttacagtggcgtttgcgtccgtattcctccagtaggtggaggaatactcccattggttggctggtttgcgtcctgatttctccagcgactggagctttttgcccgctaaggggcttgtggacggggtgatttctccagtgggtggaggtttttgcccgctgaggggctggtttgcgtccgtattcctccagcgagtggggaatttgggcggtttgagtcgtacccagtggtagaagccgcatctgtcggcataactggggagaatggtgcgttatgagcaccacactggaaacaccgatttcatcaatcgagagcaaccgccgcagagtcggcgcgctgaaatcgcttggtgtggtgtcagttggcgacgccctgacctattatccgttccgcgtaaccgatccggttcccgtgcgctcactgtatgaagcgaaaatcggggagagaatggcgttcgccgcgcatgtgctcgaaacgcgcgttttccccatggcacgtcgaggcttccgcctgatcgcaacagtcacggacgacgatttcgcagcgcgtcgcaacaccccaaaatcgttggcgtcgctggtcttcttttcgtatcgcaaatcgtatgtcgactgggtgcagcgcaaactgcacgcgggagcgctgctcgtcgtcgcaggcgagccaagcgtgtacgacaatcgtctgcaattcacgcatcccgacctgctcaccatcaatcccgtgcaatcgcagtcggaaaacggggaatggaacgacggtttcggcgatcctgcgaatccgcctctcggcaatctgaaatacgatgcgcaaacgatcgacgaagcgctgaaacgagtttgccgtccacgaccggtatatcatgcaacttcgcgaatttccagcgaacatattcatgaatcggtattgaaatatatggatgcgttgcgcggagccgaatatctggcaacgcaaaatgcagggaatttcttagataatcctacgcaagaaggggattttgatattccccaaattgatcgagaaatacagattaaagtactcggtaatgctattcccgatattattccggaagattttcgtgaggaatatgggcttatgcatcgtgctgaggcattcatggcgattcatgatccggttgatcgcaagaatttcgataacgccttgcaaacgttgcgatatgaggaagcgctgatctgccagaccgcgctcgtcaaatcacgcgatgcatcgcgcaaatccaaggctaccgcatgccctgaaacgcggttgaaagacgatttcatcgcgtcgctgccattcgcccttacgaacggccaacagcaggtcatcgccgatatttccgccgatatggcgcacgattaccccatgcaacgattgctgcaaggcgaggtcggttccggtaagaccgtggtcgcggttgctgccatgatgcaggccgtcggatcaggcggccaggccgtgcttgtagcgccaacgcaggttcttgccgaacagcattatgcgagcatttccacaatggtatccaaactgggaaaaagcgacgcaaattcgagtgataatcaaaaaaatctagatgatgccaatgcgcggcgaagcaataaacggtccgcgcaaagttcgaaagatggggaattcgacgcaaaaacaattcacaataatgctgtggataaaggtgtacaacttgcagaccttcttgatttggccgcatctgatgatgtggaaaccggattttccggcaaaggaaacgatatatttggcacaaaagatggggagattcctgtatttcttctcacgggaagtatgcgacttgccgaacgtcgtcgcgtgctcgcagcagccgcatcgggcatgccctgtatcgtcgtggcgacgcacgccgcattttccaagagtttccaggcgccgaacctcaccttggcggtgatcgacgaacagcaccgcttcggtgtggaacagcgcgaatcgttgaattccaagggttctacggcgcctcatctgttggtcatgacggccacgccgattccgcgcaccgcagccatgacctggttcggcgatctcgacatttcctcgctgaccgaacttcccggcggccgcaagccgattcgcacattcgtggtgccggaagacaatgcgtcgttgatgggcgaaatgtttgccctgattcgcaagcgcatcgacgcgggggaacgtgcctacgtggtctgcccgcgcattgacgccgatgccgaagatgcggacggcgcgctggcggcgtcagcggcttcaggctcgaaaaccgcaggttcgtcggccgcggcttttgacgacgcctacgatcttggcgaagacgacgaccggcgcgcacaacgccccccgttgcattccgtggcggaaatcgtggagcgtctgcaatcgctgccgcagttcaaaggcattcgattcgccacgttgaccgggcgtgacgatgacaccacaaaatcgcaggtcatggccgattttgaatccggcataacgccgattctggtggcgaccacggtgatcgaggtcggcgtggacgtggcgaaagctagctgcatcgtgattttcgatgcggaccggtatgggctttcgcaattgcaccagttgcgtgggcgcgtcggccgaggcggcaccgattcgggggctttcctgatttcgcgtgcgcccgcggacagtgatgccgcccgccgtcttgacgtgattcagggcacgttggatggtgccgaaatagcgcaggccgatttggaattccgcggcgccggcgacgtgctcggcgacgcgcaatctggcggaaagtcaggtttgaagctgcttcgtgtggtcaaggatgtgaagattattgagcatgcgcgggttgaggctacgaggcttgtcgctcaggatcctgatttactcgaacatgtgcagttggccggggcggtgcttgatttcacgcgcggcaatgaaacgttcctgaccagtaattagtttggtgcgattaattaatcgcctggcacgctagagtggtgcgtatgcgcgtaatttcaggacgattcaaaggcgttgcattgaccacgccgaaagcgggcactcgaccgaccaccgatcgcaccaaagaggcgattttctcgcatctcgattcatggggagtgttggacgatgcccgcgtgctcgatttgtttgcaggaaccggcgctttgggcatcgaagcattgagccgtggcgcacgagagctggtggcggtggaatcatccgctccggcggccgcattgatcgcgcggacgctgaccgcgttgaaacataaccgttcgtgggaacatggcatgagtgcccgcgtggtgaaggctcgcgcagaaaaatacgcggcttcagcttcggccgttgaaccgttcgacatggtgttcatcgacccgccgtacgccttcgaaacgaatgattgcaaccagctgctcgccgatcttgccagccgtgaactgacttccagcaacacggtgatcatgctggaacgatccacccgttccgaagagcccacggctccagaaaactgggaaatcaccgatcggcgcgattatggcgaaaccgccgtctactacattgaacccagcgagccaatctcagataacggtcagcaataatcgtaagaaaaaacttgcgattattccgcgtaaaaacaagcgtttaaaagctagcgtttgcgcggatgggcggcggaaacctcccaaccgagcgccatcaaggtcttgcgatcggctttgtcgagcttggtgcaatccagcgcttcgatcaggtccggacgcagctcgtcggttttctcgagcgcctcatcgcggcggaaacgatccactttcgcatgattgccggaaagcagcacgtccggaaccttgatgccacgccattccgcgggcttcgtgtactggcggtgctccaacagcgcgttatcgcccgtatacgattcctcaacaatcgaagcggcattgcccataaaaccgggcagcagccgcgtgatcgcctccagcatgaccgacactgcgacctcgccgccgttcaacacgtaatcgccgatcgaatattcgcgcacgtcaatgccttgcgcgcggtaatactgcggaatgcgcgcgtcatacccttcgtaacggccgcagccgaacagcagatgatcggcatggctcagttccgtcgcatcctgttgtgtgaacagcggggcggaaggattcggaaaaatcagcacaggacttgcggaagattgtgcagtgtcggaatctgcagtatcgcaagaatcgccagtatcgaaggaatccgcagaatcctcaatattttccgtattttcgattaccgcaggctcaagctgcagcagctcgtcgaggcattcgctccacacttccggcttcatcaccatgcctgcgccaccgccgacaggagtgtcatcgacggaatgatgtacgtcgtgcgtccagtcgcgcagattgtgcgcggtaacctccacaagccctttcgactgcgctttgccgagcagactgaggttcagcacttcaaaatattccgggaaaacagacacgatatcgatcttcataatgttcagaataccgggatgcctgccaagtggcaggaaacataaaaagtgggcactggattccaatgcccacttgaatggatatgtgatcgaaagcgcgtaatcatgaatgcttacgcaggatcgcaaacgatcacagtcccggaataagacctccaggcggatcgagggtcagatagccctcttcgaggtcgatgtctggcacgagctcgtccacgaatggcacgagcgcgctgttctcaaccacaacgccgtcggcatccttcaccggattggcgagacgaatcttcagcagccattgggccacttctatcacgtcaacgactttgccgaccaccacgcccggttcgagaccaagcatattgtcttcagccagtcgcgcctcaagaccgatgaggtctttcggataccactcgtcggcttcaagcatgtctttcggatcatccgcttcgccatatagcacaatgccgttggccgcttcggactggtcgcggttgtcaatgccttcgaacttgatgatccaacggtttttgaaggtacgggagttctccaccacatactcttctttgccgtctttcgtgtacaacacagcaccgggagcgaaccggtattccggttcgtccgtaaagatctgcacggtgacttcgcctttgagcccctgcgcacgcccgatacgacagaccctcagcagctcgggctgttgagggtcgtcagaatgcatatcacgcaccacgctaggatctcacctgcgcacgtccatgatgtcgacgcgcaccttgtggtcggacagtgcctgcaccacggcgcgaatcgcatttgccgtgcgtccgctgcgtccgatgacgcgaccgatgtcttccgggttgacgcgcacgcgaatgagttcgccacgcgcgttctcatgggacttcaccgaaacgtcgtcgggaaaatcgacgatgttcttaatcagatgttccacagcctgggcgagcatgatcactcagcttccgcagccggctcttcagccggagcttcctcggtagcggcggcttcggcttcagccttggccttggcgtcagcttcggactttgcagccttcagcttctgagcctgagcctcaacggcctcaacgcgagcggcggcatccgggccagcttcaacggtcttcagggtgccttcagcaccgtcaaggcccttgaacttctgccagtcaccggtgatcttcagcaggttcagcacctgctcggtcggctgagcgccaacgccgagccagtactgagcgcgctcggaatcgataacgatggtcgaaggctgggtgttcggattgtaggtaccgatctcttcgatggcgcggccatcacgcttggtacgggaatccatgatcaccacgcggtagaacgcgtagaacttcttacccatgcgcttcagacgaatcttggttgccaaaatggctctccttgtataactaggggtgtgcgtttcgttttctgtgtggggcacggaatccgaaacccacatgttcctcacgtcacgcgatagttagagggcctcgcgcgcgcgaataacttaccaagtataaccgtggggtacggacggatgggtcttaggatgtttcccgctctatgcgactttccgaatccgtgcaaaaccgggaagtcgtttgtctgattctgcggaaacggtcaattatgcggcgaatgtgatgccttaaatgaccgaatcggcagaatcggacatttgctggcattcgtgagatgtttgcgtgggtctacatggcggaatcgtcggaatcaggcaggctggctacacttggaggttccgagtttgcgtatatccgttcggagtgaacggtttgcatagggggagttgcctgaatgattatcgcgctttggattgcgttgattatttgcgttgtatggattgcgcttggcgagatgccggctggttgggatggccatttgccgctgccgtacttgattgcgttgattccgttgctgtggattccgacgcttgcgatcgccgtcgccggtttcgcgttgcatgagccggctctcgggggagtcgctgcggtggtctgtcttgcgtcgctgctacgcaaaatcgcatattggatggaaaatcttaattctcccaatactgcgcagagggttgccgaaaaacttgcggaaaagcgtgaaacatctcgtgaaacaggcaatgaagctgttacggaatccgcgaaacatggccgtttccgtgtgatgacgctgaactgccgatttggtcgcgccaacgctgcggcaatcgtcagtgcggtcaaaaaacatgatattgcagtacttgcattgcaggaattgacggacgatctggttgcgcaattggacgcttcgggattgtctgatttgcttccataccgtcagttgggggagagcaaggggacggacaatggcggattcaacggtgtgtggattcgtattgaaccaagcgacatgtctccggtcactgcggtgattcccgcggccgacgtgccgggcgtgtgcttcccgatcgattcgatgcgcggcatcacgtttgtttcggcacatccgaagtctccgatgcgcggatgcggggaatggtccgccggcatcatcggtttgggggagttggcgaccactcagaagcagggcgacatcaccgttgtgttgggtgatttgaattccggcaccgatcatccaagcttccgcaagctgctgaatgcaggcttcaaggatgcggccttgtgcgaggcgaagggccgtcatgccacgttcccatcatggctgccgtggccgcgcatcattctcgaccatgtgcttttcaccaagggattggacgcttccgacgtgagttcgttctgcgttgaaggtagcgatcatcttgcgcttgctgccacgttgacgttgaagtagttgatggcgattataaggtagtcgattcagctgaaaacagctgattggagtacgcaaaaaggggatgcgattcgtcttgaatcacatcccctttttatgcgttaccgttttcgcgtcgcttgctttagtgcagcaagccggacagtccgccgccaaagttcggcggcagctcaccggcatcgcccatcaagtcttgcaatccggcgggaagtgcaggattctgcggcttcttggcaaaagcggaaccgccggaagacttaccgtcggagttcttgccggcaagcttgtcgcgcaatgccttctcttcagcctcgcgcttcatcggattgccggacttaccgcccttcttcttgcccttcttgcctttgcccttgcctttgcccccgcccatggcagggccgccaaagccaggcatgccagcgcccgccttgttgctcatacgcttcatcatcttcgcggcctgctcgaaacgctgcaacagcgcgttcacctgcgaaacggtcacgccggaaccgtaagcgatacgagctcgacgagaaccgtcaataatcgaaggatcacgacgttccgcaggagtcatcgaacgaataatggcttcagtacgatcgatttccctctcgtcgaactgctcaagttctttacgatgcgcggccatacccggaatcatgccaagcagattcttcatcggaccaagcttgcgcacctgttgcagctgatcgaggaaatcatccaaaccaaaggaaccatcggaaatcttgatggcggccttacgagcctcttcctcgtcgaactgcttctgcgcctgctcgatcagggtaagaatatcgcccatatcgagaatgcgggaagccatacgatccgggtggaaaacctcgaaatccttcagaccttcgccagtggaagcgaacagaatcggcttgccggtaacggaggcgaccgaaagcgcggcaccaccacgggcgtcgccatcaagcttcgaaagcaccacgccggtgaagtccacgccctcatcgaacgccttcgccgtctgcacggcatcctgaccgatcatcgcgtcgattacgaacaggatttcgttcggctgcacggcgtcgcgaatatcgcgagcctgcttcatcagctcttcgtcaacgccgagacggcctgcggtatcgatgatgaccgtgtcgtacagcttctgcttggccagcgcaacagcgtcacgcgccaccttcaccggatcgccggtggtcagacccggggaagcaacggcttcgccaccgtcggactgcacgcccttttccggagcgtacacgggcacgcctgcacgttcgccaaccacctgcagctgcgtcactgcgttcggacgctgcaaatcggccgcgaccaacagcggagtgtggccggaatccttcagccagtagccgagtttgcctgcgagggtggttttaccagcaccctgaagaccggcgagcatgatgacggtcggcggattcttcgcaaaattcagcggtcggtcaacgccagcgccaagcacggccgtcaactcttcgttgacgatcttcacgacctgctgggccggattcagcgcctgggaaacctcggtgccgagcgcacgctcgcggattcggccggtgaaggaacgcaccacgtcgagcgccacgtcggcgtcgagcagcgcgcggcggatttcgcggatcgtaccatcgatatcagcctcggaaagcttgcctttgctcttcagatgcttgaacgcattcgagagcctatctgtcaaagaactaaatgctgccataatgtccctcagtctagccgtcccgcgggaaatttcgcattccaattaatggtgttgatgatgttcggttgatattcggtgagatgcttgatgctatttgcatgagaaatgacaatcccgtctcttccaataggagaagacgggattattgcttattaagagcgctgcggattatttgagggtccaggtgggaccctggggagtgtcttcgatggcgattccggctgcgcccaaggcatcacgaatggcgtcggcgcgggcgaaatccttggccttgcgggcttcggcacgctcctccaactgttcggaaaccaaacggtcaagcgcagtatgctcagcggaatcggcaccggctccggcggcgccgccggccgcaccctcgcttacccacggttccgccaacggatccaaaccaagcgtatcgagcatcgcacgcacattcaccaaaacagcgcgaacttcatccttcgcaacatccgaatcaacacgatcggcaagcttcgaaagcaacgtgttgccagaacgaatcgccgtgaaaatcgcagcggaggcgccggaaacattaatgtcgtcattcattgcggcaacgaaatcagccggcagctcatcggcggaaaccgaaacgatctcctcacgggacggctgcccgccaacggcggcaccggcacgttcgatgaaattcgacacacgatcgtacgcggactgagcctcggtcaacgtctgatccgaccattccaacatggaacgatactgcacggaaccaagggcgtaacgcaccacccaagcggaattttccgccaaaaccgccggcacggacaagccgttgcccagcgacttcgacatcttctcacccttggcggtaacccatgcggaatgcatccaacgagccgccgaatcgtaaccggcggcacgagtctgcgccatttcgttctcatggtgcgggaaacgcaagtccagcccgccgccatgaatgtcgaacatatccttcaaatagcggtggctcatcgccgagcattcaatatgccaacccgggcgacccgtgccgaacggagtattccaacgcgcgtcaagcggatcggaatccttcggagccttccacaatgcgaaatcacgcggatcatgcttgtcttccgacatgtccgcagggtcaaccggattgtacttgtcgttgcccgtattgtcgacagacggacccatggcatcggccacctcggaagcggcatcggccacagcggtctgcttctgatgcgtcaactcgccataatgaggccagctggcaacgtcgaaatacacgttgccggtcggattgccgttctcatcagtcaccacgtagccgtggccattgtcgatgatctgcttgatcagatcgatcatgtcgatcatgtggccggtcgcacgcggctcatacgtaggcggctcaacacccaacgtgttgtaagcctcagtgaattcacgctcgtaaatgtacgcgcgctcccaccactgctgaccggcggccgcagccttatcgagaatcttgtcgtcgatatcggtgacattgcgcacgaacgtgaccttgtagcccaaacgctcgaaccagcgacgcaccacgtcaaacgcgacagccgcacgaatatggccgatatgcggcgagctctgcacggtggcgccacacacgtacatgccgacctgaccaggcttgatcggcgtgaaattcgacacggcgtgcgatgcggtgtcgtacagctttagatcggcagcggcgctcgccactgcgtcaactgcggttgcgacgctagaaatgttgatattctgcggttcttgcgtgttcgtcataaccacgagagtattgccagaatcggacatgcatgcgagatgaaaatgaacggcaaaacggtttttgttggatttgtgaacatcgtttacgtaggtgatgcaacaatagaatgtatgacgcaatcgcaggtgctgattttgcaacacgttccgtgggagagaccgggacgcattttagacagtctggatgatttgggactgcagtatcaaatcatcaatgtcgccaagcagaagaaaccggatttgcctgattttggcgaggtttccggcgtggtgatcatgggcggcccgatgggtgcgctcgactacgacaagtatccgggattaaaggccgaggccaagctcgcgcgggctgcggtcagcgttggcaagccggtgttgggcgtgtgcctgggacatcagatcatcgccaccgcgctgggggcgaagctgaagtcgggagaggcgccggaaatcggttttgcgccgattaaatgcatcgacaagcatgattatttctcgatgtggaacaaaaccgtggatgtgctgcactggcataacgacgtggtgtcgttgccggagggcgcgcagccattggcgcgatccgcgaagaccaaggtgcaggcgttccgttttggttccgccctgggcatgcagttccacttggaggttacccctactctgttggaggagtggcttgacgagtcaagcatggtcaaggatctcaaggctgccggcggatcgaaatcgcagttgcgcgaggcgttcgccgaatataatccgcagttgcagccgcttgcggatcaggtgttttcgagttttgccgctcgttgtaattcgtatgggcagaatttggctcaggcgcagcagggctgatcgccgagttgcgtgcggctccgattgctgcgtagcgctggtggcgattcgcaagttgcggcattgcctgcaggtttgggagatgttcccgctacattggtgacttatgccgacttatgatttgggacttgaacacgtttcgcttgcttttgcgaccaagaatattttcaacgatgtaacgcagggtgtttttgaaggcgaccgcatcggcatcgtcggtaagaacggcgacggcaagtccacgttgctgcatttgttcaaaggcacgcaggagccggattccggtcgcgtgaccattcgcggcgggcttacgttcggcatgctcgaccagcgtgacccgctcgacgacaacgccaccgtgcgcgaagctgcgctcgaaggccgtgaagactacgaatgggctgcggaaaccaagtcgcgcgaaatcgtcgaagcattgcttggcggcatcagcttggaagcgaaaatcggttcgctttccggcggtcagcgtcgccgcgccgatttggcacgcctgttgctcaaggattgggatattctcgcactcgacgagcctacaaaccatttggatgtggtgaccattcactggctggcggaacatttgaagaaccgttggccggccggatccggcgcgctgctgctcgtcacccatgaccgttggttcctcgacgaagtgtgcgaatccatgtgggaggtgcatgacggcgaaatcgagccgtttgaaggcggctattccgcatacatgctgcagcgcgtggaacgcgatcgccaagccgacgtgcgtgaaacgaaacgtcgcaatctggctcgtaaggaacttgcctggcttacccgcggtgcccgcgcccgttccaccaagcagaaattccatgtgaaggccgcgcgtgagctcatcgccgacgtgcctccggtgcgcaatacgctggaattgaagcaaatggccacatctcgcttgggcaagcaggtggttgacctgatcgacgtgacgcagattttcgaacatgtgcaaggcgaggccgatatcgatccggacgttgccgacatggaagcgtcggcatcgcgcgtcgatgtggtgccggccatgtacgccgagccgcaagtgcatggttccgtggaagttgccgtcgacgatctgactgatccgcgattggtggatgccggtgttgcagcggcgcaagttgctgcagctgcgaaagaatcgcaagaaattcaggaatcgcaagaaaataatactgatgatcctgcagaagaaattacttctgcagcgcaaaaaattactgttaccggtcgtaagattcttgacgacgtgacatggctgatcgggccgggcgatcgtttcggcatcgtcggcgcgaacggtgccggaaaatcgacgttattgaagattcttgacggcacgatcacccccactgtaggtcatgtgaatatcggcaaaaccgtgaaattcgcggtgctttcacagcgtctcgacgaattggagaagctcggtaaatacaagatcaaggaagtgctgagccgttacaagccgagctatatcgtggacggcaaggaaaccacgccggggcagatgatggagcgtctcggattcgagtcggcgcagctgatgacgccgatcaaggacctatcgggtggtcagaagcgtcgtatgcagttgctgctgatcctactggacgagccgaacgtgctcatcatggatgagcccggcaatgatctcgacaccgacatgctcgccgtgatggaggatctgctcgacacttggccgggaactctgatcgtcgtctcccatgaccggtatctgctcgaacgtgtcaccgatcagcagttcgcgctgatcggcggcaaggtgcgccacctgcccggtggcgtgcaggattatctggacatgactgaggccatcaagaacggcaaggatccgtttgcggacgagaaggcaggtgccggcaaaggcaagaagggcggttccgctggagctgccggttccacgaccgaaggcaccgcaggtaactccgcaagtgggtctgcgactgctgaaaccgcatcttccgcgccttctacgccgaaactttccggcaaggcctttcacgaagcctccaagcgcgtatcggcaatcgagcgcaaactcgccaaactcgaagagcagaaagccgatcttgagcagcaaatggccgcgcacgaccccagcgactacgagggcctaggcaagctcaacgaccagcttcaagccgtcaccgacgagtccgaagaacttgaactcgaatggatggaactctccgaacagctcgagtagcattcgtatcgtccgcgtcaattaccggacagggtgtgcatgttgtggcggcggcgcagctcctccatcgtttccggtgaatgttggccattcgtgcgacagcgatgcgtggcattccatgtgccaatgtcatattcttgttattgcaggaaaccttagctattcttgtcggagagaccaatggaggtgccttatgaatcaagtgatgcgaagaagcgcctgttgcttgttgtccagcttgttgttgtggtcatgcgttggttgcacgaaagctgcacatgaaagtttcggtgatggctccgtacagagcggcagcgagaatgatgatgccgcaaaacaggcatataaagcatttactgtggacgctctggatcgtgtcgccgtcgatgatctcaatagctcgggcaaactggttctagtaaacaagttgggtgcgaaatccgtacatggcgatgatgctatttcatttacaaaaacagttgatgacagcaatatgtattatgtcatctccatgtgtaagcagaaggagcaggctccttattcgtttgttctctacaaagatggacagccacacaccttaaccactagggaggcctgtacatctaacggaatagaaacgatctctctcccggcgaagaatttcccagatgccacctcattgtccattatcaatatcggcaatacggatcttgttgtttccgtatatgaagtaaaggaaccccatcatgaataatttcagtcataacgctccctgtcgtcctgccatcatcatagtttgtggcatcacgatgaatgctactgggctagttgttgcaaaactggccgattaggtagatggggtagtaggtgatgttgtggtcggtttcgatgttgccggggccgaaaactaatccttggcgaaggtgataactttcctctgccaacacattattaagcgctcgatgaaccttgtttgatatcttcttgcgcctggcgaacgtctatgagactgttgttttgcgcaaaagatgctactgcagctggcatgcctccaatgatcagatattttctgaatatcgcagatctgacaacaaaaagggctttcccgcgttgaaacgggaaagccctgtaggtttgggattaggctgattggatcagcgaccggtgatttcggagccgagcaccttttcgctcaaggccttcggaccgcgcgtcactgcgaccgcgccggaacgaaccagctcgataatgccgtaatgctccaaaagccccagcagcgcatcaatcttgccttcggcaccggtggcttcgatggtcagcgattccggattcacatcgaccacgcgcacgcggaacagacgcacgatctcgagcacgtcggaacggttggattcgtcggcagttaccttgataagcaccagttcgcgctccacagtggtgttcggatccaaatccacgattttcaacacatgcagcagcttgttgagctgcttgatgatctgctcgagcggcacctcatccacatcggcggtcaccgtgacacgcgaaatgtcaggacgctcggtgggggagacggacagcgagttgatgttgaacgcacgacgggcgaacaggccggcaatacgtgccagcacgcccggacggttctctacgagcacggaaagcgtatggcgcttggaacccggctgagatgcaggatacattggtagacccttccttactacttactcgtttactcgttgtcggcagcggccttcgggcgctgcagcggcttgattccgggcatataggtgacattgtcgttggaatcgccagctgcgaccatcggccacaccatagcgtccttccacacgcggaagtcgataagcaccgggcgatcgttgatttcgttggccttcttgatcgcctcaatggcttcttcttccgtgaacgcacgcatgccgatgcaaccgtacgcttcggcaagcttcacgaaatcaggaacatccacgatttccggcgtattctctccatccatcagattggtggcggaataatgctcgccgtagaacagggtctgccactgacgaaccatgccatacacggaattgttcagcagcgcgatcttgactggcgtgtgatcgtggaacgcggtcgccagctcttcagacgtcatctggaaggaaccgtcgccgtcaatcagccacaccggcttctcgccctcatggaaacgttcggaaccgacacgagcgccgatggcggccggcagtccgtaacccatggtgccaaggccgccggagctcagccaagaatgcggcttctcgaaatcgatgagctgcgtggcccacatctgatgctggcccacaccggtaacccaaatcgtgtcagaatcagccaggtcggaaagctgcttgatgacccactgcggagcgagcgaaccatcggtcggctcgtcccacttgatcgggtacttttcacgccaatcgttgatgatctcccaccaatgcgaagtgtcaggcttgccatgcacggcctgctcgcgcttgatttccggaatgagatccttcagcacggttgccacatcgccaacgatcggcacatccggctgacggttcttgccgatttccgccggatcgatatcaatgtgaatcacacgcgcacccggagcgaaagcgtcaagcttgccggttacacgatcgtcgaaacgagcgccgatcgcaacaagcagatcgcaacgctgtacggcaccggtagcggcaatcgtgccatgcatgccaagcatgccaagcaccttcggatcggaatcaggcacaacaccgcgtgcgggcagcgtggtgacgatcggagcgttcgtgacttccgccagctcctgcacgagcttgccggcatcggaacgtgccgcgccgccgcccacatacagcaccggacggtacgactgctcgaacagcttcgcagcgtcggaaagcacacggccgtgcgccttcgtggtgggattgtagccgggcagaatcatgcgctgcggccacgaatagtacatatcgccggtctgcgcggttttggtgacgtcgaccaccaccggaccagggcggccggaacgtgccacatagtgcgcttcagccagcacacgcggaatgtcctgcgcacgcgtgaccagataggagtgcttgaccaccgggtaggttgcgccgacgatatcggcttcctggaaggcgtcggtgccaatggcgttcacgccgacctggccggtgatgaccaccatcggcacggaatccatgttcgcgtcggcgatcggggtgatcatgttcgtggcgcccgggccggacgtgacgatgcacacgccgacctgaccggtcgatacggcatagccttcagccgcatgacctgcggcctgttcgtggcgcatcagcacaaaacggaagctggtttcatcattgattgcatcgtataccggcagaatcgcgccgcctggaacgccgaaaacatccttgacgcccagatcttccagcgaacgtaccagcgcttcggcgccggtcatcttctcgccgtcaacaatggtctgcttttcagtggttgcggctgccttgggcatgccgctgaatgcctgcaggggcgtaggtaacaccatgttccctctcatattcgctcgtggaactttcttacaggggtatgctgccgcgtttcggtgcacgcaatcagccgaaccccatcatcggaaagcggcgcaatcgcttgtggcgacttgcgaatcgcaatccttcgctagtaatcagtctatgctatcggctgacaggagaatatgccggattcgtgccatattctggcgtattgcgttccgcggcggtatgagagggcggattcgtagctgctttttatctacctgcgactacttactggtgttttcgccgttgctgccgttactttcgttgccgttgtgcttgtgatgatgtttgcgatgcttacggacgttttgtgcttcaggcttgcgattgtccagtgccttccaaccttcttcggctgcggcgagttgcgccttgcgtttgctggtgcctgtgccggtgctgatgatttcgtcgctttcgcccagcatgacgttcgcagtgaacacttgcgcatattccggaccggaaaccgacatctggtagcgcggttcgccgaagcccatgccatgcgctttgacggtaagcgaggttttccaatcgagggctgggccttccgtcgcgacttccgcaagcgtttcgtcaacaagatgatgcacaacgcgacgtgcctcgtcaatgccatgctgaatgaacgtcgcaccgatcaacgattcgacgatatcgcacagaatcgagcttttatcagcgccgccctgatcgctttcgccatgaccgagcagaatgtacgggcctgcattgagcttttcgcgagcgattttgctcaaggattcctcggaaacggctttcgcgcgcattttcgcaagctgcccctcgttcatgtcgggatgcgccttgtacagggtttccgtggagacgagctcaagcacggcgtcgccaaggaattccaaacgttcgtagttttttgcgccaggattctcgtgcgagaaggatcgatgggtgagcgcttcgaccagcagatcgggctcgagcgtggtgccaagtgcttcaagcaatgcgttggcggtcatttcgccttcggaaacggcggatgcggaggtgttgttctgggtcataatcgtcctcggtttcgtagtgggtatgcggcggcgaagctcgccgcgctgttcgggacgttgcgtacgtggcaacaagccagcgaatctggccgattgctatgcaaacaacgatctcactcagtctactctccgcccatgtcgaggcggaaatgcagggaaatgcgtggatattcggtggatgcgatactcggcggatgcgaggtgggatggtcaggtgagtgcaaatggcatatggccaagtgcgagcctgaaatatacaaaaaccctgccacccgtcgatggcagggttttaatgctttatgccgttactcgacagccactcacttggtgtggatggagcggacagcctcgcggtacacgcggccgcggtaggcgccgcagctcgggcaggccatgtgcggcagcgccggagcgccacagttcgggcaggtaacggtctgggcggccttggccttccagtttgcgcggcgagaatgagtattcgcgcgcgaggtcttgtacttaggcagtgccattgtgtttcctctgtttcgttcgaacgattgagcttaagcgttcagtatcttaacttgtgctccgtacaaattgcaaaaaccgagcaaaatcagccctgccagcacccggatggaccttactcgttgccttccagccgggccttcaagccttccaaagcggcgaaacgaatatcggtcacatcatgatgatggtccggatcctcgttcagatcggcgccgcactgagagcacaatcccaagcaatcaggcttgcacagcggctgcaacggcagttcctcgaccaacgtgtcgcgcagaagcgtctcaatatcggcccaggatccgccttcaagcagcggatacgaatcctccgactcgtcttcgccggcgataatgtcgacttcctcttccttgacgccgcccttgccgtttttgccgcccttgccggacgcaacgcttgcggacttgtcttcatatgggaagaacgaagtgacgttcaccgtccaatcgcgcttgatcggtttcagacagcgggtgcattcggcgtgcacgggggcactgatgcgggcgttgaaaatcaggccgtcgacaatggagtcgaacgagccgacaacggtcacatccgcaccctcctcaacgccgacgatctcatcgccgatgccgctcggtgcggggaacgttgcgtcgatctccttgctttgcccggctcgcgaggcgacttgcgccacggaaatcgcccacggggaatcttcgatacgtgccatgttcagccttccattcagctttccggatagtcgtttgcgtcaagatgcggcacatgcgtgctcgcttcgcgctggcgatcatacagtacgttcaatcccgcctgcacgtcgttgccaagcttgccgagctgctgttgcagcgtttccatcaccgtggtgcagtatttgtcagctccctgcgtgagatggtcggccctggcttgcgcttggtcgagaatagcacgcgccttctgccgagccagttcggtcacgttttcctgcccggcgaggaattgcgcctgctcgttggcctcacgtatcgtgtctgccgcacgcgattgcgccgaagcgacgatggcgttggcttgcgtttgcgcgctttccaaacgtcgttccgactcacgcatcaacgccgaggcgcgttccagctgcaccggcatcattttcttcaactggtcgagctgttcggtgaattcgtcgcggtcgacgcgcacgctgccggggaagaacagtatcggtttcgcttcgtccaatgccgattcgagtttgtcgataatgtcgtacacggtggtgaattcgtcgcggctcaaatcgttggaatcgtccagcggcgcgttgggattgaacgtgttgcgtaaatccggcagatcagacatggaaatcaacggtttgaccggctcggcggcgcgtgccgtggcttgtgccttctgaccggattgggccgcccgatcggtcgggcgttcggcggtcacgtcgtcgtcaaactggctgccggccggatcgtacgcattcgtttcttcacccatcatgccctcttttcattattgagcgcttctccgagtagcggaatcacgcaatcgggcaccatgccggtcacatcgccgccgtgacgtgccacatctttcacgatcgaactggagatatgttccaaatcgggcgctgccggcaaaaacagcgtttccacgtcggcgagcttgcgattgaccagcgccatacccaactcggcttcataatcgccattctgccgaagccccttcacgataaccgtcgcaccgaccttcttgcaatagtcggtaatcagtccggttgttgaagcaaccttgatattgcggcaattccgctcttcaagcgccttacggataatctcaacgcgggtctcttcggaaaacatcggtgttttcgccgcgttcaccgccactacgacatgcacttcatcgaaaaaacgcgcgcaacgttcgatgacgtccaaatgtccggcggtcactgggtcgtacgacccggggcaaactgcaattgtcatagcctcaagcgtaccgcgattgcgtgaaattacgcgaagtgtcggcgaatatgtgggttttcatggctatgatggaggcagtggtgccgcggttgcggcgtatttgaggagttgattatggcatgttcgatgttcgatgatcgcgacggcttcattgacgaggccgacccggtctcgccgctttccaatcccgacgcgggtaccggcactgcggtgttggaacgccccgaagaggagacgaagctggatgatggcggcaacggcgatgcggatcgtttcgcgcattatgtgtcgcgcgatcgcattgccgagtcccgtcgcaccggacgcccggtggtggcgttgtgcggcaaggtgtgggtgccgaagcgtgatccttcgcaattcccggtatgcccggattgcaagcgtatctacgatgaaatgatgaattccaatttctaatcgttttttatctctttcatcgtatggtgatcttggaatttcgttgaaatttctgaagattgccgaaagtgattgcatataaaaaatctgccgagatggtctctatatcgaaattatttttcgatgattgagattgtctcggcagattttttattgttgttgcgtcttatatctgctgatatatctgcgtttagcgcaacgaaatttcgtcgatgcgacgcaattcctcatcgctgaacgtggtgttcttcaacgcgccgatattgtcgagcagctgctgcgggcgggaagcgccgacaagtacggaggtcacgtaaccgtcgtgcaacagccaggcgagcgccatttcggcaagcgtctgcccgcgttcggcggcaagatcgttcaggtcgcggatctgctgcaggcgttccggcgtcaacgcgctttcctgcaggaagcggccgtcgtgtgcgatgcggctatctgcgggcacgccgttgagatagcggttcgtgagcagaccctgttcgagcggcgagaacgtgataagacctttgccaagctttttggcggttttcttcaatccgttgcgttccacggtgcggtcgaaaatgctgtaacggttctggttgatgatgaacggcacatgcagctcatcgaggatcgcggtggccttttccagcgtcggaccatcgtaattgctcaggcccacgtagagtgccttgccgctttgcacggcggttgccaacgcgcccatggtttcttcgagcggcgtggaggaatccatgtggtgatggtagaaaatgtcgacatagtcgagaccgaggcgttcgaggctttggtcgagcgaggcgagtagatatttgcggctgccgagatcaccgtaggggccgagccacatttcgtagccggctttggtgctgatgatcagttcgtcgcgatgatgatggaaatattcgcgcagcagacggccgcagttcttttccgcactgcccggctcgggaccgtaattgttggcgagatcgaaatgtgtgatgccgttgtcgaatgcggtgaacacgatgtcacgcatagtggcgtacggcgtgatatcgccgaaattatgccaaaagccgagcgaaaccgctggaagtttcaggccactctcgcccacatgattgtaggtcatggaatcgtatcgagcgggtgacggcgtgtagacggtggtcggttcaagcatggttcctccttgaaaactctgcgtattccgctgtgcgctgtgttgcttgagttggcgcatgtcgtaagtttgtcgacgatactatcgtcgcacttcaagtaaacttgaatgcaagtatcgtcgatagtgtgttttccgatgattgacaatcgcaaggaatcgcaaaatcgctaggaaaacctagaaaatcgtagaaatgagaaggggaatggcaacatatacgattcgtgaagtcgcgcaacgattccatgtgcagacgtcaaccttgcgctattacgaggatcaggggctgctgtgcgacgtggagcgcgacgatgcggggcgacgcgtgtacaccgactcgcatatcgggcggctcgaggcgatcgcctgcttcaaacatgcgggcatgagcatcgatgaactcaaacgcttcttcgcatacgaaaaagacgagcgtgcgcacattgcggacatgctggaattgttggaatcgcggcatcaagcgattttgaaacagcgggccgcgctggaagaggcgtacatgcatgtgttgcgcaaactgcacttgtaccgcgacattcaacgcagcatcgaaacgggggcgccatacccggattgggcgaattatgatggcaaggattttcgcgccgacgatcagtgaagttcggtggactgacgaagatcagtgaagactggttggcgaagggcggtgacgcccagttggcgaaaaagcggaaaataaaaggtgtggaaccgcaaactacagttccacacctttagaacacctagcagaacgtctaatagagactgctgtgactcgtttcagccctacttcagcagagtggccacggatggcagcagggcgcgcaacgccttgccgcgatgggagatggcgttcttttcggccggttccatctgcgcggacgtgagcttctcgccggcttcgacggcacgcgccggctgatcgtcgggcacgaacagcgggtcgtagccgaatccatgctcgccttgcggctcatgcaacagcacgcccggcatttcgccggtttccacgatttcctgagcgatcgcataacgaccatcggcgcctgcgcctgcttcggtttgcggcaccaccagcgcggccgcgcaacggaaacgcgcggtacgcttggcatccggaatgtcggcgatctgcgcgagcagcagcgcgttgttggctttgtcatcgccatgcttgcccgcccaacgtgcggaaagaatgccgggggcattgcccatcacgtccacaatcagaccggaatcgtcggcgattgccgggcagcccgtacgtgcggccacatcacgggccttgagcagcgcgttctcttggaaggtcacgccatcttccaccggatccggcagattcagcgaaccggccgacaccagctccacctgatctgcgtccacacccaggcaatcttccagaatgcggttgatttcaacgagtttgccctcgttatgcgttgcgacgataattctcacgttccgattcctttcgttgctgttcgttgcttcgttgatgtcggcttgcctgacgtgcgtttgacgtgccctgacttgcctaacctacgattggtttgcgaggccagcctgcggtcggcttacgtccgacttgcagccttcagtcctgtgcgagcgcggactgctgcgcggcctgcagttccttgttgcccttttccgccaggtcaagcagcgcgttcaactcggcgcggttgaacgggcggtgttcggcagtgccctgaatttcaatgaattcgccggaaccggtcatggccacgttcatgtcggtcatggccttgctgtcttcgatgtacggcaggtcaagcatcggtgtgccatcgatcacgcctacggacacggcggaaacgctgtctttgatcacgcgctcggcggacctgatgtgcttgtgcttctcggcccagcgcatggcgtccacgagcgccacatatgcgccggtgatcgacgctgttcgggtgccgccgtcggcctgcagcacgtcgcagtcgatctgcacctggttttcgccgagtgccttcatatcaaccacgccacgcaggcagcgaccgatcagtcggctgatctcatgcgtgcgtccgccgatcttgccgcgcacggattcacgatcggtgcggtctgcagtggctcgcggcagcatcgcatattccgcggtgacccagcccaagccggagtccttgcgccaacgcggcacgcctgcggtgaacgtggccgtgcacatcactcgcgtattgccgcattccacaagcacggatccttccggaacatccgtgaaatgacgggtgatgcgcaccggacgcagctcatccaccttgcgtccgtccgcacgaattaccgtctgcccgtccaacatgtctttaatcgctaccatcgctgatttctctgctttcgattgatcacacgatcaacaatcgtttgtattttccgaaaaaacagtatcaccagccgaaaacccgtctttccgtcttgaactcgcctcttgctgcacctcaatttgcctatcccaatttgcgtcgtgcccgaatttgcgcgcatctcacgtttgtctcacgtaatacaggcatgcaagcacgtatgatggaacgaaaacctgtgcttggccacggcgaggcctacacttatggtcagtttcaccaaaagtcagaaaggctttggaaatgctggattattcacctgcactcatgaccgacatgtacgaatacaccatgcttgacgcgtgcctgagggacggcaccgccaatcgcaagtgcgtattcgagattttcacccgtcatctgccgcttggccgccactatggggtggccgccggccaaggtcgtattcttgacgcgcttgaaaatttccatcttgacgataatgatctgaaattccttgcagatcgcaaagtagtgggccccgaaactatcaaatggcttgagaatttccatttttccggttcgatcaagggctatcgcgaaggtgagatgttcttcccgaattcgccgattctgcaagtcgaaggcacgttcggcgagtgcacgctgctggaaacgctgttgctgagcattctgaattacgattccgcggtcgcgtcggccgcgtcccgcatggtcagcgccgcgaaggatcgcccgtgcatggatatgggcgggcgccgtacgaacgagtgggccgccgttgccgctgcccgtgctgcggtagtgggcggattcaagggcacggccaatctgctggccgcgcaaatgtatggcttgaatgccatcggcacggccgcgcactgcttcacgctggtgcatgatgatgagcgcagcgcgtttgaatcgcagattgccgcgctcggcaagaacaccacactgttggttgacacgtacaacattgaagaggccgtgaagacagctgttgaagtggccggaccagaattgggcggcgtgcgcatcgattccggcgatctggcgtcgttggcgcagcgcgtgcgcaaccagctggatgcgttgggcgctaccaacacgaagatcaccgttaccaacgatttggacgagtatgcgctcgcttcgctgcagaccgcgccggtcgattcgtatggcgtgggcaccatgctcgtcactggatcgggcgctccgacctgtgcgatggtgtacaagctgactgaacgcgagaattccgctggtgacatgcagccggtggccaagaagtcgaaagacaaggccacggttccgggccgcaagctcgccttccgttcgtacgagtattcgctggccgactgcgaacatgtgatttccggctccgaagagcagctggccgcctatcagccggaagaaggctggaaggatctgctggtcggctacgtgagcaacggcgaaatcaactccgattatcagggccacgaagccatcgtcaacgcgcataattaccgcgcccaggcgctggccgaactgccgatcggcgcgcaaagcctcatgaagggcgacccggtaatccccactgaaatcacagtcctttgactcgtgctaccatcatgctggttgcgtacggcaatcaatctcgtaatcaaccagcatgaaggggtaggattacatgcgagcattttctctggttacgttgagtccggaggcgtttgacgatttttccgcacatcacgcggacggcaactttcaacagacctctgccgcaggccgtctgcgtgccggccaagggatcgaagtggaataccttggcgttcaagaaaacggcacaatcgttgcgggagcgctgttcgaaacgcatcgcagccgcctttccaccttcagtgtggtgcacgacggccccttatgtgactatcgcgatcgcgaattgaccgaatatttcatgacccaactcaagcagcacgcgaaggcgaaaggttccgcacagatggaaatcgtgccggaaatgccatactgcctgcatgactcgcgtggcggcgaactgccagccgaccaaggtggtgctcctgctgatgatgccgtagaaacgttgaaaaacctcggcttcatgcatgacggcttcaccatcggctacactgcggtgccgcgctggcgttacctgaaagacctgactggcattaccgacgaaaagtcactgctcaagtcgtatgacaagcgcacgcagtggagcgtgaaacgtgccgcatccatgggcgtgcatgtgcgcgagctaggcgaagacgagctgcaggtgtttgccgacatcgagcaggccaccgccgaacgccgtaatttcgaatatcgcggtgaagcctacttccgcaagttcaagcaagcctatggcagcaaagcccacttcatggtggcgcagattcacatcggcgaatacattgccgacatggaatccaagtgtgacgccttgcggaagaaggtcgatgtgctgcaggccaagtacgacgagcatccgaccaccaaaacggaacgccagctaggggaggagtcccgaaacttggcggcggcggaaaaacgtttgaccgaggcggccgagtacgccaaagacggtgacgtgcttccggcggcagcatccctattcgtggaacacgctcgtgaaacggtgtatctgttctcgggcagtgtggaaaagtacaagccgttctacgcttccgcgctcattcagcatgatgccatgctgcatttgtgtgtggaacgcggtgtgacccgctacaacttctacggcatcaacggcgtgttcgacgatccggaagatgagggtcgtggcgtactcgaattcaagcaaggcttcaacgggtacgtcgaggaactcatgggctcattcgtgcttcccgtacgcccgctgaccttcaaactcaagaccgccctccgcaaactcctgcgccactagctattagctcaccttccgcttggaggattctgggtgggggcttataggtgcgcgagggttatgtgaacgctgttgacggcgactgtaggccggactaggttatcgcttttggtgaaaagggattttagccagttgggatagtgaaaggtagttacggatcgtgatgcgcgaagtgaatgcgagtgaggaacaagagcaagaatcgtctgaatggaatgtgcgcgagctgagcggtagtgagtttgatgagctttccgccgcgagcagatacggcggattccagcagacttccgaaatggcggcattggctcagtccgacggcatgcaaacgcaatacgttggattggtggattcgcacgatgctccggtggctggcgcgttggtggctttttcgcaagggcgtttcggtgtggaaggctcgttatggcttggcccgttgtgcaatgggaataacagagagcagatgaccgcgttgaccgaaggtttgcgcgaggctgccgaacaggttcacgccatcagcctgacgtgctggcccaaccaggtgtattgcgttcgtgattcgcaaggcaaggccatggccgaacccaatgatgagatggtgcgggagtacgagcggctgggttggaagcatgctggctttacccgtggatacgatgccctgatgaaccgttggaattacgtcaaggacttgagagagttctcgaacgccggcgagctgctcgcttcgtatgcgaagaacacgcgtcgtaacgtcaagatcgcgcggaacagcggcgtggaggttcgacgcctgaatcgcagtgagctgaacgtgttctacgatatttgcgagctgagtagcgaacgccagcatttcgccaaccgtagccttgattacttcgaacgcgtatatgatgcgtttggagacaaggccgagttcatggtggcggaagtgcatcttgaccgctatttgcaatcctgggaggaaaagctggcgaagttctcgaaagacgtggaacgcttggagcgttcgcttgagcatacgaagtacccggatgatgtgcgcaagaagctcgatacggctcagaagaatgtggagtccgcacgtcgccgcattgaggatgcgaacgagcgcatcgctcgtgatggcgaggtggtgccggtcgccgtaggtctgttcatgtggcatgaacgcgagctggtgtatttctccagcggatccgacgatcgttacgccaagttctacgcgcccaccgccttacagcatgagatgatgtcgcgttgcttggaacgcggagtgacgcggtacaacttctatggcatttcgggagtgttcgacgatccggaagacgatggacgcggcgtgctcgagttcaagcagggcttcaacggctacgttgaggaactgccgggcgaattcacgcttccggtgagcaagctgcgctacggcgtgagcgatttggcccacaaactcctgcgccactagctttagggggtttcggccatgcttggcgcgacgcggatttgcgtggggtgagactttctggtacgctttatgtcttgtgcgcggatggcgtgtgcttccgggcattgccactttagctcagtcggtagagcggctcactcgtaatgagcaggtcgacagttcgattctgtcaagtggctccagcgccctagatgtgaaagcatctagggtttcgcatatcaggagcgtttcgccccgatatggctacttgcgcgagtggcggaattggtagacgcgcaggatttaggttcctgtgtctttgacgtgtgggttcaagtcccatctcgcgcactttcggaaaacggcggaattccgccagttcttggtcattgtagtccactcaataagcctttttgagaacatgttgaaaacattttgcccgtttgcgtcccaattcttccacagactggaggatttgggacgttggggagcttgtttgcgggtggattcttccagcgggtggaggatttgggacgttggggagctcgtttgcgggtggattcttccactgactggataatttgggacggtggcaggcttatttgcgggtgaattcttccagcgggtggaggatttgggacgctgaggggcgcgtgagcggagtgtttcttccagtgggtggaagaaacaggacggtgatgggtggcttggtggcaggggatgctcctaagatggcttcgggtaggaagagaaagagatgattagggattaggggagtgtcgtgtctgcgctgattcagcctgttgcgctactgctgattattctcgccggatacttgttcaaacgtgccggcctgttcgaagatcgcgattaccgcattatgcagaccattattttcaatctggtgctgccaggcgcgatcgtctattcgtttgctacgaatccgcatgattccagcatgctgttgatttcgctgttcggcctgattgttgcgttcattccgccggtcgtggttttcttgacgtcccgccaccgaccggtgcagaaccgtgcgttcatgatgttgaatggttccggcttcaacgttggctgcttctgtttcccggtggtgcaggcgtttcttggcacgggcgcgatcgtgcccgccgccatgttcgacattggcaattgcgtaatggttgccgccggtacgaatgtgatgacgcaaacgctgctgcacatcaagcctggcatgccgcttaccgaacagtatcagggcaatgcgcccacgctcccgtatgtgaagccgaaagacaaggatgccaaacgtcttgcccgcaaggcgttggcccgcaacgtgttcaagggtttcttcggttcggttccgttcgacacgtacttggtgatgattattctcacgctcgctaacgtgaagattcctgacattattgccgcgctcgtgcagccgctttcgaacgcgaattcgttctgcgcaatgctgatggtgggcatgcttatggatttgccatctggcaagcaggatgtgcttcagttgttgaaggtgattggctggcgactgccgtttggtattgcgtttgctactgcggcttggctgctgctgccgtttggcgctgagattcgtgaggcggctgcaatgtgttgtttggcgccgattgcagtgttttccacgctgtttaccgacaaggtgcttggtaatgcgaagcttgctggttttacgctgtcgattactgcgattatcagtttgctgctgatgaccggcgctcacttcttgttcgtcgcgctcgcataagagcggcaaggagatctttaccgggtgcgggagattgtttgtgaccccgcagagcacgaagtcgttgaatgcttgcttgctggtagttgcagtgccgttttcttgtcgttcactgcataatgcgatcgtttcgtttattacatgtttggaagtgttacgaagacttgcgccggaaccatgcatacgatttcagtaatcgtcgaaaatgcgcatgtcgaagacggaaggttgtcggaaccgcgctatattgcgaatcttggcgaatgtgttaactcaggaaatatttttgtgttgttctgtcttcttttgtgagtatcttgtgaggtgaagagatacggaatgcgacacgcggaaatccgcagagaagccgcaatcgcatccgcttcatagtgatgatgaaaggacctatacaccatggccatcaatcctcctgttgacgccaccaagaccccggagtgggccgcactgcagaagcactacgatgagctgcagtccgaaggcatcagcctcaagcagtggttcgccgatgacgccgagcgcgtcgagaagctgagcttcgacgcgggcgacctgcacttcgacctgtccaagaacctgatcaagccggaaaccctgcagctgttcgcagacctcgccaaggccgtcaagctcgacgagcgcaccaaggccatgtacaccggcgtgcacatcaacaacaccgaagaccgcgccgtgctgcacaccgcactgcgccgcccggccgaagacgaaggcaagtacatcgttgacggacaggacaccgtcaaggacgtgcgcgaagtgctcggccgcatctacgcattcgccgacaaggttcgctccggcgaatggaccggcgtttccggcaagaagatcgaaaccgtcgtcaacatcggcatcggcggttccgacctgggtcccgtcatggtgtacgaagcgctgaagccgtacgctgacgcaggcatctccgcacgctacatctccaacatcgacccgaacgatctggccgaaaagaccaagggcctcgacccggagaccaccctgttcatcgtcgtttccaagaccttcaccaccctggaaaccctgaccaacgctcgcgaagcccgcacctggctgctcgacgccctcaaggccgccggcgcagtcgacggctccgacgagaagaacgccgaagccatcaagaagcacttcgtcgccgtctccaccaacctggagaaggtcgctgagttcggcatcgacccggccaacgccttcggcttctggaactgggttggcggccgctactccgtggacgcagccgtcggcacctccctcgccgtggtgttcggaccggaacgtttcgaagagttcctgcacggcttccatgagatcgacgaatacttcgccaacaccccgttcgagaagaacgtggtcgtgctgctcggcatgctgaacgtgtggtaccgcaacttcttcaaggtcgcatcccacgccgtgctgccgtacgaccagtacctgcaccgcttcccggcctacctgcagcagctgaccatggaatccaacggcaagtccgtgcgttgggacggcaccccggtcacctccgaaaccggcgaaatcttctggggcgagccgggcaccaacggccagcacgccttctaccagctgatccatcagggcacccagctgatcccggccgacttcatcgcgttcgtgaacaccccgaacccgaccaaggacggcgaccaggacgtgcacgagctgttcctcggcaactacttcgcacagaccaaggctctcgccttcggcaagaccgctgacgaagtgcgtgcagagggcactccggaagagatcgttccggcccgcgtgttcaccggcaaccgcccgaccacctccatcttcggcgtggcactgaccccgttcgcactcggcgagcttatcgccctgtacgagcacatcaccttcgttgagggcaccgtgtggggtctggactcctacgatcagtggggcgtcgaactgggcaagcagctcgccaagcagatcaccccggccatctcccaggatgacgaagcactggccgctcaggacgcttccactcagtccttgatccagttctaccgcgcaaatcgcaagttctgatttctctaaggattaaatagccttcgaaagggctctgcacgggatgcagagccctttttgctacccctggccatcttcaaaaggtctggcgggtgaggtatttttgaatattgctgtgccgggattcaggacgccgcataatcctgattcccttcgggtccagccgagaacaatcgcaagattgaacggaatgttgcacaaacgcaagttaccgtgattttcggcggattggcaatccttcgcaggcagacctgcggagaacatacgaggcagaacgaaattgaaaaatcgtgaagcccttacctgtgcgctgatatgcggcggcgactcgaggaaacacaatggttaacgctattgaggcatttgacgccaagcacatgaagccggccgaggaaatcccggcattccgtccgggtgacaccgttgaagtcaacgtgaagatccaggaaggcaacaactcccgtatccaggccttcaccggcgttgtgatcgctcgtcagggcggcggcgtccgtgagaccttcgttgttcgtaagatcagcttcggcaccggtgtggagcgtcgcttcccgctgcactccccggtcatcgactccatcaaggtggtccgcaagggccgtgtgcgtcgcgccaagctgtactacctgcgcaacctgcgcggtaaggccgctcgtatcgttgagcgccgcgacaactccgagaagtgagtttcaaacgcaaataaagcgtgaaattggccctcagccttacggccggagggcctttttctattcttggccgctatgataggggtcagtgtgcaaaccggacgataaaggaatcatgtatgaggcatgccaaagaagaaaacaatagcggcgacagctttggcttgcgcgacaccttggtctggtgcggaattcctattattatcgtgctgctgatacgcattttcctgctcggattctacgtgattccctccggatccatgatgaacaccatcgaaccaggtgaccgcgtgatcacctcgaaactcaccccgaaagtcttcgatctgaaacgcggcgacgtggtggtgttcaaggaccccgaccactggctgcggcaggaagacagtagcaaactcggcggtgactacctcatcaaacggctcatcggattgccaggagacaccgtggcatgcgaagggccaggtaagccgatcaccatcaatggtgtggcgattgacgaaagcgcatacattcgccccgacgtggatcccagctcattcgcgttcaacgtgaccgtgaccgaaggacacgtgttcgttatgggcgacaatcgcgccaattctgccgattcacgctatcatcagggtgattcctcgcacgggctcgtgcccatttccgacgtcgtgggcgtagggcttgcgaaatattggccgttgaaccgcattggcggacttgactcgcaccatgaggttttcgccgatgtgccggaaggatccgcggcctgatggcggtttccgtaattcccaccttggatttggaacgtgcgattgccgagcaaggctacgacgtgatcgtcggcttcgacgaagtgggccgtgggtcgcttgcgggaccggtgatggttggtgcggcggcgatttgggcgcgcgacttagacgggccggctggagcttcgcaaggaggctcgcaagaatcttcgcatctggaagtgccgaaaggcgtggccgactccaaaatgctgaccgaacacaagcgcgaagccatcttcgacgaactcaaatcctggtgcgcatcttgggcggttggcgccgccagcaacaaggagattgacgagtggggcatttcccatgcactcggcgtagccgcgttacgtgcgttggcacaggcggaggcgaagctcggcattgacggcaacggcatgctctccggcaaaccggtgaaggtcggcgcgatcctcgacggaccgaacgattacatcaccaagacgctgaacacctttgacgcgcccgaagtgccggtgccggcgagcgttaccaccaaagtgaaaggcgaccggtattgcgccgccgtggccgctgccgcggtcatcgccaaagtcacccgggatcggctcatggtcgaactgggagcgcaaccccaatatgaaccatatgaatgggtccacaacaagggttacggttcggccgcacaccgtgacgccatcgctgaattcgggcccagcgacttgcaccgcctgtcctggcacctcgtctgacatacggcatctcatccgcagtccgcgattacgctaatccttgcggatgatgcatgccggaaggaaacctgtaagttcatcccgccgtctgatggccgggaccaatccgtttccgtaccgtaggaaacatggaacacatacttcaggcgaccgatctggtcatggattattcgacccaacaggcgacaccaaacgccacacacatgctggcgctcaatcacgtggatttcggcatccaggcaggcgaaagcatcgcggtcatgggaccgtccggttccggcaaatcgacgttactgcacgcactcgccggcatcatcaccccgacagccggcaatgtgatgtttcgcggtgccaacctagcgcggttgagcgacgctgaccgcaccaaactgcgccgcagcgccttcggcttcgtcttccaatccggacaactgctgccggaactgccggccatcgaaaacatcgcgttgccgatgatgctgggcggcgcaagctaccagcaggccaccgacatggccatgctatggctggaacgattgggattgcgccagctcgcgcaacaacgtcccggcgaaatgagcggcggccagatgcagcgcatcgccatcgcacgtgcgctcgccgcgcagccggcagtcatcttcgccgatgaaccgaccggcgcgctcgaccagaccaccggccacgaaatcatgagcattctcatgcggaccgcacgacagaccggcgcggccgtggtcgtggtgacgcacgattcgaacgtggccgcattttgcgatgccaccgttactatgcgtgacggcaggttgagctcgccgcagcaatcccaacctaccgccggaggcgcacgatgaacatgttccgattatggcgattgttccaccgctccggcacccgcggcacatccggccgcacctctgcgctggccatcgttgccttcgcatccgccaccgccgtcttcctaaccgtgctcggaggcctgcatggcttcatctggcgggcctccgccgaccacacgttcggttgcatgatcgattccaacaggtgcgcgcccggtacatacgaaacatggtccaaagccctggcgcacgccgacaagctcgtcgccacggtcggcgacggccattggacggccgaccaggccacagccgtcatgaacacctattccgacggctatgtgatgctcgccgcattcgccagtctgctactcatcgtgccgttcgtggcgctcgccggctcggcggcccgtctcgcggcctcccgcagggacgcacgtctcgccgcactgcgacttgcgggcgccaccaccgcgcaggtcacgaaactcaccgcgctcgatgcgggtggccaggctctgcttggcgcgctggtcggcatggccggctacttcgcgctgataccggcgatcatgctgctcgacttccaaaaccagcatttcaccttcgaacagttgtgggtgggactgcctgccctggcggctgtgaccgtcggagtcacgctgcttgccttggtctccgcgctggccgccctacgccgcgtggccttcaccccgcttggcgtgacgcaacgtatcggacaacccatgccgtccgcatggcgcgcactgattttccttgccgtgttggccgtaggctacctgctgctcaacagcatctccgcattcgcgcacttgggtcagatggtggtctacgccatcatcttcggcgtcttcttcctcggcttcgccatggtgaacgtcgtcggtacctgggtggtggcgatgcgcgccagatcgcgtgcgaaacacccgaaggacgcggccactatgattgccatgcgccgtatcctcgacaatcccaagcgtgcttggcgcaacgtgtccggcgtggcgctcgctgtgttcatcgcggggatgacgtcggtgtgcggattgctcgccaccggaatcggaggcaaccacgacccgttcgacccatctatgctgtacatgcgcgatatagcgatgggtggtttcctgacgctcgcctttgccgcggtgctcgccgccgtcagttccggcgtgatgcagacgagcaacgtctacgaccaggccgacgagtaccgcatgcttgcgttggaaggcacggatgaggcgacgctcgacaaggcacgcatgatggaagtgatcaccccgctcaacacggtgatggccgtttcattagggtgctcggtgttgttgctgtttccgattctggcaacgtcgttgctcaatccggcttcgttgcttacgttggccgcgggaatcggcttgtgttatgcgctgatggtgctcggagggtgtgccgcgaatcatgcggcgcacgggctcggtcatgccggctaccgtacggacgattgatggtctcgccgcggcggtcgtggataccgcggcgaggactggcgaggtcagccgagcagcaccgcgatgattgcgatgaagatcggtgaggtcagtgtcgagaagagaatgccgtcgcgtgcgaacgagagacccacgttgtaccgcgccgcgtagttgtagacgttctgcccggtcggcagggcggcgagcaccacgcacgcgtacaatgtggcgccgcggaagcccatcacgaaatacgacagcaggaacgcgataattggcatcacgatgttcttcaataccgccaccgtgaacaccgcgggaatattcgacttgtcctgcagcggcttcgtgccgtgcaacgacatgccgaatgccatcaaaatcattggcactgcggaatcgccgatcatgtcgatcggatcgtaaatacagtccggcaccacgaaatgaccggtttttgcggaaatcgcggatacggcgatgcccagcagcgaaccgataagcagcggctgatgcagcggctgcttcagaatctccctcgtggagaccttgcctttggtggtcacatcgagcacggtcaggccgatcggtgtgaacaccgcctgttgcatgaccagaatcggcgcgaccaaagcgggattgcccagaatgtacgtggcgatcggcagaccgatgttgttggagttcagatacagcgaattcaacgcgccgatggtggcatccgccgccttcagatgaaagaacagcctattgaggatcagaaacaccaatccgaccagcacggccgagaagaacgccacaacaatggaggagtggaatatctcgaagattctctccttggacaggatggcaaacatcaggcacgggctcgatacgaaaaagctgaacctgttgagcaccatctgcgcggtaggtccgcctatgcgcatgcgcgcggccacgtaaccggtgccgatgacgatgccaatgacgcagaagccttccaatgcgcttaacagaccaggcatgacactcttcctttcgctctcggccgttggtttggccgctatccagtgttgcaccatgcatatggataacatccgatccgtctcaaaagcgttgtcgaacggcgatgtcggttccggtggtgctggataatgggcggtatgaacgaacttgagattggattttccgcttccgccaccaggcaggagcagctgaacgagctgatgacccagatcatgggaacctattccgtgagcgacgacgaagggccgttgaccgacgcggtcgaagcgtttttgaataaacagcagcatctgacagtgcgcaggcatggcgatacgctggtcgcatccacgaattttgggcgtgagtgtcgcgtgatcctcgccgggcatctcgacacggtgccggtgatcgacaacttcccgccgcgatggctggaaccgggcgatccgctgattcgcgaggatgttgccgccggccatgagcgggagcgcgtgatatgggggcgcggtgccaccgacatgaagggctccgacgcggtgatgctgtatttggcggccacgttgacggatgcgaaatacgatctgacatacgtgttctacgatcatgaagaagttgctgccgaaaagaacggcctgcgcaaggtggtcgaggcgcatcctgattggatttccggcgattttgcgattattggcgagccgaccgattgcggtattgaaggtggctgcaatggcacgatgcgtttcgacgtgatcacgcatggcattgcggcacattcggcgcgagcgtggatgggcaagaacgccattcatgcggccgctgagattctgaaccggctgaacgcttatgaaaatcgtgcgattgaagtggatggtctgacgtatcaggaggggctgaatgccacgctgatttcaggcggcaaaggtacgaatgtgatccccgacgaatgccgcgtgcatgtcaactaccgttttgcccccgacaagtcgttggctgaggcgaaggcactgatgattggtgcggatgccggtgcggaattgggcaatggcgagcatgttgccacgggtggcgtgttcgaaggcttcagtattgagatgaaggacgagtcgccttccgcgcgtccggggttgacgtcgccgcttgcgcagtcgctggtggaattggtgcgcgaacgtactgggcgtgagccgatggccaagcttggctggacggatgtggcgcgattctcgatgctgggcattcccgcggtgaatctgggtgcgggcagtccgttgctggcgcacaagcatgacgagcagctgccggaatcggatctgctgctgatggccaacttgcttgaagactggctgaagtagctgtctgctgcctttttctgcctcctgttttctgcctgctatcggctgtttgttgttttccgtcttctgtctgcacaagtcggatcggctgtctgcacgagtcgtaatctgtgtctgcatttctcgcgaatcgtgatttctttcgacttgtgcagacggagcaacgacttgtgtagacggggcctgggatttgcgggcggggaaagcaggcggtgagttgcaggatccggaaaatttcccgtcatgtcacgttccgttgttttttgtgtcatacttatagacggtggttctgcaaatcaccgatgcatccgaaggcgttgatcccctcgcgtgaagttcatgtgtgtccgcgagcgctggtgtccgccgtcgcatgatgaggacttttgacggaagttgcttcctacgggcgccatgatgcgcggccacggtgagagcgtggtgtgagaaccgtatgaggcctaagcgtgggcggcgcgattgcagcgtgtcgtcgaggagccattgtgcctaataccagtgagggcttcgatcaggtcgaagcttcggcatcgcctgagcatgccgtgaatgttgtgaaattcgagtcggtccagtccgatcctgccccgcgtcgccgtcgtggcggtcgtcgcgtggtgcgtggcgtgggagctgccggtgcgtccttggagttgaaggtcgaggagcatgcttcggctccgctgttcgaggagccgaagttgccggttgcgcaacctgcgcatgataccggtgattccgctgattccgagggtatgacccgtccgacccgtcgccgtcgtcgtccggtccagtccgatgatgatgttcgtgagattgccaacgaacggccgacgcgttctcgtcgccgtcgttcggtgcaggttgaggatgagcaggacgaggatcgtccgtcgcgtcgtcgcagccgtttcgccgatgatgcggatgagtacgatgagatgccgcgtcgtcgcgcttccgtcgatgattcccatgatgaggagtcgtctgtggagcgtgccttggatgccgtcgatatgttgccggaaggccatgaggtccgccacaatccgcgtccgatgatgtctctgcttttccaggagccggttttgccgtccgttgcggattcccgagacagggcagacgacgatcgcgacgattcccgtaatgaccgtggcgagcgtaatgatcgcaatgcgcaggaccatgaggatgagcaggatgaggatcgtccgtcacgtcgccgtcgccgccgcaatcgcgacgttgccgacgaagagcgttccgaagacaatcgcaatgaacgcgataatcgggataatcgcaatgatgatgcggacaatgatgaggaaggcggatctcgcaagtcgcgtcgttcccgtcgtttgaacgcgcaggagcgtcgtgccgcagctgaagtcgaacagatcgaagaggatttgatcctcgacgatattacgtatgcgccgattgatgacgaaacccgcaatcgtaatgacgatgatgacgacgagcagccgacgcgcacccgtcgtcgccgtcgcagccgcggcaatcgtgaggaagccgacgaacagcagcgggatagcgatgaaggcgagtcccgtcgtcgccgtgaggacgatgacgaggatgaaggcacggtgacccgtcgccgtcgtcgccgtcgtggcggtgcgaagacggatgaggcggaagagccgctcgtgcgtcgttcccgcaagcagcagtacatcgacgagatcaccgacgtcgaaggttccacccgacttgaggccaagaagcagcgtcgccgtgacaatcgccgtgagcgcagccgtcaaagccagctcatggagcaggacttcctggctcgccgcgagcatgtcgaccgcctgatggtggtgcgcgaacgcgaacgccacacgcagatttccgtgatcgaagacaatgtgctcgtcgaacattacgtgtccgacattcaggaagtcgccactgtgggcaacatctatctgggccgcgtgcagaacgtgctgccgagcatggaagccgcgttcgtcgacattggtcaggcgcgtaacggcgtgctctatgcgggtgaggtgaactgggattccgcacggttggaaggccagcctcgccgcatcgaactcgcgttcaagtcgggggacccggtgctcgtgcaggtcaccaaggatccgatcggacataagggtgcgcgactgacctcgcaggtcacccttgcgggccgtttcctggtgctcgtgccatccggtggcatgacgggcgtgagccgcaagctcagcgagcgtgaacgttcccgcctgaagaacatcgtgtcgaaggtcgcgccgaaagacatgggcgtgatcattcgtaccgcagcggaaggcgcctccgaagaggcgatcaccaaggatcttgaaagcctggtgcgccagtgggaacgcatcacctccaagcgagacgaattcctgcacggcaagcgtccgaagctgctgcaaggcgagccggacgtggcgatccgcgtggtgcgagacatcttcaacgacgacttctccaagatgatcgttgaaggtgaccgcgtgtacggccgtatcgaggaatacctcgacaccatggctcccgacttgaaagacaagctcgaaaagtgggatccggccgaacatgaaggcaaagacgtgttcgacaagtggcagatcgactcccagctgcgcaagggcatggaacgtcaggtctacctgccgtcgggcggctcgatcgtgatcgaccgcaccgaagccatgaccaccatcgacgtgaataccggccgtttcatcggccgcggcaagagtcttgaggagacggtgacccgctgcaacctcgaagcttccgaagagatcgcacgtcagctgcgcctgcgtgacatcggcggcatggtgatgatcgacttcgtcgacatggtcatgccagccaaccgtgatctggtgctgcgcagactggtggaatgcctggcccgcgaccgtaccaagcatcaggtggccgaagtcacctcgcttggcttggtgcagatgacgcgaaagcgcatcggacagggcttggtggaggctttctccgaggaatgcccgacctgcaagggccgtggattcattcttcatgacgagccgaccgtgtccgcggattatgacgatccgtacgccctgaagggcggcgacccgttcgtcaaaaccaacaagcatggtcacggcacggacgtgcaggtgccgaaaggctcctcgccggacgtgaaggccaaactcgcacagatcgcggcggctgccgtggccgccaacaatgcggaactgggcgaggaagcatagaagaataaatgattattccggtctgtcaacctgacacgccggaaacagacttgcggttgtacgcgggtatgtgtaaattagattgctggtgtctggccgcgaggctcgaacgtgccgggcagtaagctttccaagttaataaaggaacggatatgtacgcgattgtgaaggccggcggccatcaggaaaaggttgaggtcggtgacgtcatctacgtcaaccgtctcgaggctaagaagggcgaaaccgtggaattcccggttgctctcgttgtggacggctccaaggttgtcctcggtgccaaggatctcgccaacgtcagcgttaaggctgaggttgtcaacgatgaggccaagggtccgaagatcagcatcatgaagtataagaacaagaccggcgttgctcgtcgcaagggccatcgccagcagctgaccgctgtcaagatcacggctatcgcctgattggcgcagggttagagtcaaggaccgaaaggaacagacatggcacataagaagggcgcgtccagctcgcgcaacggtcgcgattcaaacgcgcaatacctcggtgtgaagaagttcggcggcgaagccgtcgtggccggcaacatcatcgttcgtcagcgtggcaccaagttccacccgggtgagaacgtcggcatgggcaaggaccacaccctgttcgccctcaaggacggcagcgtgaagttcggcgtgcgtcgtgaccgcaaggtcgtcgacgtgattgccgcctgaaatacgcgcaattaacgcttacaagataaagccgcgcccgttatggacgcggcttttctttattttgatgattgctgaggattggtttccttcagcccgtcccaaacgtcacgtaacgttgcatacagttgcataagacatatcaaacggacaataatcggaccgtttcgaacaaacgattaaggtagatacatgagtgatttcgtcgatcgcgtgaccgtccatgtgaagggcggcgacggcggcaacggttccgccggcatccgtagggaaaaatacaagccgttggcgggaccgaacggtggcaacggcggtgatggcggttccgtgatcttcatggccgaccagaacgccaacagcctgttggattaccgtttcatgccccaccgcgaggctggaagcggcaccatgggcttgggagacaccaaagacggttcgaaaggtgccgatctgatcctgcccgttcctgtgggcaccgtgattttcgaagccaaagggccgcaaggcaagcctaagcatccgggcgagcagctcgccgatcttcgccatgccggagacaagttcgtggtggcggccggcggcaacggcggtcttggcaacgccgcattggccaaccgcacccgtcgcgctccgggattcgcgttgcttggcgaaccaggcgaggaacgtgacgtcattctcgaactcaaatccatcgccgacgtggccttggtgggcttcccctccgcaggcaaatccagcctgatcgcagccatgagctccgccaagccgaaaatcgccgactatccgttcaccacgctcgtgccgaacctcggtgtggttatggccggagacatgcggtacaccatcgccgacgtgccgggcctgattccgggcgcatcccaaggcaagggcctcggccttgaattcctgcgccatatcgaacgcaccgaaatcatcgcccacgtcatcgactgtgccacgctggaacctgaccgtgatccgatgagcgactacaaggcgctcgaacatgagcttgccgaatatgccgacaagctggaactgccgttgggcgcaatcccaatccccgaacgcccccgaatcatcatcctcaacaaggtcgatatgccggaagccaaggaattggccgaattcgtcaaaccggaattcgaaaaactcggtctcaatgtgtatgtcatctccaccgcatcccacgaaggtttgaaggaactcaactgggcgttggcggccatggtcgccgacatgcgcaaggaagtcgccgaacgcgaacaggccgaagaagaagcgcgcgtggtcatcaagccgctcgaagagccgcgcaaccgccgtcgccgcaacgacgaaggcggcaccgtgcttgacttcaccgtggaacgcaaggaagccggcaacggcgacgtctggtacgaagtgctcggcaccaagccggaacgttgggtcatgcaaaccaacttcgacaacgacgaagcagtcggctacctggccgaccgcctcgccaaactcggtgtcgaagacgagctgcgcaacaagggagccaagcctggcgacgaagtacgcatcggcaagggtgcgcgagccgtggaattcgattgggatccgaccattgctgcgggcgcggaaatgctcgacggcgcccagcttggcgcacgaggcgtcgacctgcgactgcaggaacaggacggccgttcgcagcgccgcaccaacgcggaacgccgtcgccagtaccacgaaatgatggatgcgcgccaagccgtgcgtgaagccatgatggccgaacgcaaggccggacactgggccgatccttccgtggacgacgaccgccatgacgaaaccagcctcttcggacgcggtgaaaccaccgattccgaaaacgtggaacaatagaagcagcaaaacgcccgctgatgtgccgattggcatgtcggcgggttttcttttcggccattcgaacgcctggaggaaccatgaacacgccatcgcaagcccaagtgcgccgcgccatcgccgaagcgcaaaccatcgtggtgaaagtgggatccagctcgttgaccaaaccaagtggccacctcgatccggaacgactcaacgcgctcgtggcggccctcgcacgcgtgcgactcatgggcgggcgcgtggtgctcgtctcctccggcgccatcgcagccggattcggctccctcggcttcgactcacgcccaaccgacgtggctgaccagcaggcgtgcgcggccgtcggacaaggcctgctcatggcccagtacgagaacgctttctcacaatacggactgcgcgtcgggcaaatcctcatcaccgtgtccgacaccatcgcaccacagcaataccgcaacgtgcgacgcaccctcgaccggctgctcgacctcggcgcggtgccgatcatcaacgaaaacgattccctcgcgtccaacgaaatccgtttcggagacaacgaccgactctccgcattgatcgccaacatcgtagtcgccgacgctttggtgctcctcaccgacgtggacgcgctctacacggcacccccaagcgaacccggatcgcgacgcatcagctacgtgccgaacgtggaggacgcgctcgccaaagtgcaggtcggcggcaccggatcaaacgtgggtaccggcggcatggtcaccaaaatggaagcggcgcgtgttgcggcggtctccggcattcccgcagtgctcacctgcgcggcaaacgcaggcccggccatgatgggcgacccagtcggcaccgcattcgcccccatcaacgaccgtggatcatcacgccgcctatggatcgggttcgcagcacacccgcaaggcacgctcgtggccgatgccggcgcttccaatgcggtacgcggaggggccgccagcctgcttgccgccggcgtactcgaagtgcggggcgatttcgccgccggagacgcggtgtggatcgacgatgaagcgggcaatcacctcgcaaaaggcctcgtaggattcgattccgaagaaatcccgcaaatgctcggccgcaataccgcccagctcaagcgtttcctcggcgaagaatacgcccaccccctagtccaccgtgacaacctcgtcttggtttagtccctttccctcttttgttcggtgccctgtaaatagcaatatgccgcccctaccggtcaacagggaaaaggaattccaaaatgtgctaaaaggctgttgtttttcgggcgggagggatagcatggcaaacatgactatggctgactggcagactctttccgaacgtattaaccgcgtggctccgagcgctactctggccgttgattccaaagcgaaagcgatgaaagctgaaggaatcgacgtcattggatttggtgcgggcgaaccgaactttccgactccggctgcgatcgtcgcggctgcggccgaagcggtgcaggatccgaagaactatcgttacactccgacggcaggtttgccggaattgcgcaaggcgatcgcagacaaaacgttgcgcgactcggggtatggagtcgatccgaatcaggtgatcgtaaccaatggcggcaagcaggccgtgtacgaatcctttcaaatcctgctcaatgatggcgacgaagtcatcattccgacgccgtattggacgagctatccggaagccgtgaaactggctggaggcgtgcctgtcgaagtgttcgcgggagctgaccgcaatttcgagccaagcttggaagacctggaagcggcacgtaccgaacgtacgaaggccatcatcgtgaatacgccgaacaatccgacgggtgccgtgtggaatccggaaaccgtcaaggcgatcggcgaatgggctgtggaacaccacgtgtgggtgatctccgacgaaatctacgagcatctgaactacgatggtgcaaaaaccacgtatatcggcgctgcagtgcctgaagtgcgtgatcagctgctggtgctcaacggcgtggccaaaacctacgctatgcccggctggcgtgtcggctggatgatcgctccgctcgacgtggcgaaggccgcatccaagctgcaggggcatatgacgtcgaacgtgaacaatatctcccagcgtgccgcgatcgcagccgtgtccggatctcttgacgccgtgtacgagatgcgtgaggcgttcgacaagcgccgtcagaccatcgtcgccgcgttgaacgatatcgaaggtgtgaactgcccgacgccgaccggcgcattctatgcgttcgccgacgtgagcgcactgctgaacaagccgctcggcaccagcaaaaccgcttatgcgagcacgtccgaactggctgcggcactgcttgacgaaggtcatgtggcggccgttccaggcgaagcgttcggcgctcccggctacttgcgattctcgtacgcgcttgccgacgacgacctcgttgagggcatgaagcgtatgaagcagtgggtcgaggactgatactggcctgactgagacttttcacacgattcgcaccgcggtgacatgccgggtgcgaatctttttttcgttgaaaaatagcggttttgggacatttcttgaaaaaccggttggactaagtcgcaaatacccgctattatttcgacttggcggttttgccgcttacttcttgcgtggtttttcgcacaaaatcctcgccagcaagtagaaacggcagagtacacctagggaagtggcgcaattggtagcgcaacggtctccaaaaccgtaggttgtgggttcgagtcccgccttccctgccaagcttcttacaacaagctcagcggaggattattatggcgaaggcaaaaaatagcgaaaaggccgttaagccgaacatcttcatgcgtcttggcttgttcatcaaacagattatcgacgaactccgcaaggtcgtgaccccgaccagcaaagagctgttcttctgggcactcgccgtgttcatcttcgtgctgctcctgatggcactggtcaccggcatggacttcggtctgggcaagctgaccctgtggatcttcggctgatcaacgacttgaaggtgaaactgcatgactgacgaagtgttttccgacaacctcgacgaagctccagaagctgatctcgaggccgtagctgccgttgaggagctgcaggccgagggtgaaagcgttccggaagtcgctgaggccgagccgactgctgaagctgtttccgaagagtccacggaggacgagggcggcgaagagctggatgctggcgccaaggccgtcgaagacttctccaacagtctgcgcaccctcgaaggcaagtggtacgtgctgcacacctactccggctatgagaagcgtgtgaagaccaacgttgaatcccgtgtggcaagcttcggcatggaagataagatcttccagattgaagttccgatggaagaagtcgaaaagcacaccgaaaagggcaagaaggtcatcacccgcgtgcgtgttcccggctatgtgctgattcgcatgcttccggatgagaacgcccgtcgtattgtgcgtgaaaccgaaggcgtcaccggcttcgtcggtccgaccaaggaaccggcgccgctgagccgcaaggaagtcgtctccatgatggctccgatgatcgcttccgaagcgctcaagaaggctggtgacaagccggccgccaacaagaagcgcgtccttgaagtctcctacgccgttggcgatcaggtcaccgtcaccgacggtccgttcaccaccatggcagctgtcgtctccgacgttgagcccaccacccagaagctcacggtgctcgtgtccatcttcggtcgcgacacgccagtggagttgggcttcaaccaagtagagaaattggcctgataagtctttgaaagaccccgcgcattgcggggtctttttttgtctgggggagtgggcacaataggaaagcttgtgtctggagggtttggcgtgcctgaatgagagtacggaatccgctagcacagcacagcaatatacgttgcggaaggaaccggacgcgggaaacctactccggtgccgctaccaccgcttctacagaaagaagaaccatacaatggctcctaagaagaaagtctcggcgcttctcaagctccagattcaggctggcaaggccaacccggccccgccgctgggcccggcactgggttcccatggcgtgaacatcatggacttctgcaagcagtacaacgctgccacgcaggacaagatgggccaggtcatccctgttgagatcaccgttttcgaagatcgttccttcaccttcattctgaagaccccgccggcggcagctctgctgaagaaggccgcgggcatccagaagggtaccgaaaacccgctgacccacaaggtcggctccgtcaccaaggctcaggtccgtgagatcgccgaaatcaagatggctgatctgtccgcacgcgacgtcgaagccggcatgaagatcatcgagggcaccgcccgctcgatgggtatcacggttaccgactgagaggagagggacaaatggtaaagcgttccaagaagtaccgcgaagcttctgagaagatcgatcgcaacaatctttacaccgctaacgaagccatcgctctcgtcaagagcatgccggagtacaagttcgatcagaccgttgaggccgtgctgcgcctgaacgtggatccgcgtaaggccgaccagctggtccgcggttccgtcaacctgccgaacggcaccggtaagaccgccaaggtcctcgtgttcgcccgtggcccgaaggccaccgaggctctcgaggctggcgccgacatcgtcggtgacgacgatctcgtgcagaaggtcgccgacggcttcctggacttcgattccgtggtggctaccccggacatgatgggcaaggtcggccgcctcggccgcgtgctcggtccgcgtggcctcatgccgaacccgaagaccggcaccgtgaccatggatgtcaccaaggccatcaaggacatcaagggcggcaaggtcgacttccgtgttgacaagaatggcaacctgagcttcctcatcggcaagctctccttcaccgagcaggctctcgacgagaacttcaaggctgttgccgacgaaatcaagcgtctgaagccgtccaccgtgaagggccgctacgtcaccaaggcgaccatcacctccacgatgaacccgggcgtcccggttgatccgacggtcatcgcctgagcaatatagcttgcagatagcttctatatagcttgcaaaagacccgcatcctgccccaacgcgagatgcgggtcttttcatatatatcttgcgattatctatctcatttaataaataatgatcctgcaatcgtctgactatcaaagaatctcaatgaaaccagatatcagatagatattaaaacagagaagtgatgttcaacggtcgcgcatacggccaatcgcaagcgccgtcgtcaaaacgtatgcgtcacgcgggtcggtcgcatcccaaccggtcgtttccgcggcacgcttcaaacgataacgcaccgtattcggatgcacattcaattccttcgccgtgttttccaacgaactgccgttgcgcaaaaacgtggaaaccgtcacaaacgtcggatcgtcgggattctcgccatgaagcacctgatacacgttctgatacaactcttcacgagcgtaatcatcgcccaacagcgcccgttccggcagcaactcatcggcacgcaacgggcgggacggcgacgccaaagcgggagccgcctgcaaggaaaacagggtttcacgcaacacgtgcgaagcgccggcgacaccggaacgcaccggactcaaatacaccgattcgtcatctttgaaagcgggcataatcgacgtgcaggtcacttcggcagtggcggcgccactctgacagacaagcgccagcagaaaactgccgtatgtgccaacaatcacatgttctccgcccagatcgcgcaccgccttacgcgcaacgagcgaagccgaagcgggactcgtttccggtgtgccgccaatcgcgaaacaatcgaaatccccacgccaaccaagcacattcatcaacgaggcgacgcgatcatccgtaagagaagtcatcaggcattcgaaagcgagccgttcgatggttgaatcgtcggtgtgccctgccagaaggtcgagaatgtctgcctgatcggagttcataagcgtcaagtgtagccgcccaactggcgaatcgctgaacggaaagcgtcaacgaggtgaagttcattcggggagtgccgctattatgccgcttatgagcgaagtcaaacaaactggaaagcgtggcgagcgtatcggcacattcctcagctggatgctggccgtgctggcatgcctttgggtggcatggtgttgcgcgatcgggccgttgtattggttcggcgatgggctttccgacttcggctggctgaatgtgctgtatttggtggtcgctttcgcgatatggttttcgatagttgtcgcattggtcagattcggccgcggccgtcgcgtacttccgcaatatttcgcacgacggcatgaaaaactatgcaacgagattgcaggaacgccgaccaccgtgcttggcattatgttgcgacacttgcatgatgccgcgcacagccgcccagggcgcgccctgcatgcagtgatcgtatggacggggcgcaaactcatccgctgcaccgactgttggtggaaactcatgctggtgttcgtaatcggctggctgtggattccaaccacgctattggccgcgttcggcgccgacattcgctcgcagatccgtgaattcagctgggccttgaaccagtggacgggcttgaaacagccatatatcggcttcttctcgttcgtgcccatggatatttacccgaccgcgcattacatgtggccggacaatcccacatatctgaccgaccagcacaatgtcgtgctcaccgtgttctacggtgccgcagcggcggtttcgcgctacttcaccgactccaacgatgcgggcatcgtggtgctcgcagccttgcaatggctgttcgccgcattctgctgttcggccaccgccaaccggttcttcaacctgccgtggcgcaggcttggcgtcggcacgttcgacttctcgcatccggaacgccacgattgctggaatatgcgcgattacgcgcatcctgaagcaggcgttgtggcacgcccttccagactgcgggccggtgcgaaaacacgattcatgatactgctgttcttcatggtgtgcccgcttgcggtattcgccacgatttccctgacgaaatcgccgctgttcgctttcgcattcgtatggtggttcggcgtgtggtacgaactgcacatgacacatatcaaagcgctgcccaccatcaacggcaagccgacgtacctacgcaaacgctcgatcatggccttcaccatctcaagctgcgtgatgctcatcagcgcgaaatacgcgtggtacatcattctcttcaccctgatcctggcacttatcaacgatcgcaaacgttggaaaacctatcttgtggcacttctgctgccaaccatcctcattcatggcggcatcgtgttcctcaccaacacgggcgccatcatcggcggcgaccccatcgaaagccgtggcatccaactgcagcagatcgcgcgcgtcgccaaatacaatccgaaaggcattccggcggacgcggcgaaaaagcttgaaccggtcttcaacctcgaccagatggccgaagcgtacttccggcaggacgccgacccggtgaaatcctccggcatccaatcgaagaaagtcagttacaagtggcgcaccgtcaccgaagacgacatgacaaacttcaacgaggcctggcttgaaatcgttgtcgcaaatcctgttatcgcgctcgacgcgtttttcgccgaatgcttcggctatttcgacgtgaccgacctgccatacgtgtcgatggactactacgtgaacaacgattacgtgcagaacgacaatgcgtggatccacctgtataaccacgattggcgcgatgcggtggccggcttcgcgaaaggttggggcaatattcccgtgatcggctgggtgacgcacggcaatctgtacgtaacgctgatgctgctggtcggcgctgccgaagtggtgttgcggcgatggcgctcgctgtcatggcatctgcccctgctgctgctcatgggcgtgatgatcaccgctccggccaacaatttcgaacggcatatgctaccggtcgcgttcgtattcggtttcgtatgcctgcaattctggcgcgagtcgcgtaatgcgcgatcggctgccagcgcgaacgtggccagtgcgcatgaggccagccaggtgcggcaggacgagtagcggctgcgttggctgctgcatgagctgttgcgttgcggcgacattgcgtcggcgcgccgcgctgtagtaggtaggaggtaatgatggcgattttggattcggctgcgatcatgccgcgtacatgcgttgcggcggatcaggtgcttgttttggatacggtgggatctaccaacacgtatgccgcggatttggtgcgtgcaggtcggctgttcggcatggatggcatggacggcattgcagggaacctcgtgtggagcgggcgtgagatcgtggttgtcgcggcgaacgagcagacggccggtcgcgggcggctcgaccatacgtgggccagtgtgccgggggagtcattcatcgtgtcgctggtggtgagcgtgccggttgcgatcgtgcgcgattcgtccgtcaatggttggctgcagatgattgccggttgcgagatgcgtgaggcgattgttggtgcggtatgcgatttcggcggcacgctcgatgaagatgttttgctgaaatggccgaacgatatttttgctggcggcaagaaacttggtggcgtactcgctgaaatggtgccgattccggattgcggggatcgcgttgccattgtgatcggcgtcggtttgaatcttgccgtcgctcaggaacgattgccgatagataagtccacatcgttgcagttggttgcgcgcaatctgcctgatgcgatggtgttgcgcgatgcgattgccgtacgttgggtgcaaggattgcgctcgcggttggctgatttcgaagaggaccctcaccgtgaggctgtgcgcgcccgggaagcgatgaccccgatctgctggacgctcggcaagcagtgcgaggctcattttgtggacggaaccactttgcagggcagggctgtcgcgttaaacgacgacgcctccctgaccattgaggatcaggaaggcgtattgcatcgggtgagcacggccgacgtaggcgtgctcagtaagtaaaaaattacttgattgctgaaatttgccgcaatctcacttcagcttggcaagacctgcgaccacggcggaagcgataacggccttgaccgcatcgcctgcgacgaatcccatggaagccacggccacaatcggcagtgcgatgccggtaatggcggactgcacgatgaaaccaagcagatagtcaagcgcaatgcagccggcgacacaggcaaacaggtaacgtgcggcggtcagcgcgccatgcttcagcgaatcggtgcgcgcctcacccttcagcagcgacgtgacgatggccgccggcaggaagccgatcaggaagccggcgctcgggccaaccaatgccatggtggaagcgccgccggcgaacaccggcagaccgaccgcgccggctgccagatacatgagcatcgcggcgccggcctgcttccacggcagcatcagcgcggccagcatcaccacgaacgtctgtagcgtgatcggcaccggcgtgcccggaatcggcacggcaccggccgcggaggcggtccacatgagcacggcgaacagcgccggcttgaggatggatccgacagtgccgctggtggcggttttcagcgtggttttgagtgtcagcattgcgttacgcacgataattctccttggatgtgattgcattacgttgatgaatcgacgattgtcgacagccgaaatgatggcaagcgcgaaagtgacgaaaatgcaaggtttgtcaacttatgtccccaatcgtaggcttgccaagtttcggtaacgtttgtggagccttacaaaaagattgcgtgtcttttgtgggaaacgagttcacgatttttcgttcgcgcgaccaaacttgacgttatgcctaaaaatgtcaacaaacttctggtggcgaatcgcggagaaatcgcgcttcgcgtagtgcgcaccgcccgtgagatggggattcccacggttgcggtgtacgcggagcaggatcgccatgcacaatacgtgcagatggctgacgacgcatatctgctttccggagacacgtataaagacacctatctcaacgaggatctgctgatcgacattctgcagcgcagcggtgccgacgcagtgcatccaggctacggattcctttccgaagtggccactttcgcgcagaaagtgatcgatgcgggtgcggcttgggttggtccgaatccgaaagccctcgtggatttgggggataagatcaccgcacgtcgtgtggccacgttcgccaaagttccgccggttcccggcatttcccagtcgatttccgacatgcgattgctgctggatttcgcgcacacgcacggttatccgctcatgcttaagcgtaccgatggcggcggcggtcgcggcatcacgctcgtgcacaacgatgacgagctgcgtggtttctacatgaatcatgatgcgctgcagggcggtgatctgaacgaatatttcgtggaacgattcatcgacaaaggacgtcacgtcgaaacgcagtgcggccgcgactcgcacggcaacttcaccgtgtattccacgcgcgactgctccgtgcagcgccgcaatcagaagcttgtcgaagaggcgccggcaccgttcctttcctccgaggtgaccgaccagctggaaacctactctcgccgactgttcgaagccgtcgattacgaggggcttggcacctgcgaattcatggtgaccgaacagggcaaagtgtacttcctggaagtcaatccgcgtctgcaggtggagcataccgtcagcgaggaggtctgcggacttgacctggtgcgcgagcagctgaccatcgccaacggtggggaactgaccgtgaaccatccgcttcgtggacacagttttgaactgcgcctgacctgcgaggatccggcgaagaacctcgcgccaagctccggcacgctggcctcgttgcgctggccgtccggcccgggcatccgtgtggattccggcgtggtcgaaggcgacaccatttcgccgaaattcgattcgatgatgggcaaactcgtggtcaccgcatctgaccgagcggcagcagtggcccgcgtgcgccgcgccttgagcgagctgaaggtggaaggcgtgccgactccggcaagcttgttcgaacagattttcaacgacgacgaattcaccgccgaacacggtgttgcatacgatgtcagcaccaaatggctggaacgcaagtacctcaacaaggaagccgcatcatcgcaaggcgggcagccggcgtccatgtctggcgcttccgaggtcgacaagaaggaatccagcgaaaccttcgtcatcgaagtcaacaatcgccgagtgtcgctgaccgtgccgaacgacatcgtcgccaacctgacgggcggtgccaaagcacgtgatgcgaaacgtgccatccagccgctgcgtgggcagggactgcatcatgcgcagaaaaaacagcaaagcaatgacggccaatccggtgtgatcgcaagcccgatgcaggccgtcgtgacgcgtatcaatgtggccgaaggccagcaggtggccaagggcgacctgctcgtcgtgctcgaatccatgaagatggaaaactacgtgtatgcgccggtcaagggcgctgtcaccaagattttcgtgggacccgcggcgggcgtggaagccggcgaaacgttgatgaccatcgacgtgaccggagcgaacggtacgaaagccggcgaaaacggcgcaactggcgctgctgttgacggaaccgcaaccgacggaactatggaagggggtaagtgatgactgatatcatcgcaagcccggccgtcaaagaagccgtgaagatcgtaatggagcagcaggagcgactcggcaaaaacgcggccgacctgccgggcgcatcccagccaatccgcgcatccgtgcttcgtgcggcgcaactcgcgcacgaagcggaagatcatgcccgcaatcgccagcatgtcaaaggcaagctgacggcgcgcgaacgtcttgacctgctgcttgacaccggttccttcgaggaaatcggacgattctgcggcggcgacatcaacggcggacgcgcgggagcggcggtcatcaccggtttcggcgaagtgttcggacgcaaagtggccgtatacgcacaggacttttccgtgcgcggtggcacgctgggagtcgcggaaggccgcaagatctgccgattgatggacaaagcgctcgacttgaaagtgccgatcatcgcgcttatcgattcgggcggcgcccgcattcaagagggcgtggccgcgctgacgcaatacgggcatctgttccgtaaaacctgcgacgccagcggtttcgtgccgcagctctcgctgattctcggcccatgcgcgggtggagccgtgtactgcccggcactgaccgatctgatcatcatgacccgtgaaaactctaacatgttcgtcaccggtcctgacgtggtcaaagcggccaccggcgaagtgatcagcatggacgacctcggcggcggatatgtgcacaacgccacctccggtgtggcgcactacctgggcgaagacgaagccgacgcgatcgactacgcacgaaccgtgctcgcctacctgccgtccaactccgacctgcagccgcccacctacgcgtacgccgcaacccgcgccgaccgtgacgtggccaagcgacttgccaccatcgtgccggacaacgaccgccagccgtacgacgtgctcgacgtgatccgctgcatcgtggactacggcgaattcgtgcaggtgcacgagctgttcgcaagctccgcagtggtgggattcgcctgcgtgaacgggcatccggtcggcattgtggcaaaccagccgaacgtcaacgcgggcatccttgacgtggattcctccgaaaaagtggcacgattcgtgcgtctgtgcgacgcgttcaacctgccggtcgtcaccttggtggacacccccggatacaagcctggcgccgaacaggaacatgcgggcatcatccgccgcggcgcgaaagtgatctacgcctacgccaacgcgcaagtgccgctggtcaccgtgatcctacgcaaagccttcggcggagcctatatcgtgatgggatccaaagccatcggagccgacctcaactacgcgtggccatccagccaaatcgcagtgctcggtgcggccggagcggtgaacatcatccaccgcaaagacctgcagaaagccaaagacgcaggcaaagacgtcgaagcgctccgagccaaatacgtggccgactacgaacgcaccaccgtcaacgcgaatctatcgctggaaatgggcgaaatcgacgccatgatcgaccccgagcaaacccgcgaaaccatcatcgaatcgctcaaactgctctccagcaagaaacgcgtgcgcaaaaccaccaaacaccacggcaaccagccattgtgaccggcacgaagtgcgcggatgaatcgtaagcaaacgtaaacgcaagaacacatcgcaagatttttgaaacaagtaaggaacatcatgaacaccttttttcttgaccgactgaacagcgagccgcacgcactcgccttcgcaggccaatccaccccatggccggtgacgctcgccgaccagagcgccaatccggtgctcaacgaagccctgcatacccacgccgacgcagcccaggcactgctgtacccggtgtccgccgacctgctcgccaccaccgggcgcccggtcgacctgtttggattcgaaccgaatccggcacggctcggcgctgccgcagcggcttccgccagcgttccgggcattgcgctcgcccagttgggtgcgctgctcgacgctgcttccctcggctacaatcccgccgttgccaagccggttgccgtgctcggtcactcccaaggcgtgctcgccgtgcacatggtgcaggcgatcgtcgaagcgggttccattgaggcggcttccgcgcaaatcgatgaaattcttgcgattgccacgctgatcggcgttgccggcacccgtcaggcacgtcagcttggccttgccgcacgtcacggcgaagccacgccgatgctgtctgtcaaggacatcacccgcgcccaggtggatgcgctgatcaagcgtgtttccggtgcccgaggcccgatcgccgtggcagtcaccaattccgccacgcattatgtgctctccggctacccggaggatctggccgcgttcggcgtggaagtggccaaggagcacaagcaccaggccaagctgcgcgaagagaaggtgcgtggcggtcgcgtgttcgaaccggtgctcgaataccttgacgtgaccctgccgttccacagcccgcttatggccgaggctgtttcacaggctgtttcatgggcggaatcctgcggaatcaacgccgaccacgctcgcgagctcgccgccgaagtgctgctcaaccatgtggattgggccgcccgcgtgcgtgcgctcatgaaatccaccgatccgagcgccctgtgggtgttggactttggcccgggaaccaccgttggcaagctgttctccaccgttgcccaaggcactggcgtcggcgtggtggaagcctccaccgtggccgatcgtggcgcgctttccacgctggaaaccctgcctgaacgcacccagaactggacccgcttcgcaccaagcatcatccacacctccgccggagacaaggtacgcaccgcattcaccgaactgaccggcaaagcgccggtgctgctcgccggcatgaccccgaccaccgtggaaccggaaatcgtggcagcggccgccaacgccggctactgggcggaactcgcaggcggcggtcaggtgaccgccagcgtgttcgaccgtcatgtcaccaagctggaagaagagcttgaagaaggccgtaccgttgaattcaacgcgatgttcatggaccgctacctgtggaatctgcagttcggatcccagcgtatcgtgccgaagaagcgtgccagcggcaccccgatcgacggcgtggtcgtgtccgcgggcattccggaacttgacgaggccgtggaactcattcacactctcaacgccgacggattcccgtacgtgagcttcaagccgggcaccgtcgaccagattcgccaggtggtgcgcatcgccaaggccgtcgctccggtcaaggtgctcatcgaagtcgaaggtggttccgcaggtggacaccattcgtgggaatcattggacgatctgctgctgagcacctatgccgaagtgcgtgaacaggccaatctggtgctcgtggtcggcggtggcatcggcacgccggaacgtggcgccgactacatcactggcgaatggtccgccgaatacggtcgtccgctcatgccggtggacggcgtgcttgtcggcaccgccgtgatgaccgccaaagaggcgcacaccagccctgaagtcaagcagatgctcgtcaacaccccaggcattcccgccaagggagcagacgccgatccgttcgctccgctgggcgaacagtgggtgccgagcggccaagccaagggtggagtcacctccggcctgagccacctgcatgccgatatttacgagctggaaaactcttccgcgcgttgcggacgcctgctggtgcgcgtgatgaagcatccggaagagctggaaagccgccgtgaggaaatcatcgatgcgttgaacgccaccgcgaagccgtatttcggtgacctgaaggccatgacctatctcgcatgggcgcagcgtttcgccgatctcgctttcccgtgggtagatgaaacctatgccgatcgcttcctgcacttgctacagcgtatcgaagcccgcgtcaccacgaaggaaagcggcgaattcgcatcgctgttcgcatcccgtgccgatgtggaatccgatccgcatgcggccatcgccaagcttgccgaagcctatccgcaagctgatgaactgaccgtcaccccgatggatgaagcttggttcccggtgctcgtgcgtgaatacccgaagccaatgccgttcgtgcccgtcatcgacaacgacctgctgcgttggtggggtcaggatcagctgtggcagtccgaagactcccgttactccgccgattccgtgcgtattattcctggtccgatctccgttgcgggcatcaccaccgttgacgaaccggtcgccgacattcttggccgtttcgaagaggccatggtcaagcgcgtttccgccgaatcgccaagcgcagacaaaaccgcgtttgcccagctcggcgcggcatcttccgcagaagaattcattcgcaaatccccgaacatctcgtgggtgggccatctcatggcaaacccggcgtacggtaccagcaacggtgacgccaactacgaaatccgcaagatttccagcgaaggaagcatcgaaaagtacgatctcgacattcatctcgatacctactgggacaacgatcctgacggtggcgcatccaagcacgccgtacgcgacatcgtcattccgctgaacgtggacggcaacgaatccgggctcttcccggtggtcgaccgcgaccgcctgccggaacacgtgtaccgcatgcttgccgacaccgcgggcatcggcaataccgccatcaccggcgacaagctcaccgccatgcccgttattgagcaggtggcagacaaagccgcccatccgttcggacaggcgcataccagctacacgctgtccgccaacctcggcttcgaccatgaagcggccaccggcggcgcgctgccgagcaatctggtgccgtcgcgcatcgcaccggacgcactcgtcggaccggcatggcccgccatctacgcggccctcggatccgtatacgtcaacggcttcccggtgatcgaaggcctgctcaacgcagtgcatctcgaccatctcatcgaactggaagtcagcgaagacgagctgctcaagcacactggcgaacagatcgcactgaccagctgggccgaaaactacttcgaatcggcatccggccgtgtggtgaccatccacgtcacccacagcgcacaagacggcaccgtgcttgccaacgaaaccgagcgtttcgccatccgtggccgcgcatattccgacgcactgccgccggaagcgccggactacggcggaatcgaagcggaaatcgaaagcactccgcgccgactgctgcgccgtgtcaaggtgaccgctccgcacgagatgaccgccttcgcccgtacttccggcgatttcaacccgatccacacctcgcatcgtggcgctgccgtttccggtcttgcggcaccgctcgtgcacggcatgtggctctccgcaaccgcgcaatacgcggtgcaggcgcttgacggcaagggtgcgcactacgaaatcgcaggctggacctacaacatgtacggcatggtgcagctcgacgacgaagtggaaatctccgtcgagcgtgtcggacgcgtggcacactccggcatggtgctcgaagtgaccagccgcatcgacggcaatatcgtgtctcgtggcaccgccatcgtacgtgcgccgaagtccgccttcgtctacccgggccagggcatacagcagcagggcatggtgctcgacgagcgtgccaagtccccggccgcacgagacgtgtgggagcgtgccgacaaggtgacctgcgagaagcttggattctcgatcctcgccgtcgtgcgcgacaatccgaaggaactgaccgccaacggcgtgacctaccgccatccggaaggactgctcaacctgacccagttcacgcaggtggcgctcgccaccgtggcattcgcccagaccgcacgtctgcgcgaagccggcgccgacatttggccggcctatttcgcgggccactcgctgggcgaatacaacgccctgagctccttcgccggcgtgattccgctggaaaccgtgatcgaactcgtgttccaccgcggttccaccatgcaccacctcattccgcgtgatgcgaagggtcgctccaactaccgcatgggtgcgctgcgtccgaaccagttcggtgtgggcgacgacggcgtacgcgaatacgtcgaatccgtgtcgaaggcttccggcgaattcctgcagatcgtgaactacaacctggctggccagcagtatgccgtggcaggcaccatcgccggtctgaaggcgctgaaggccgattccgaccgccgcgtagccgaatatggcggcaagccggcattcatgctggtgccgggcatcgatgtgccgttccattccacgctgctgcgcaagggtgtgccggaattccgcgacaagcttgacgcgctcctgccgcagaccatcgattaccgtggtcgcttggtcggacgctacattccgaacctggttgcggctccgttcgaaatgacgaaggaattcgcggccaagattctcgaagtcgtgccgtccgagcgcattcaggccgctttggatgatccgcagatttgggattcctatgctgctgatgatcagaagctcggtcgattgctgcttacggaactgctgtcttggcagttcgcctccccggtgcgttggattgagacgcaggctctgctgttcggttccgccgagcagggcggtcttggtgtggaagagtatgttgaggttggtctcggcaatgctccgacactcgccaatcttggtgccaagacgttgcgtctgccacagtttgccggtcgcgatgtgacggtgtacaacgttggtcgcgatgagggccgcgtatatatgaccgattccgattcgttggttccggaagaagatgccgacgattctgcagttgcggctgcggcttcttctgcggctgctgctccggctgttgcctcagctcctgcggcggctcctgcagccgttgcggaagttccggttgccgcagcttccgctggcgctccgtctggtgccgccgttgcggatattccattcaaggcatccgatgcgatcgccacattgctggcttactcggccaaggttcgccccgatcagatcggcgaaagcgataccaccgatacgctgactaatggcgtgtcttcccgccgtaaccagttgcttatggacatcagctccgaactgggcgtggcttccgtggacggtgccgccgaagcgacggtcaaggcgctgagcgctttggtcaacaaggtcgctccgaactacaaggcgttcggtccggtgctgtctgacatcgtgcgcgaccgtgtgcgtggcatgttcggtgccgccggtgtgaagctcggccagatcaccaagcgtgtgaccgatacatggcagcttggtgaagggtggacttcccatgtggtggctgcgctcgtgctcgaaacccgtgagggggccagctctcgtggcggtgatcttgcctcgttgagcacggatgccgcttccaatgcggccgctgccaacgcgctgatcgatgcggccgtgcagaaggttgccgccgacaagggcatcgccgttgccatgccgagcgctggtggcgcagctggcggggctgtggttgattccgccgctttggacgcgttcgcggccaaggtgaccggtgccgatggcgtgctcgcctccacggcgaagttcgtgctgaaccagctgggcgttgccgctccggttgccgaagaaactgctgatgagaacgcggctgttgtggctgcggtcgaagccgaactcggtgctgactggccgaagcaggtcgaacctcgttttgacgagcgcaaggccattctgttcgacgatcgttgggcatccgcacgtgaggatctggcacgcgcctactacaacaacgatgaatccgcattgaacggtagcttcatcggtctcggcaagaccattgccgacgaagccgcctggtatgcaggcaagagcgacaacgcggatctgaaggccgcattcaatcgtgtcgctgccgaagcaggagaaaacgcttccgaatcggcggaaaccagccgtttcgctggagatatcgccgtggtgacgggcgtggctccgaactccatcgcagcccaggtggtcaacggcctgcttgcaggcggtgcgaccgtggtggccacctcgcacagcttcaagccaagcgtgaaggcatgggccaagcagacctaccgtgagcatgcggccggtgacgccaagttgtggctggttcctgcgaacctgtcaagctaccgtgacgtggacgcgttggtcacttgggtcggcaatgtgcagaagaagacttccggtgcgaccaccacgattctcaaacctgcttacgagccgagcctgttcttcccgttcgcggctccgccggtgcatggcagcctcgccgattccggcgaactgttcgaatcccaggctcgcctcatgctgtggggtgttgagcgtgcgattgccggacttgcgaagatcggtgccgacaccgatgtgcagcataagttgcatgtggtgttgccgggatcgccgaaccgcggtattttcggcggcgacggtgcctacggcgaagtgaagagcgcgtttgatgcgattgtgaaccgtgctcgcgccgaaaaggtgtggtcgagccgtgtgaccttcgcccatccgaagatcggctgggtgcgcggcacgggcttgatgggcggcaatgatccgctggtcgaagtggtggagcgtcacggtctgaagacctattccaccgccgaaatcgcggtcgaactgctgaacctttccacccgcgaatcccgtatcgaagcagccaaggccccgctcgacgtggatctgaccggcggactcggcaacgagccgatcgacatcaaggcactgcgtgcggaagccatggaagacgcggcccaagcggaagcggcgaatgccaagaacgcaatcgcaagcaacgaatccgataccgcggccaagacgctcatcaaggcgctgccaagcccgcgtgctccgcgtcaggccaaggtcgatcttgccgattggcagaacgtcagcgcacgtccggaagacgaaatcgtcatcgtgtccgtgggtgaacttggcccatggggctccggccgcacccgtttcgaagccgaactcggcatccattccgacggacaggtggatctgtctgccggcgcggtgctcgaactggcatggaatatgggcctgctgacgtggaacgacagccccaagccgggctggtacgacgttgatggcaacctcgtgcctgaggaggatatcgcggaacgttaccatgacgaggtcgtggcccgttccggcgtgcgtccgttcgacgaaggcatgggcaacgactacaaggacggcaccgacgaggaagaggccgaggtgttccttgaccacgatgtgaccttctcggttccgactcgtgagattgccgaagagtacgtcaagcttgatgaagcgcacaccagcttcgcggccgatgcggaatccggcgaatggaacgtgacccgccatgccggctccatgattcgcgtgcctcgtcgcgcggccatgacccgtacggtcggcggccagttcccgaagggcttcgatccggtcaagtggggcattccggcttccatggtcggcgacgtcgacaagatcgccttgtggaacatcgttactacggtcgacgcctacctgtccgcaggcttcacgccgaccgaaatcctcgaggcggtgcatccgtcgatggtggcctccacgcagggcaccggtttcggcggcatggcgtccatgcgcaagctgtacttggatcgcttcctcaaccatgagattccgaccgacattctgcaggaggctctgccgaatgttgtcgcagcccacgtgatgcagtcctacatcggcggctacggcaatatggtccagccggtttccgcctgcgccacggctgccgtctcccttgaagagggtgccgacaagatcgcgctcggcaaggccgacttcgtggtcaccggtgcgatcgacgacatcggtgtggaatccgtgatcggcttcggcaacatgaacgccaccgccaattcggaggaaatgtacgccaagggcatcgacgcgcgcttcttctcccgtgccaacgatcgtcgtcgtggcggattcgtggaatcccagggcggcggcaccatcctgctgacccgtggcgatatcgcgttgaagctcggcctgccggtcgccggcgtaatcggattcgtgcactcctacgccgacggcgcgcacacttccattccggctccgggattgggtgcgcttgcagcgggcatgggcggcaaggattccaagctggtacgcgatctggcccgtctcggcgtcaccccggatgacatcgccgtggtttccaagcacgacacgtccaccaacgccaacgatccgaacgaatccgaactgcacaacacgttggcccacgccattggccgcgccgacggcaacccgttgttcgtgatctcgcagaagacgcttaccggccatgccaagggcggtgcctgcatcttccaggtcaacggtctgacccagctgttcaagtccggcgtgattccggccaatgccgcccttgactgcgttgatccgaagctcatgcgcgacgaccacatggtctggctgcgcgaaccgttgaaggtcggctccgtcaaggcgggcctggccacgtcgctcggcttcggccacgtgtccggctttgcggcgatcgtcaatccgggcgcgttcgaagcggccgtggccaacaccgcgggcgtcgaagcgttgaacgcgtggcgtgatcgcgccaacgagcgcttggcggccggccagcgtcgccttgaggaaggcatgatgggccgcgccgcgctctacgagccgatcgacaaccgtcgtttccatgaggacggccgcggctacaacgcgcacgaggtggagaaggccatgctgctcgacccgaacgcgcgcctggacgcatccggctacttcgaagcctgattcccgcgtctgagcgcctgaaatttctggcgctcagacgcacgatcatcaaaatcccgtatctgtcgcaatctcagtatttcgcggcagatacgggattttcatattcttgaatcactctactttccgtctgcacgatttccgtttggtgtcgtattttcacttgtgcagacgcgaaacgaggggcgcgcaatgcgggtggcagaggatgaagcgcttaggtaggatggtgtccttgcatgaaagcgaagtgtcgcccgcctgtttcgcggaagccgacatggttcgtttcttcctgaaaactttcgaaaggctggaaaatgctgggtttagggcatgacgtcgtggatgtgcctgcgttcgccgagcaactgggcgaaccggggtcgcgcatgcgaaacctgttctccatgcgcgagctatggcagaccgctcaacgtgtgcaggtcaaaagggacggtgaggcggtgcatcttgcggcccgatgggcgggcaaggaggcttttctcaaggcgtggtgcgaagcgatttcacgcagggcaaatgccgatggagacattgcctatccgtacacgctcgacgattttccttgggcgcgcatcgaaatacttgacgattcccacggcgtgccccgtgtcatgctctcgcccgaggtgcgacgcaagttgcggcaatcgttgggattgccggttgatggggatgatcaatcgtgcgcaatccatatttccatgagtcatgacggatccgtcgcatccgcggtggtgacgatagaagcgtggccgcaagtgattgcgtcaatcgattgacgtcaatcgcgacaacacctcgaaccggtttgataaaaccgtaaaatcacgctacactggtgccaacgtcgtggcaacgaacgctgcggaatccaactcataacaacgaagttccctgggaagaggagtcaaggaatggcacggtccaaatccgacaaagcatttgacgagcgcgtcgcacaatatagtgaggaactgcgcgaactattgacggatctgtatggggagcaggccgacgaagccttccgcaacctcaccgagctgatggccaaagcccacgatgcgcgccccgccgatctgaagcgtctcgacaccaagcgtctcgccgatccggaatggtacaagcgcggcaacatgttcggtatgaccatgtacaccgatctgttcgccggggatctgaagaaactcgccgacaaagtgccgtacctgaaggaacagaaactcacctatctgcacctgatgccactgctgaaaatgccgcatccgcagaatgacggcggttacgcagtggaggatttcgacaccgtcgacccgtcgctcggcaccaacgaagacctcgccgcgctcaccaagaaactgcgtgcggcgggcatcagcctgtgcctcgacttcgtgatgaaccacaccgcatccagccatcgctgggccaaagccgctcaagcgggcgatccgaaatatcaggactactactactgccacgacgaccgcaccatccccgaccagtatgacgccgtggtgccggaagtctttccggccaccgcgcccggcaacttcacctggaacgagcagatgcacaagtgggtgctcacctcgttctatccgttccagtgggatctgaactaccgcaacccgaacgtgctcgtgtcggtgctctccagtgtgcttggcctcgccaatcttggcgtcgaagtgttccgcatcgacgcggtgccttacatctggaaggaactcggcaccaactgccgcaatctgccgcaagtgcacgccatcgtgcgtatgctgcgcatcgtgctcgaatgcgtctgcccggccgtagtgctgaagggcgaagtggtgatggcccccaaggagcttgccgcctacttcggcacgccggaaaagccggaatgccacatgctttacaacgtgtcgatcatggtgaatctgtggagtgcgcttgccagtggggacgtgcgcctgctcaaagaccagctcgacaagcttaacgcgctgccggagaactgctggttcgtcaattacctgcgctgccatgacgacatcggctggggcttggacgagccggtggaggagagcctcggcatcgacccgctcaagcataaggaattcctgtaccacttctacgagggatcggtgcctggcagctgggctatgggagagctgtacaactacgacgaggcatcgaaggacgcgcgcagctgcggcaccacggccagcctgtgcggtgtggaacgtgcgctgatcacgcatgacaagccgctgctcgacatttcgatgaaacgcgatctgatgatgcattccgccatgtcgttcctgcgtggcttccccatgctgagctgcggcgacgaaatcgtgcagctcaacggctgggaatacaaggaggatcccgatcgcgtcgaggattcgcgcaatctgcatcgcagccccttcaattgggagaatgcggccaagcgcaagcaggcgggcacgctgcagaagcagatgtgggacggtttgaagagcgttcgtgagatgcgcgacgatcccgcgttcgctccggaagcatgggtcactacttgggatgcgcataatgatgcggttcttgcggtggtgcgccacgttgaaggacgtacggtattgggattgttcaatttctcgtccgcacgtcagatcgcgcgtcttgattcggacggcgatatcgagcttcctgccgaagttgcgttggagccgtaccaggtttgcgtggtcgaaaaataattattacgatttcgacttgcgattgttgagggagtgtgtataatggctcgagtcgtttcgtgttggcttcggctggcatagacggtgcgcggatgtagctcaatggtagagcctcagtcttccaaactgattacgcgggttcgattcccgtcatccgctccacacaatcgttagagaagaagaaaggcgtgcttgacggcacgccttttgcatacctgccgtacgattgcttcgacgactgggtatgctggacgtgtcgtgacagcggtgcgacaatcgcaatacaacggagcgggtatggcacaaacgcaaggcaacaaggtgacggaagtcgtcgacggcgtggtcgaacaggtcgacgtttccaagcatccaacggcatccattgaggcgtccgatctttccttggccgatatcgaacggcgcaaatcgcatccggggcattgggcgctgttcatcgcgctggtgctggtggctttgatcgcgccttactggtggggacgtgtcatcgcagtcaaggatgcggcttggatggtggccaatctcagcttcctcgatcccaaaggcgtagcgctgatttcgtggacggtcaccattatggcgatggccggtttgggattgatggttgcggatgtgaagaaatggctgtggggcacggttttcgtggtgggactcgccgccgaacagttcgtcgccggcgtatgtctgctgagcttcaacttttggaacgccacctacgtgatgtacggcgattcctcagggctggccaacgcggcgaaccttggcattatcgcagccggatgcggtgtcgccttctatgcggtgctctgggtcggattgctggtatgcatcaaaaaggaatcgaaattcaatgtgctgacgcgcagttgggcatcgttcctgctgttcttcgtgattgagatcatcgcgctcgccgtggtgttgttcggaggtctgctgaacgtggtctgatccgccatttgttgtggattcgatttggtctgcccttcgtgtatgatttccccttggcgtgtttcgcccgcggatagagagcgcgccggtattggaccggcagcaccgcgcagcaatataaggaggatgccgtggcacttacggctgaggaaaagcaggaaatcatcaagacttacgctacccacgagggtgacaccggctccccggaggtccaggttgctctgctgaccaagcgtatcgctgatctgaccgagcacctcaaggagcacaagcatgatcaccactcccgtcgtggtctgctgctgatggtcggcgatcgtcgtcgtatgcttgattacctcaagcgcgtcgacatcaaccgttaccgctccctgattgagcgtctgggtctgcgccgatagttacattcttccgcccgaatgcctccttggcgttcgggcgtttttgcatgacagccgcgttgaggaaaagacagtttgaaagcccaaggtttagggtgcatgaggtctagaatctaaagatgaggaagcgacgaaggtaacgtcgcgtcacgcatgcagaaatcggttggagtccgctgaagaggactgccgatagttggtaaaagaaaagaaaaaggaggaaccctatggagggtcccgaaatcaaggctgttgaagccgtaatcgataatggttcatttggcaagcgcacgttgcgcttcgagaccggtcgtctcgcccagcaggcggatggtgccgtcgccgcctatcttgacgatgattcgatgattctgtcgaccaccaccgccggttccagcccgaaggagaactacgacttcttcccgctgaccgtggacgtggaagagaagatgtacgccgccggcaagattccgggctcgttcttccgccgtgaaggccgtccgagctccgaggcgattctggcttgccgtatcatcgaccgtccgctgcgcccgctgttcccgcacacgctgcgcaacgaagtgcaggttgtggaaaccgtgctcgccgtcaacccggacgatgcttacgatgttatcgctctgaacgctgcttccgcttccaccatgatttccggtctgccgttcgaaggcccggtttccggcgttcgcctggctctgatcgacggccagtgggtcgctttcccgcgttggagcgagcgtgagcgcgccgtgttcgaaatcgtggttgccggccgtgtcgtcgaaaacggcgacgtcgccatcgccatgatcgaagccggcgcaggcaagaacgcctggcacctcatctacgacgaaggccagaccaagccggacgaggaagtcgtcgccggtggtctcgaagccgccaagccgttcatcaaggtgatctgcgaggctcaggccgaactcaagaagatcgctgcgaaggaaaccaaggaattccagctcttcccggagtacaccgaagatctgtacaaccgtatcgatgagatcgcccacgccgatctcgacgaagccctctccattgccgagaagctgcctcgccaggatcgcatccatgagatcaaggagggcgtcaaggccacgctcgccggtgaattcaccgacatggacgatgccgagaaggaaaaggagatcggcaatgcgttcaaggagctgcagcgccagatcgtgcgtcgccgcatcctgacccaggattaccgcatcgatggccgtggcctgcgtgacatccgcaccctgtccgctgaagtggacatcgttccgcgcgtgcacggttccgcactgttccagcgtggcgaaacccagattctgggcgtcaccaccctgaacatgctcaagatggaacagcagatcgacgcactgtccggtccgcagtccaagcgttacatgcacaactatgagatgccgccgtactccaccggtgaaaccggccgcgtcggctccccgaagcgccgcgaaatcggccacggtgcgctggcggagaaggctctcgtgccggtgctgccgaaccgcgaagagttcccttacgccatccgtcaggtctccgaagccattggttccaacggttccacctccatgggttccgtgtgcgcgtccacactgtcgctgctcgccgcaggcgtgccgctgaaggccccggttgcgggcatcgccatgggcctcgtgtccggcgatgttgacggccagcacatcttcaagaccctgaccgatattctcggcgccgaagacgccttcggcgatatggacttcaaggttgccggtacttccgagttcatcaccgctctgcagctcgataccaagctcgacggcattccggctgacattctggcctctgctctgcagcaggccaaggaagcccgtaccaccattctcgaagtcatcaacgagtgcatcgatggtccggccgagatgagcccgtacgcaccgcgcatcatcaccaccaccgttccggtcgacaagatcggcgaagtcatcggtccgaagggcaagatgatcaaccagattcaggaagagaccggtgcggagatcgccatcgaagatgacggtaccgtgttcatctcctccgaaggtggcgacggcgctgaaaaggccaagcagatcatcgaccagatcgccaacccgcacgttcctgaagccggcgaaacctacaacggcaaggttgtgaagaccacctccttcggtgccttcgtgaacctgaccccgggcaccgacggcctgttgcacatctcccagatccgtaatctggccaacggcgagcgtatcgacgccgtcgaagacgtgctcaaggaaggcgacaccgttgaggtagtcgtgcagggcgttgacgatcgcggcaagatctccctggccattccaggcttcgaagatcaggaatcctccgctccgcgccgtgagcgttccgatcgcgatgaccgtcgcggcagccgtggccgtcgtgatgatcgtcgttccgatcgtgacgatcgtgattatgatgatcgtccgcgtcgccgtcgttccgatcgtgacgatgaccgcgattacgatcgtgatgatcgtccgcgtcgtcgtcgttccgatcgcgatgaccgtgactacgatcgcgatgatcgtcgttccgatcgtgacgatcgtgattatgatgatcgtccgcgtcgtcgtcgttccgatcgcgatgaccgtgactacgatcgtgatgatcgtcgttccgaccgtcgtcgcagcagccgccgcgacgaccgcaatccgcgttacgcagccgacgagaactacgacgagtaccgtgccgatcgcgaagagcgttccgagcgtcctcgccgccgcgtccgccgcgactttgatccttttgaggactgacgcctcaaaaggatccctcgcagcatagctgactgactgaagtgccctgtaccggaaggtacggggcacttttgcgtttccatgcagattgcatgaaaatgagacacgggggcatgagttttgtcataacgtacctgggcgcatgcaagaatggtgtgaagagccattaacgaaggagtcgtcatggtcgttggcattatcattgccgtcatcgttgtacttattgtgctttgggccgtcagcgcctacaacgggctggtcacgctacgtaatcgtgtgaagaacggttgggcgcagatcgacgtgcagctcaagcagcgtaccgatcttattccgaacctggtggaaacggtcaaaggttatgcggcccacgaatcccaagtgttcacgcaggtcacgcaggcccgtgccggcgtggtgcaggccgcgcaaagcggtgacgtggcgcagcgcatcgctgcggaaaaccagctgagccgcgcacttgtcaatctgcaggccgtatccgaaaactatccgcagctgcaggccaatacgaatttcatggatttgcagaatcagctgaaatcgttggaagagaagatcgcctacgcacgccagttctacaacgatgtcgtgcagaagtacaatacccagaccgaggttgtgccgaccaatattatcgccggcttgttccatttcgaacaggccccttacttccaggtggacgaagcggatcgtcaggttccgcaagttaagttctgacatgcatgtaaagccccgtccgatgacgatggggctttactgttcaattcggcttgtacggccatctgttgtacggccatctgagggaagaagaagcgagaaagagggattatgacggccaaacagcatgcgtcgcgagcggtgcgcagcttcggtatcgcgatcgtcgtcaccgttggcgttgtagcggccatattgctggccatcgcattggatgacggtggggccgatctgagctacaaaacgctcgactacgatgtgcaggtgcaaagcaatggcgatttgaaaatcacccaacacatcgatatgaaactcgccgaccgcagcgatgacgacggcgaccatccgtggaagcagctgtaccagcagtacacgctgaaggaaagcaacctgaccaatatcaccgatatcagcgtgcgcaacgcgacgacgggagagacctaccagcagggtgatatcgcaatcccaagcagctatagcaccgacgaatggaatcgagaacatgcggggcagtggtatatcgccgatgtttcgcaaggtgacagcaatccgcagccgttcgatcccgcaaaagacggtcttgttgccgacaataccgacgatcgttccaagaaaatcgaaatcggctggaacattcccgccaccacgtcggcgagcagcctgaaattcgatgtgaccatgaccatgcagggcgtggccaccgcctatcaagacgtggccacgttccaatgggagccgctcggcgtgagcaatcagattcccatcggcaaagtcaccggaaccgtcacgttcccggatggcattacggcggataattcatgggcctggctgcacaccgaacgtacgtcaaccaccgaacgtggtgataaggggtcgttgcagttcaccgtgcacgacgttcgtgccggcgactatgttgacgtggtcgccatgttcgacgtcggtgcgaccagcggtgtggcacgcactcgtgataccaccatcaaaaacggcattatggaaagcgaggcccaacaggagcagcagtggcgtgaccggcagcgcacaaaagcgcgtatccgcctgatcacgtggatcgccattgccgtggccgggctgatcttgtgtgtgatcgccgttgtgctcgcattgcacagtttcgatcgttcgcaataccacggtgacatcgagtattggcgtgacgagccggaaatgagccccgccagcgctgcggaactgctgcatatcgttgacaacaagcattcgaaaacactgtcgagccgaaaaatgtcggcttccgtgctctcgctcgcttcgcgtggagcaatcgccatttacccggggccggccgccatgtatcggggcattgatatgagtcggtctcgcaatgccgatatcgcgcagctgatttccaatgatccagctcgtgcgcgtgatgcaggcaaaaccagcaccatcgtgatactgccggtggtgttcgataacccgcagtcattggcgctgagccagagcgaacgtaccgcgctcgacctgctggtgaaggcgtccgaacgcattggttctccggtgttcgatctgaaacagatggacaagaatttctccgattggtcgaagggctacaagtatcaggaaaagtttacgaatgcgtgcagtagcgaattctccatgttgggtgccacttcgtcatgcggcgggggagcgttcgccgcaggcatctgcgccgcgatcctggcgttcctttccatagtgtattttggcgtgatcggcaatcttgcgttggtcgtgctgatttccgcgccgatgatgttcgcgtccgtgtttgcgctgagctacctcaaattgaaggggcttaacgacaatggtcagcgtcttgccggtcaggtggtcggtttgaaacggtatatggaggatttcagcgacttccgtgatcgtggtgtggctgatctgacgttgtggggccgctacatggtgtacgccaccgcgttcggcatttccgaaaaggcgatgaagcagctgctcaaggcgtacccgcagcttgccgacccgaattggcttgatgccaacgcttccgattcgctgctctactggagttaccgttcatggtatttcaatcatcattacgccggtcctgcttcgtgtgatacgaattcgatggatttctcgccgagcgccaattttggtgatattggcgcgcagttggaatcaggttttgctgatattcaatcgacgattgccgcggcatctccgtccagcagttatggtggttccggtggtagcttctccggcggtggtttcggcggttcctccggtggttccggcggcggcagcttcggtggtcgctgatctgcggcattacgcgcatgtttggtgggtttgttgtctgctgaggcgggtcggctggtaaggttgcattcggaaagacactctgtacgttgttgaaggagatcgggatggctttgttccgtaatcttggaccgttccgcaccacggccatcggccatggtgaaatgccgttgaccattgaaaacaatcgtggtcacgatgtcggtatcgaaacattgcacgcctcgttggatgccggatgccgtcacatcgacaccgcttgggcgtactacacgccgggcgaagaggaacagaccggcgaaaagctggtgcgtgaggcgcttgactcgtggaagggcccgcgtgaggaagtcaccgtggccaccaaggtgggcttgcgccgcgcttgggagggtgacaagccggtttggccgcgtgacggcaagccggagcatctgatcgaatacggcaagcagtccgcgatggcgcttggcgttgacagcatcgatctgctgtacctgcaccgtcatgatccggaagtgccgtacaacgagtcctgcgaaggcatcaaggcgctgctcgatcagggcgtggcccagtgggcgggtgtttccaacgtgagcatcgaacagttgaagatcgcgcaggagatcctcggcgacaagcttgtggccgtgcagaaccagtattctccgattcatctggacacccaagatacgcttgactattgcgccgagcagggtctggcgttcgtgtgctggagtccgttgggcggctaccgtcacccgtacgacgagcacctgttcgatccgttccgcgaggtggccgaagcccgtggcgtgagctaccagcgtgtggtgctcgcatgggagctggccaagggcgaccacatgttcgtgattcccggcgcccatcgaccggaaaccattctcgattccctcaaggccgacgagctcgaactcaccgaagaggaactcgccaaactcggctgagtgtcagattcgcaacgttttgcgccaaggcgtccgtctccacgatggacgcctttgttttccgcatgtgtttttcctcgtatgtatttcccggatgcggcagaagtgtcccgtgaatagtcgagaatatagagcggaaaaatcgagtaagaggaacaagcgtgcaaagaagaaacaagcctgaagtattggctcccgcgggcaatctgcgaggactgaaaaccgccgtcgattacggtgcggacgccgtctactgcggaggtaaggcgttcggcatgcgttcggcgccgaaaaacctgagtttggaggatttcgaagaaggctcccgttacgcgcatgagcgtggcgcccgcgtgtatgtgacctgcaatgtgttgccgcgcaacaatgaagtcgaagcgatgcgcgaatacatcggccagctcaaagacaccggcgtggacgcactgatcgtttccgacattggcgtgatgctcatggctcgcgaagtggcgccgaacctggaactgcatgtgagcacgcaggcgggagtcaccaactatcaggcagcgaacgccttctaccagttgggtgcacgtcgtgtggtgcttgcccgtgaaatggatctgcaggccgtgcgagacattcgcgcacgcattcccgacgatcttgacatcgaatgcttcgtgcatggcgcgatgtgcatggcgttctccggtcgttgtctgttctccaattatctgaccggacgtgacggcaatcatggcgaatgcgctcaaccgtgccgctggaagtattccatcgtcgaagaaaagcgtcccggccagtattttccgatagaacagactaaggaaggcgcgtatctgttcaattcgcaggatatgaacatgcttgcgcatatcgacgatctgcttgattcgggtgcgaccagtctgaaaatcgaaggacgttccaagagcgcctactatattgcggcgatgacgaacgcttacaagaccgccgttgacgcatacatggtgcaacgcggttttgaagacgaggatggcactgtgctgaagccattccatgaccgtgtgattcgcccgtctgatccggattacggcaagccggaaaccaccgatttgattatggaacatgcggatggcgcgttcgcggggaagccggatattgcaaccgttccagtcgcttccgccggcgaaccggatgatctgagctaccatgcgcgtagtacgaggcgtaagtcgaacacggctgcggaaatcctgccggaaggctggtatcacgccggagtgcgcccggcggaacacgtgtccctgcctgactggttgctggacgagccagacaaggtggcgcaccgcgactattccaccggcttctactatccggaacacaaagtgcagcaaagcaccgaccgttccgcgtatttccgcgcttggctggtggttggcgaagtgctctcgtggagcgaagaagacggcggccgtgtgaccattatgagccgcaacaaaatcgaagccggtcaggaagtcgaattcgtgctaccgggcgcggcgccgctcgcctacaccgttcccgcaggcggattccgtgacgccgacggacattgggtcgaatccatcaacaatccggcgcatgtcttctccatgccatgcccgcaggaagtgcccgtgaacgcagccatccgatctcgtaccaaaaagccgacgctcaaagcggaataattgcgaaaaacatcgtgtagacgcagaaaatcagcagaaataagttgaaataatcgtagaacaatcaaggaaaacaaaaaaatgactgacaagcagtatgacgacgcgattcttgacagcaatgcgatcgacccgaccgacgtggacggcaatccaatcccggtgaccattccgatcatgcttgcgccgggcgtcaaagtcgtgtacaccacgcgacttggtggcaccagcgaaggcgattatgcgcactgcaatctcggaggcaagtccggcgatgatccgaaccatgtgctcgccaatcgtgtggcgctctccaacgccatcgacgcgaagctgagcctggtcagccaggtgcattccggcgttgccgtcgatgtggacgaattgttcgtcatgaaccgtccgttcggtttcgacgtgtccggcagcaagggcgaaaccgctcagcaggtgggcgaaaccgcggatgagccggcagtggttgaagcggacggccaggtgaccgctcagaagaacgtggcgctcggcatgttcgcggccgactgcctgccggtgctcatggccgatccggaagctggcgtgatcggcgccgcgcattgcggccgtcgtggcctgcagaacggtgtgatcggcgccaccatcgaaaagatggtgtccaagggagccaggccggagcgtattgtcgccacgctgggcccgtgcatctgcggcgactgctacgaggtgggcggagacattgccgacgaattcgacgcgcagttccctggaaccttcacgctgagccgtttcggccagccgggcatcgatattgcggccgccgcgctgcaggagcttgccaaagccggtgttccggctgataacgtcgtttcctcccgcgcccgcgtcaacgcagccacccagtatctttccgaagacgaggaattggcggaaatctgccaggccgatggcgaaggcgaaccgcagctcgcggaacgtttcaagaaaatccgccgtagcctgtgcacgctggaaaatccgctctggttctcgcatcgccgtgccaccatcgcaggcaaagcgcacgaaggtcgtatgcttgcgctgatcgtgcgcgaatagtgggagagcggcgcgctattgcggattgcgtgcagaacgtaaggcaaaacgcgctgcaaaccgattcgggggtttacggtgggacgtatgagtgagagagagcagatgcaggaacagaagatgccggttgtggccgtggtgttggcggccggtttcggcacgcgattcgatgagaacaatcccaagcagttggtttcggtgggggataagccaatcgtctgctggagcatcgaggcgttcgaacgcaacgatcgcgtgagcgacatcatcgtcgtggtcaacgagcgtgtcagcaatatggtgaacatgctcatcgacgaagccggttataccaaggtgcgtgccgtgattccgggtggctccgagcgtgtggacagcacccgctccgcgcttgatctgctcaagcaggcaggcattcccgatggcgcgaaaatcctcatccacgattccgtgcgaccgttcgtcgaacagcaatccatcgacggctgcatcgacagcctcgaccagttcaacgcggcgaccgtggcatacgcgtccactgacacgattctactgaccgaagatcttggagagcgcaaggtggtgcgctccgtgcctgatcgtacgaacgcattccgcgcgcaaaccccgcaggccttccgtttcggtaccatcaccaaagcctacgagctcgccaccgccgatcccgacttccacccaaccgacgacacccgcgtggtggtggactatctgccgaacgagccggtcgccatcgtcgccggatccgaaacgaatctcaaaatcaccacacaggccgacatgccgatcgccgagaacatcgcgcgcagcctcgacccggaacacgccaaacaagaagcgaaagcgcgcatgcacgcggtgttcgccgaagcattctcgcaattgcataagcactgatcgtaaacgaacccacctttcaaccacgtacactggaacacatgcagcagatcaacatcgtcatctcaggtttcaccccgtacgacggcatcgacgtgaatccggccgtacttgttcccgtggcgctcgccgaatattggaatgatccatctcaatccgtggcgctgtccgacgatcttctgcaggatgtttccatgagcgtgacgacggtgacgcttccggtcagtttcgccaatgcctggcccatgttgctgaacgccatcgaacaggcgaatcccgatattgtcatcgccaccggtttgaagcgttcggcccgcggcgtgctgttggagcgatgcgccacgaatctgatggacgcggccaagcctgacgccgacaatgtgattccgcctcgccgtccgatcaatccggaagggcctgcggcatattggacgcgcctgccgttgcgttcgattctgcgcgatttcgccaaacatgagattcccgccgcgttgagttcggatgcgggcacgttcgtctgcaattcgctgttctaccatttgctcgactggtctgcagcgcaggacaagcgcattctgtcgggtttcgtaagcctgccgatcgtcaacgagcagccacatccgcaacatggactgtcaatcgcgcagcaaatcgccgcaggtaacgatgtgatccgcgaatcggtgcgttattatctgcagccatcctcaagtgagattctgctcggctgaacggcgtcggcgtttcctcgaacgatttctgtgctctctgtgagaattatgcgactgccgtgtgccgaacgtttgttctgcgctaaagttcaaaacggataggcgcgggcaagatgcgcgatggaagggaattcgtgaaaggaataccatggttgagcagttcccaatcgtgttgagggggtacgacaaggaaagggtcgatgaggcgttcgctttggctcaggagacggtggaccgtctgcgtgatcaggtcaaggccgacgatcagaccatccttgaactgcaggcacagctgcaggaagagaaaaacaagaaggccaacccgaattcgttcgcatctctgggcgccaacgcgcagcagatgctcgccagcgcggaacaaaccagcgccgagctgctcgaccgtgccaagaaagacgcttccgcggcacgcgccacggtgcagcttcaggccgaaaccctgctgaacaacgccaagctcgacgccaagcgtattctcgacgaggccaacgccaaggccgaagcggtgctgtcgaaggccaataatgatgccgacacgttgaagtccaacgcccagcgcgaagcggaccagctgcgtggcgaagcgcagaaggccgtggtggcgcagcgccagaccgtcgatctggaattgacgaactcccgtgaggagcatgacaagcgtctcgcatcggagcgcgccacgcaggagcgcgagctctccgatctgcgcgccgaagccaccgagcagatcgcggcgcagcgcaagaacgccaatgacgagatcaaccgcatgaaaagcgagaccaacgaccagatcgaatccgcgttggccgaagccaacaagaagctggccgacgtgcgtgagcaggtgtccaagatgatgacggacgcgcagcgccgtgcctcggaaatcacggataccgccaaagccaaggcacaggagatcaccgacgaggccgaagtgcatcgcaccaagaccatcagccaggtcaatgccgaggtggagcagatccgcgccgacatttccgcccagcaggatgaggctacgaagaaggtcaacgagctgctcgccgacctgaacgaacgccgtgaaatcgccaagaagcagtccgacgagctgatttcagaagcgcagcatacgcgcgatgaggccgaggcatacgcttccgacaagcgtgaggcagccgacaagcaggctgccagcattctcaagcaggccaccgaagaggccgacgagcagatcaacgagcgtcgtgaggcagccaagagcgagcttgaaggtgtgcagcagcgcatcgccgacctgcagacccgtgaggcgcagatcacgcagcgtgtcagtgaactgcgtgccatgtttgccaacgcgttctccggtttcggcgcgaacggcctgtccgtggtcaattccatcgacggcgaacagcatgattccgcagctgaagctgaaactccggcggaatcgcacgacgagagtggcgaaactgttgcgggcgaaccggaagtgaccttcgacgaggatgttgtctccgacgaacagcagaataatgacgattttgaagaaccgtccgaagacgagcagtctgaccagggcgaagaagcacaggaggaacagaacaatgactgacatcacgccgttgagcgctgatgcattggcaacgctggttgaggatttcgaagccagcgaccacaaccgtatggccatgaacgcggtcaccgcggctggcatcaacaaggtggcacgcaactatgaccgcgcccgcctgatgcagcgccgattctccaccattgtcgacaatggcaccgccacccatcaggatcgttccggccgttgctggctgttcagctcgctgaacgtggctcgtttcgtggccaagaagaacatggggctgaaggaattcgagttctcccagaactatgccatgtactacgacaagctcgagcgcgtcaactacttcctgcaggacgtggccgaactggtgaaggccggcgagccgtccgactcccgcctgatccagcatctgctcgccgacgtgatgggcgacggcggccagtggaccatggccatgaacgtgtacaagaagtacggtgccgttccgaaggatctgttcccggaaaccgaatcctccaagaacaccggcgaaatgaacgtgcaattgcgtcgcctgctgcatacggccgtcgcgcacatgtatgctgatccggcttcgatcgaatcggtaatcgccgaagcgaccgccgccggacaccgcattctgacgattcacttgggcgagccgccgaagagcttcgactgggagtggaccgacaaggacggcgagttccaccgcgatggtgaggtcacgcctgtggaattctggcagaagtacgtcggttccgccgatttggaaagctacgtgtgcctggtcgacgatcctcgtcaggagcatgcgaagggcaagaagatcggtatcgagcacttgggtaatgtggccgggggagacccgaccgaatacctgaacgtgccgaaccagttcatgaaggattgcgtgcgtcagattctcgaagagcagggcattccagtatggttcggtgctgactgccacccgatgatggatcgtgaaaacggcgcttgggccactgatctgtttgaatacggcaaggtgtatggcgtcgacttcgatctgaacaaggaagatcgcgtgcgtttcgccgattccgcgatgaaccacgctatggcgttcgtcggcgtggacgtggccgaagacggcacgaccacccgtcgttggcgtgtggagaactcttggggcgacaagatcgcagacaagggctacttcactatgagcgacgactggttcaccgaatacgtgtacgaggtcgccgtgccgaaggcgctgctccctgccgaatatcaggccgctcttgacgagccagccaccatgctccccgcatgggatccgatgggcgctctggctgactgatacgtaaaccgacaaaccgattgacgaatgccgactgcatgggacttcgcaaaaagtccagcatgcagtcggcattcgtgttattccacttttatccgttaaggtaacttcggtgattatcatccatgcacagtatgcatgaagcaggtatgcaggtataaggaggagcagaagagatgtcaggtcttcgcggtccagatagttcgaaggatgcgcagttgttggataacgccgtgtttccggagaccgtggatatcaatattcgacagctagacccgattccggctccccgatattttctgaaggaaattccactcaccgatgagatgagcgatctggtgttgaagtcccgtcaggaaatccgcgatgtgctcaacggcaaagacgatcgtctgcttgccatcgtcggcccatgctcgattcatgatccgaaagcggcgcacgaatacgcggcaaaactcgccgcggtcaaaaaagaactggaagaccaactggtcattgtgatgcgcgtgtatttcgagaagccgcgcaccaccatcggttggaagggtctgatcaacgatcccgatctcgacggccagttcaatattcgcaagggcatgtggctcgcacgcaaggtgctgaccgacgtgctgagcgttggactcccggcagccacggaatggctggatccgatcaccccgcagtacatctgcgacctgattagctggggtgcgatcggcgctcgcaacaccgaaagccaggtgcatcgcgagctcgcgtcgggcatgtcgatgccaatcggcttcaagaacgccaccgacggttcgatcaagccggcagcggattcctgcttcgcggccgccttcgagcatcatttcctgtccatcaatcttgacggtcgtgtgatttccgccgaaaccaagggcaatcccgattgccatctggtgttgcgcggctcctcgcacggcccgaactacgataccgaatccgtggcgaaggcgttggccgatctgaaggtttccaaggcgtccggcccgagcgaacacggtcttgtcatcgacgcggcgcacggcaactgcggcaaggacgaagtgcgcgaagccgaagtgatcgaaaacatcgcctcccgcatcgcaacgggagagtcgggcatcagcggcatcatgatggaaagcttcctgaaagccggcaatcagaagcccgctccgctcgaccagctcgagtacggcaaatccatcaccgacgcctgcgtgccgtgggaacgtaccgaacagttgctgcacacgcttgccgaagcggtcgaaagccgtcgcgcactcgccaaataagcgcaaataatcgcaaataactaaccgtgcggaatacgcgtaactgcgtaatcgcacggtttttgcatagcgactgccatttgattgatattcttggggagataggtgattgtcaaggagagcagtgaaatgcagcagcagctgaacacgcctgaagagcttcgcgccatccgcgaggccatggatgagggaaagaatccgctggtggctacggatgtgccacgctgggaagatcaggtcggcatcagccgcatcgtgaaccgcagggtgcttgaattcgaggtgcttcccacgccggcgcaggtgttgggggacctgccgctcagcgatcaggcgcaagagatcgtcgcctattcacgcgatgagattcgtgcctgcctgtacggccaggacgatcgattgctggtgatcgtcggtccgtgttccgtgcatgatccggctgccgcactcgattacgcccgtcgcttggccgcgttgaaagacgagctgggcggagaattgctgattgtgatgcgcgtgtatttcgaaaaaccgcgtacgacggtcggttggaaaggcttgatcaacgatcccgacatcgacggcagctgcaatatcaaaaaaggcctgcttttggcccgtcgtacgctgcttggcgtattggacgcaggtttggccaccgccacggaattcctggaaccaaccagcccgcaatacatttccgacgcggtcagctggggtgcgatcggcgctcgcaatacggaaagccaggtgcaccgccagctcgcttcgggcatgtcgatgccgatcggcttcaaaaacgctaccgacggttccatcaaagcgccgaccgactcgtgttttgcgtcggcacagcagcatacgttcttcggcatcgatcatatgggtcgtgcggccgtagtcaaaacgctcggcaatcccgactgccatgtggtattgcgtggttcgagcagcggcccgaactatgacgccgaatccgtggcgaatgccatgaagctcatccgtgaggaaatgccggtcgaatccgcggcggcacacggtctgatcgtggactgctcgcacggcaattccggcaaagacgaacatcgccaagtcgaagtggtacgtaatatcgcaagccgtatcgccgaaggtgaggaaggcatcaccggcatcatgatggaaagcttcatcgaaggtggcagtcaaaaaccggcaccgctcgccgaactcacgtacggtcaatccatcaccgacaaatgcttgagctggcagattacggaagcgttgctgcgcgaacttgcgcaagctgtgggcaagcgccgctggaagtgagcgaagcgaaaataagcgaaaccgagcgaaaagcgtgaagcaatcgaaaggaacgaacgcatgagcacaatcgccatcatcggcgccatggacgaggaagtcgccaatatcgcatccgcattgagcgacatcaccgtaacggaggaagccggcgtcagcgtgacacgcggcaccatcgaaaccaacaagggcactcgcgtcaacgttgcggcaacggtcggcggcatgggcaccgtcaatatcgccgccaccacgcagcatctcatcgacgcggaccagcctgacgccgtgatcttctccggcatcgcaggcaatctcaacacgcatctgcacatcaacgacgtggtgcttggcggcacgttgcgctacctcgacaccgacatgcgtctcgtcggccagtggaagccaggcactgcggaccagccggtggaggaattccactccgacgaccgtctgatcgaagtcgccgataaggtgctgaccgatctgagcgtgcatcacatcaccggcatcatcgccacgggcaactatttcgtggacgatccgaagaaagtggagcaggtgattcgcgaaaccggcgcggacgcggtcgaaatggaaggcgccgcggtggcgcatgtcgcggcgcgcaacggcctgcccgtgctggtcatccgcgcgttgagcgacaatgccgacacggattacgtggaattcaaggaattcgacatttccgaatatgccgacaccgcggcgaaaatcgcggtgaacatcgtcaagcgcatgtaagcgcatgaaagacggcccgtccaacgcatcggttgctggacgggccgtctcatatttcggtatggcgaatctcacgaaagtgaactgcggggaaacttccgatggcgtgagggaatcgcgcacggaaatcgctttccggaaccgctactgttgaagaagaatgacggattatcggaaggttaacgtatgacgctggagcacgtggtgatggcgattgtggttgttgccgtcgctgtggtcgcctttttgctggggcgtgcccgtggcgtgcaattgggggaggatgagatcgacccgaacgatccaagcctgttcggcgcgcagaagaacatgtcgctgttcgggccgcgcgtgcccgtgcagtccacggaacgccagctgatcgccgtcatgccggaggcgttgatcgtcgtcgattcactggcgtcggtcacatacgtttccccgggcgcgcaacgtttcggcattgttgaggacagtgcgatgacgcttgccgaaatccgcgatattctgcgattggtgtcgaccgacagcgtggtgcgcgaacgcgaattgtcgattccgctggatcgagccgcccgtgcggccgcgaaaaacaccgacggcaaaggcattgaggcaggtaagttccgtccttccgacacgctgtatctgcatgtgcgggtcggccagatctccgatgatctttttgcgattttcatttcggatatgagcgagcagcgtcgttttgagattatgcgacgcgattttgtgacgaacgtttcgcacgaattgaagactcctgccggtgcgatttccctgcttgccgaaacgatcggcgacgctgcggacgatcccggcatggtgaagtattttgcgggccgcatttccaaggaatccgaacgattgacggaattggtgcatcgcttgatcgacttgcagaaggcgcaaagcgcggctgcggtgctgaacgcggaacggctttccgtgcttgcgttggtacgcgaggcgatcgtcgaaaaccaagtgaaggccgaatcgaagcatatcaatctggtgctttcgctgaatggcaagcagaagctggtgcacgtcgagggtgccgtaaacgctgtcgatgaggatgatctgttcatcaacgccgatcatgaaactatcaaaacggcggtgaagaatctggtggaaaacgccgtcaactattctccggaacacaccaccgtcgcagtcggcatcggcagtggcgatgacgaggttgcgattcgtgtcgtcgatcagggcattggcattccggaatcctcgctggatcgtattttcgagcgattctaccgtgtcgatcccgcacgttcccgcgaaacagggggtacaggattgggtttggccatcaccaaacattgcgtgcaggattgcggaggcactatcgccgtgtggtcgcgtgagggggagggatcgaccttcaccatcaccctgcctcaggcacaagcggtggaaacagcggaaactgcagggactgcgggaaacgtacaaactgcggaagcggatcgcatggaagtgacgggcgaaaccgaacgcatcgaaactacgcaatccgagcaatccgaataatctgagctaaaccgaatacagcaaataacaagcaacgttcccatcaacagagcaatggaggagaagcactgatgacacgtattctgatcgtcgaggacgaggaatcgtatcgagagccgctggtctaccagctcacccgcgaaggctacgacgtgtccgccgcggccaccggcgaggaagggctggaactgttcaccaaaggcggcatcgatctggtgttgctcgatctgatgctgccagggcttgacggcaccgcgctatgtcgcagaattcgtgagcaaagccgtgtaccgatcatcatgctcaccgcgaaaagcgcggaaatcgacaaggtggtcggtttggaaatcggcgcggacgactacatcaccaagccgtactcgttccgcgagctgctggcgcgggtgcgtgcggtgctgcgacgcaaccagatggtggccgacgcgacggaatcctccgatgacgatattccgctgatctgcggcgacatttccatgaagatcggccagcatgaggtgatggtgcgcggagagaacgtgttcttcccgctgaaggaattcgagcttctcgaatatctcatgcagaacaagggccgtgtgatgacccgccaccagctgatcgaccgcatttgggggtccgattacgttggcgacaccaaaacgttggatgtgcacgtcaagcgcgtacgctccaaaatcgaggaggatccggcgcatccgaaatatctgaccaccgtgcgcggtttgggctacaaaatcgacgttccagcggaataaagcggaaatatcgcgatagctggaaatatataagataaaacactgcgattccagtactcatcgtaagttgccgaataattgattattaattgataactgaatgtaagaccgtggtatcacggtagtcgccgaagatcggtgaatggaaatgacgaaaacgtccgaagtgtcgtagagtgttcatcttccgttcaccgattttggttttgcgggaccaaaaccaccaataggcttgacagtgtcatgaagaacgatggcgacaacagcatatgaaatgtcagaaacatacgccatcagaatgttgacagagggaaaagaataatgcgtaattccattctcgtacgctccattgcagctgtgtccggcattgtgatgctggcttctgtcgcggcttgcggcgacaacattgcttccaacactgattcttcggctagcaccgacaccaagaccaccgaaaccgtgtccggcaacttctccggcgctggcgcttcctcccagcaggctgctgtggaagcctggatcgccggcttccagggcaccaacccggatgccaaggtcgcttacaacccgtctggttccggcgctggcgtttccaccttcctgaccggcgccaccgcatgggccggctccgatgccaccctgtccgatgacgaggtcgagcagtccaagagcgtgtgcgcttccggcaacgccttcgacatcccggtctacgtctccccgatcgccgtggtcttcaacctcaacggcatctccggcaagggcaagaccctgaacatggacgccgacaccatcgccaagatcttcgacggcaagatcaccaagtggaacgatgacgccatcaagcagcagaacccgaaggtcgacctgcctgatctcgacatcaccgtggtgcaccgctccgacaagtccggcaccaccaagaacttcctgagctacgtcaaggatgccgctggcgacgcttggagctacgagctcggcgagaactggccgaacgaggttggccagggcgctaagggtacttccggcgtgatctccaccgtgcagcaggctgacggcaccatcggctacgccgatgcttcccaggctggcgagctcggcaccgttgcagtgaaggtcggcgacgattacgtgccgttctccgctgaagccgccgccaaggttgtggacgcttccccgctcgacgaatccgccactggcgacaaccgtgtggtcgtcaagctcgaccacaacaccaccgaggctggcgcctacccgatcgtgcttgtctcctacgacatcgcctgcccggcatacaaggatgccgacaccgccaagttcgtcaagtcctggctcacctacgtggtcagcgacgaaggtcagcagaccgctgcctccgcagcaggctccgctccgctgtccgacaccatgcgccagaaggtcctcaagtccatcgacgccatcgaaaccaagtgagctttgatacagtaagcgataggctctcggtgaacggcaactgaccgtctgtttcaggccgcagccgcaacatgaaagcgggtgcggcctgaaacggtacctgcaggtaaaacaaaaaacgcagtcatcgcaagtaatcgcagatctgtttcaaacaatcgcaagttaaggagaacccgtgagttcgcaaagcaaaacggcacagcagccggtgagcggcaaaaacgcggacaaggtgttcaagggcgtggcctacgcctgcggcatcctgatcctcgtagtgctcgccgccgtcgcgctgttcctgctgttccgcgcatggccgttgatcggcggcgatcagcaggccaacagcgacaccatcagcaacttcaccggcggcaaggcctccagcttctggggctacgtcggaccgctgctgttcggcaccgtgctgatctccgcgctggcactgctgatttccttcttcgtgtcggtcggcatcgcactgttcatctcgcactacgcgccgaagaagctcgccaccgccttgagctatgtggtcgatctgctcgccgcaatcccgtccgttatctacggtctgtggggtggcctggtgctggtgcccgccatctacccgttctggaattgggtggccaagtatcttggctggattccgctgttcgcaggtccggccgccaatccttcccgtaccgtcgccaccgtggccgtggtgctggcagtcatgatcctgccgatcatcacctccatgtctcgcgatatcttcctgcagactccgcgccttcaggaagaggccgcgcttgctcttggcgccaccaagtgggaaatggtcaagcttgcggtgctgccgttcggcaagtccggtgtggtgtccgcttccatgcttggcttgggtcgtgcgcttggcgaaaccatggccgtgctcatgatcctgtctccaggtctcaactactccatcaagctgctgcaggcttcgcagaaccagacgatcgcagccaacatcgccgcgcagtatccggaagccaacaatctcggcgtgtccgtgctgatcggcaccggcctggtgctgttcctcattactttcgtggtgaatttcatcgctcgtaagcttaccgagaaagcgagtgcgtgatgaccgcagtgaataacaacgcttctccgatggacggtgcccccgtcatcgatttcgacaagttcaagccgactcgttcctttaccgctgcacgtaagcgcaaggatcttgcgatgcgcgtgctgatcgctcttgcgttcattgtggcgctgattccgctgttctcggtgctgctcaccaccatcgtcaacggtgtcaagaggctgaacctcaacttcctgagctataacatgaccggtgtggtcggcggcaatcctacgccgtccggtggttacggcggcattcagcacgccatcatcggtacgctggaaatcacgttcggcgccatgatcatctccattccgatcggtctgatgtgcgccgtgtacttggtggaatattccaaccgtggcaagctggctcgcgtcatcaccctgctggtcgacgtgatgagcggtattccgtccatcgtcgcaggtttgttcgcattctcgatgttcacgattctgattggacctggcaccatcaacggtttcgaaggttccgtggcactgtcgctgctgatgctgccgaccgtggtcaagtcctctgaagaaatgttgaagatcgtgcctcacgacttgcgtgaagcgtcgtatgctttgggtgttaccaagcagcgcacgattacgaagattgtgttgcgtaccgctttgccgggcattgtttcgggtgcgattctcgccgtcgcccgtgtgattggtgagaccgctccgttgctgatgaccgcaggctacatcgcctccacgaacgtcaacctcttctccggccagatgaccacccttccggtgtacgtctaccaggagtactccaagctcaacgcgaattgcccggcttccgccgacgcttcctgcgtgaccaccatcccgatggaacgcgcatgggccgcggctctcgtgctgatcctcatcgtgcttatcctcaaccttatcggtcgactcgtggcgaaggtcttcgccgtcaagtcggaacgatgagcggtagtcttacatacagaaacaacatataaggaaccaaaatgggacaacgtattgatgtcaatcatctgaacatctactacggcgacttcctggccgttgaagatgtgaacatcaacatcgaagccaacaaggtcaccgctttcatcggaccttccggctgtggcaagtccacggtgctgcgcacgctcgaccgcatgcacgagatcattccgggcgctcactgcgaaggcgaggtgttgctggaaggcaagaacctgtacgacaaggacatcgacccggttgccgtgcgtcgcgatgtcggcatggtgttccagcgtgcgaacccgttcccgaccatgtccatccgcgagaatgtgctcgctggcgtgaggctcaacaaccgcaagatctcgaagtccgatgcggacgatctggtcgaatgggctctgcgtggcgccaacctgtggaacgaagtcaaggatcgtcttgacaatcctggcattggtctttccggtggtcagcagcagcgtctgtgcatcgcccgcgctgtggccgtgcacccgcaggtgctgctgatggacgagccgtgctccgctcttgatccgatttcgacgttggctgtcgaggatctgatcaacgagctcaagaacgactacaccatcgtgatcgtgacgcacaacatgcagcaggccgcccgtatcgccgactacaccgcgttcttcaacctgaaggcagtcggccagccgggtcacctcgagtacttcaccgacacgaccaccatgttcaacaacccccagaacgaagaagccgagcgctacgtatcgggacgcttcggctgatcggcaaagccgatccgccaaagcgtagcgttgacccagtgggtcaacgcaagcgagctttagcgagccagcaaattatgtttcgctttgcgaagctccttaattgcacgcggctgatcggcaaagccgatccgccaaagcgtagcgtcggcccagggcgacgccgttaagcaaacagtccagtggactgtttgtaggcggcgccgagatgcgacagtatcgaggcaggaaatagtgccttgccttggcaaggctccttttcctgcgagcttgcacgcggctgatcggcaaatcatctcttactcccgcttgcgggggattgtcgcacggatgtgcggtcgaaagtggttgcttcgctaaccatttcgatcccattcgtggcggccgttcccctgagcgggagttttttgtatgtgatacctgatcgcgacacgctctattgataatgattctcaattaagttatgatggtgttatatcacgttagggaggatctatcatgtaccgtattgtgagaattgcgattgccgcacttgcttctgtaggaatgcttgcgtcggttgctgcgtgtggaagcggccgatcgtcgtccgaaaaaaacggaaccatcgaagtggtcgcttccgtgaatcagtggggtaccgtggcgaaaaccttgggcggtggcaacgtcaacgtaaccagcatcatcaattccaccaatgtggatgcgcatgattacgagccaacgacgtcggatatcgccaaactgcagaaagcgcaagtcatcatcgtcaatggagccggctacgacgcatgggcggtcaaagcggcgcaatccgccaacgcaaccatcgtcaatgccgctgcagtcggcggggtgaatgacggcgaaaatccgcatgtttggttctccgccgatgtgcgcaaggcagtggcacaggcgatcaccgaagcgtacgaacaggccgacgccgcgaaaaagagtgatttcgacaagctgcacgatcagtggaaatctgaagaaaacaacgtcgaaagcaaaatcgccgaagtgaaacagaaatcggatggattggcgtacgcggcaacggaatccgtggcaagctatctggcggaagacatgggtttgaccgacgcaacgccaagcgggtacgcgcgagccacagcgaacgaaagcgagccgacaccaacggatatcaaacagttcaccgatgcgctgaaggcgggtgaaatcaagcttttggtcgtcaatacgcaggaggaaagcgagctgacgggcaaaatcacgaatgccgcgaaatccgcaaacgtgcccatggttgaactgaccgaacagatgccggaacaatacgattccttgacggcctggatggaaagtctggttgacgccttctcgaaagccatcgcataagacggttcactaaaaagcagtacgaaaacaagcgatacaacaataggggcgactccgcagtgagagcggaatcgcccctatttcatttgccgaatttaaatttatttactgaaccagtaatttcggctggtggtcaggttgaacctgacgttcagaactacaggatcgcggtgatgatgaagtccagaatgaacagcagcgacacaacccagatcaccgggtgcacttccttggccttgcccttgcaggtcttgatcaggcagtaggtgatgaagccgccggcgatgccgtaggagatggagtagctgaacgccatgaatacggaagcgaagaacgccggcacggcctcggagatatcaccccagtcgatttccttcagcgaggacgccatcatgcagcccaccaccacgagcacgcctgcggttgcggcggacggaatggcggagatgaccggggagaggaaggcggacagggcgaagcagatggccacgaccacggaggtcaggccggtgcggccgccagcggcgatacctgcggaggattccacatacgtggtggtgttggaggtgccgcagatggcgccgatggaagttgcgatcgaatcggcgaacagggccttgtccatcttggaggagaagccggaaccgttttcgagggcttcctcgtcttccgcggagaagatgccggtgcggcggccggtgccgatgaacgtgccgatggtgtcgaaggtgtcggacatggagaatgcgaagatcgtcagcagaatgatcggcagcttcgacatgtcggagaacagcgatgggaagccttcagcgctgaagatagcgccaaaggtctgcggtagctgggcgaaagtgtcgccgatggagatggagttggccatggtggtctgacccatcggaatgccggcgatggcggtgaccgcgatggcgatcagcatgccgccgcgcaccttgagcacggtgaggatgatggcgaggaacaggccgatgatgaacagccagatggtcggattattcatgacggccagacctggggtggcctgcacggtgtcgccgttcttggcgtcggccttggtggtgaaggtgaagaagccgacgttcaggaagccgacgtaggccacaaacaggccgatgccgccgccgatggcgttctgcagcacttccggaatggcttggatgatgatcttacgaatcttggtgacggtgatgagaatgttgatcaggccacacaggaacaccatgcacagggtctgctgccaggtgaagccgaggccgaagcaaacggtgtaggtgaagaatgcgttgaggcccatgccggcggcctgagcatacggaacgttggcgaacaagcccatgacgagcgtgcccgcgatggctgcgatgatggttgcaaggaatacgccgccccacggcattcccgtttgcgacagtatctgtgggttgacgatgatgatgtacgacattgcgaagaacgtggtcagaccggccatgacctcagtggacatggtggtgccgttctccttaagatggaagaacttttccatttttccctatctctatttctcttgggttggtaggaacgttccgactattgggcggcgcgttccggcgagaattgcgactcgccttgtggaatcgtgggattccggacaaggcttaaccgtaacacttgagtgagtcatgaagatttcgtaaagcgcgacacgcccggatgacggcaagtccaagcatgaccgtaagttgttcacctgtaaaccacagaccgttggttggagcgtgcaagcgctcacgaagtttggttcgccaagccaacgcaggttgaagaacatacgcccaccaagggctttccgcttagcggtcgaatgttgctctgcctgcgtgcagggcttttttattgtccggcgaaacgttcctgcttcacagtcaatggttgactaaggaaggaacgccatgaagaggcccgaaaaggaagcggtggtcgcccagcttacggataagttccgtgaagctgacgctatctacctgaccgagtaccgcgggcttaccgttccgcagatctctgaactgcgcgaaaagctaggccgcgatacttcctacactgtggctaagaacacgctgattcgcatcgcagccaaggaagctggcatcgaaggtctcgatgagatcctcgccggtccgaccgctgtgaccttcgtgaagggtgacttcatcgaagctgcgaagaccctgcgtgacttcgccaagaccaataaggcactgatcatcaagggcggcttcgctgatggcaccgtctacgatgctgaaggtgctcagaagctggcagacctcaagtctcgcccgcagctgctcgccgagttcgccggcgacatcaaggctacgatgtccaaggccgcgtacctgttcaacgctctgccgaccaaggccgtgcgtacgatcgatgcgctccgcgagaagcaggaaaaggctgcctgatttcattgcggttagccgcgtgaatgatagtgaccataaaagaaaaataattgttttaggtgacggtcacctcttcaatcaaaccgtcgccaagaatgaaaggaagccattatggctaagtacaccaacgatgagctgctcgaagctttcggtgagatgaccctggttgagctctccgagttcgtcaaggctttcgaagagaagttcgacgtcgaggctgccgctccggctgctgtcgccgttgctgctccgggcgctgctgctccggctgaggaagagaaggacgagttcgacgtcatcctctccgccgttggcgacaagaagatccaggtcatcaaggccgtccgcgctatcacctccctgggtctggctgaggccaaggctctggtcgacggcgctccgaaggctgtcctggagaaggccaagaaggaagacgctgagaaggctaagtcccagctcgaagaagccggcgctaccgtcgagctcaagtgattcgcgcggcttgaagccgcatatcacaatcttgagtggaaaccccgttcgccacaaggcggcggggttttccgcatattacgggattttctttcgctgacgatccaataaaatccgatttaggcatgaatgcttccatatcgtgccatacaatgggggaattaggcgaaagttgtcaattaatcgcgtcataatcctgaaatacgtggcaaggcatgacacaatgacaagtagtggtatgtgtgaaaggaaggccgacaacggtgagcgaagatcaacgaacggcacagcagtggaccgtcaaggttgatggaaccgaactgaagaagctgggcagcggcgaaagcgtggaaatcggccgcaagccgttacgtcctctggcggatgacggattcgcgcgccttgacattatggatacgaacaaatccatgtcgaaacggcatgccattgtttcagtcgacgcgcagggcaacgcttccgtacgtgatctcaagtcgaccaatggttcgtttgtagtggccgacaacggccaattgatgcgtctgcccgcggatgaggatttcaaactgccatccacgccaatgaccttgcaattcggcgacgtacgcgtcacttttgaacgtgacagcgtgagcgccatgcccgaatccgagagtaccacgtcagctccggtatctaatctgttctcctatgcagtgtccgatgaggcgtcgcaggagcccgacgccgccgatatgtcggtcgacgacattctcaatctgcgtgccggagagccgaccgcattgttcaacgcgcgcaacgtcgccaatcgtgtgaatctcatgcaacgctccgaacgtcagtctttcgcgccagttcgatccaacgagccggattatggggatctcccatccgtttcgctggtgcagcataacgacgtcgtggataacgcgccacgtgacctcttcgccgacgccgcagccgaggcagatgccgtggcggaacagcaggcggcggaagaagaggccaagaagaacgccgccgaaaaggaaaagccggctatgctgcccgaatcccaatcgcggacgcaagtcatcgcaggcaacgacgtcgaacacgacacgattcccgtgagcaaactattcagcgcaagaccaagcaagccgattatcgtggcattgccggatagcagcgacatgcctgaacaacaagcggaaaaaacgcacgagcagcgcaatgaaattgcagaacaatccggtaccaatccgattcaaccggaagaagcggcgcaacgggccgacgacgagcgtttcaggccgcataacacggagcagccacagattgtgagcgagccgacaccggacgaaaccagcgtattcaaaccggcttttgaacccggatcggtgttcgatcgagtcgccaagggagagcttgccaagcaggaacagaccattgaagtcgacggactgacgtcggatgatgccaaacgcaccgacgatttcaccgtgcagttcgagatggcacgtcatccggagctgctgccgttccttgccatgaacccgtcgctgtacgacgatttgtacgcatggctgggagctttgggcaatgcagacatcgacgcggccctgtcacataatccggggtatgcggaataccgcaaagcggtagggaagtgagtcaatacatgagcgaaagcaacgagaccgtcaccgcgctggatcgtattcgggggtggcgtgagaagtaccgtcttggtctatcgccgtcgccgcttgaggacgtgacgcagctgagcgcccagcttgacatgacgcatgcgcatccgtccggcatcgcgcagctgttcgccagcgggcatgtgcaacttgattccttgttccgcgacaacggcatgttgcgtgccgccgggcgtcgtgtggagcgtgtgctcgacgatcgtgaggcgaaaagccgtgtcagcggcgtgggcgaactgtctttggtggttggcgtggccatctggaaaggcaaccagatgccggtactcatgtatccggtcgaggtgcgcaaagaaggacgcaatattgaaaacggtacggtgatcgcgttcacagggcgcgtacgcttgaatgcggctttcgccgccgtgctgcgcgagaacaacgtcgtattggacgagtccaagctgttcgacggttcgaattacgaaagcggcacgccggaaacatccgcggtgttcgctgccatcacacgccttgcggccaacgcgttccctgattttgagatcgaacggcacattattctcggatgctttatggatccggcatcgcagatgctggtggaaagccggaagatcatcgaccagttggcgcaaggtccgaccggcaataccgccttggacgctttggcgggagacaagtccgccgccgaagcgttggaaggtgccgaaattccggagtacagtccgtttgatgccgatcctcatggcgagtatgaggtcggcgatgcggacaataccgtccgatacgcctcgcagcttgcttccgcgggccattcgctgtttgtggatagtgcgatcgccaacaataccgccgagcaggccgcggcgattgcgtcgcgttgcgtgatgaacggacggtctgtgctctatgtgccgtgtgtgaccgatcagaagcgtcgttttgtacaggccgttgccgcaaacgaaatgagcggacagctgctggatatcgccgatgatggtgccaacgctgcgattgaccgtcagctgattgcagccgtcggcttccaatcgggggttgcttcctcccgttttgatcagattgccgatgagctggttggcgtgcgttcgcgtttgacccgttatctgggcgatcttcacggcgtgagtcaggagtggggtgtatccgcctaccagacgattcagaatctcgcgcagattgcggcattgcccacccatccgaccacgcatgtgcgtttgaacaagcagaccgcgcattccatcgcggacaagatcgaggattgggctgcgaaactgcagcgtgcgggcgagcttggcgaatacaccattacggagaacgacaccgcatggtataaggcatcgctgtattccgaagaggaggcggtgagcgcataccagcgtgtggttgagctgttgcgcaaggtgttgcccgccacccgcgagcaggtggccagtacggtacagacctgcggattcccgattcccacgaccgcgcaggagtggagccgtcaggtcatggtgctgaagaacctgcgccgtgtgcttgacgtattccagccggagattttcgaacgtgacattgcctccatgatcgaggcgaccaagccgaaggccgagcgcaaggccgaaggtacgtccatgggcttctgggagcgtcgccgccacatcaaggaagccaagggtttgctgcgcgtcggcgcccaagtggagaacctgcatgaggcgttgctggtggtgtccaagcaggccgatcagtggcatatgttcgtgcctcatggcggctggccggtattgcccgccaagctggatgacattatcgaaacgcaggagaatctcaatcgggatatgaccgcgttgaatgcggtgcttgccacaaccccgcagggcggcaatcttgaaaccgttgatttcaatcaggtcgaagagcgtttgaaggccctgtatgacgataagcagtcgcttgatattctgcctgagcgcgcccgtctggaacgtgaattccattcggtcggcctcgacgagctggtcgaagatctgaacaatcgtggcgttgccaacgatgccgttgcaggggaactgcagctggcatggtggaccacggcgttcgaagacatcgtgaaatcctccgcgatcatttccaatcaggatgggtcggcattgcagggcgctgcggagcggttcgcccaggtcgatgtggaacatgtgcgttcggtcggtccgatggtggcgcaggaatccatgcgccgtctgtgcgacatgctgttctcgcgcacgcaggaggccaatctgctgcataccacgcttgccggcgcccgtaatgtttcgctgaactgcctgcataaggagcatccgcagattctcgccgcggcgaagcctattctcgttgcgactcctgccacgcttgcggccatcaccgatccggcgccattggccgacgtcgtgatcatcgatgccgcagcgcatattcaatccatcgaactgctcagcatcatcagccgagccaagcaggtggtggtgatcgcgcatcgcgaaaccgtcacttccgacggtctgaagcgtctcatcgcattgctgccgagcgtgaaaatcgccaatcgtcctgttcgccgtgcgccgaagctcaacgcgttcctggaatcggaaggctacggttccgtgcccttcgacgtggccagggaaggcgcgcagggcgaggtcgcctaccattttgtggccgatgccaatggcgtgccggtcatcacgtccggactggtggaaagcagccagcaggaaatcgacgaggtggtcaggctgatcaccaagcgtgccgccggtttcacgatcgtgcctgcatcgtacatgcttaccgtggtgacgctgacccatacgttccgcacccgactgggagccgagcttaaggcgatcgccaataagaacaaggccatgggcatgttcttgcgtcatgtgcgcatcgtggacatttccgatgtggccggcgcgcatgccaccgatgcgattcttgcgatgtgctacgcgaagacttctcatggaaggctgctgcaacagtttggagcgttggaatccgaaggcggacggggtatgttgctggatgcgttggccgtgccggatcgtcatcttgacatcgtgtccgcattctcgtcagctgacatggatgacgagcgcctgcaccaagctggtccgaagatgctgaaaacggtgcttcgctgggcggaacagctcgatgacagcgtggtgcgtccagtcgtcaagacgaacggttcgaacgtattgctcaacgatcttgccgaccgtattcgtgcccgcggtttgaatgtggccgtcgactacggtttcgacaatggttccaagctgccgctggtggttggcctgaacgacaagccgttcgcattggccgtgcttaccgacgatgcgcagttcatgggattgcagtccaccagggaacgccaccgcgtgcttttgcagaacatcgaatcgcttggctggtccgttatgaccgtgtggagcgttggcgcgttcgtgaatccagacaaggaagtggatcgcatcgtggcacgcttgagcgacctgtatcaggaggtcaagtgagcgtcgacgaaccctccatccaagagtccgcggaatctgaccagtctgccgtgcgtgtggtgtccggatactccgccacccgccgtacggcgcgcaaacacaagcgtgtggttcggcagggtacggaactgttcgatgccgatggcgtcaagcttgaaccgtccgatgtgcttaccgaacgccagcgcaatgctgacgacgacaagcgtattctgggcgagctgccaccgcattggggcgtgttctccgagcgggagcgctgacgttcgtctgctatacgggaggttctgatacgttcagacctcccgaatttcatatattccgcatgatggtgctgcggattcgcttgggaatgccgttacgaaccgacgatggcgatgatcgcgctgtattcttgggcctgcaatacggttgccgcctcatgaggaggcatggcaaacaccgcaagcgtgtcgccgtccgcattccgtgaaggtttcgcggtcaatatcgctcccgtgcacagctcacgtaacgacaccgcatccatatccggtaccgtttccggcgtggcctcgctgaacatcgtggcgctggaaagcgtcaccgtatcgccaatcgtcagactgtcggcggaactcgccaaccgaacttcgaccgccgtatatcctttgggaacaacgggggaagcgcgagccatggccgaggtgacgatgctgccttccgcaatatccacttgggcaatcagcccgacggcatcatcgatatcgtgagcaacgctgcgcagggcctcatcgtatggaatatctcgcaaagcaagcgaatccgcggaaatcacgccgcctttggcgatggacttcgccgcaatgacgacggattgcgtggaaatcgtcaatcgcacgcactgcagggccgcaaatatggcaagtccggcgcacagcgaagcaagtagacgatgcaattgcgcgtttcgtcgtcgtcgatgaggcgccgaagacggtgcgcggttcgtgtgtttgccgtccgtgccttgcagacgttggctaaggtcatgaaaaaaggtcaccattcatgcatgatgaccttacgaatagttgctgcgcaagccggatcgagggttgtggtcggaggatgcgagttatccacaggattcggcgtgtcgccttgttttccaaggtttgctgaccctggttatttgactcgtttccttgcttcggctgctcggttacgtgtattcgttttcgctcacttggacttgtcggtgcgatagaaaccagatcccttgaattcgatcggcggggcggaatacaccttgcggacctgctcttcgccgcatttcgggcaaacggtgatcggatcgtcggtgaatgactgctgttcggtgaaatcgtagttgcagttcttgcaacggtaatggtaagtaggcaaagtatcctcgcttcaaccaggttctcaaatttcttaacgggacatatcctagtacgttccctgagacggctgcgtgaacgtcttatcttcggacatcttattcgcgtatggccgtaaatccgttcggagtgagcacgccatcgacgggaatatcgtggtcttcgtgcggaacaggcttgtccgtcggctcccacggccagcaaaccgccaccacccgtgcgccggccgcacgatactcgagcgcgcggtcataccaccctccgccacgtcccagacggaatccctcttggtcgacggcaagggcgggaacaatgatcagaccggcgtttttcagcgcttcaggtccgtttgcgctattgcccggctcttgcgggcggtgcgtattgatggacccgtcgctgttggtctggtcctgcagatcgtgaatgtcgccaagttcgctccagccaatatccatgccggatccgagccgtggcaccagcacgtggcaattcgaatcgaataatgcctgcagcatcggcatcatcgacatttcgctgcccatggacgcgaatgcggccaccgtggtgaacgaatgaatgagattcgccttccgcgcctgttcggccaacttgcggccggcttccagtcgttcctccttactggtctgctttcttcgtgcgattgcgtgtgcgcgccattgctttttcagctcacgttggttcgcggcttcgtcacagacgctgttttccatgacgtcggcttgcatgttcgtggtcataccgcatgttgtaccacgggatggctgcgcgaaaacggaaatgttatgcgtatggcagaatgagggcgtgacgattttgcgatctttacggggcatgatgcgttcggatcccaatgccattgatgttccgcggttcattcaggcacatgggcttcacgttcccataatcctgcgtccgctgactactgacgactgcgacgaatggaacgaagtccgctggcgcaacgacgattggttgaagccttgggaatccggggatccggtgcatggcgcatcgatgtcgttcaacgagtgggtgcgtgcgatgcgatgcaacgagcgaaacggcaccggagtggtgttcgccatcgagcatcatgggcgtatcgtcggccagatttcgttaggggccatctgctatggcgccatgcgtaccggcgtggttggctattgggtcgatgagcggtgtgcggggcgtggatatgcgccgatggctgttacgctattggctgattgggcgatgttcgacccttccgggccgcaattgcatcgtgtggagatcgacttgcttcccgaaaacgaacgttcacgtaaggtggcactcaaagtgggggcatcctatgaggggatgcgcaaggcgtacgtgttcgtgaacgggcaatggcgtgaccatgaatcgtatgcgttgctgccggagtacgcatcgaatggctttaccgcacggttgatgggcgagtgagccgttggcgaggttcgacacgcgctttcgcgcacatgttcgacacgcgggggcgtgcaccccggagaatgtcggaatgtcacctattcttatgagttatgggttatgaatcgttaagcacggttgtggtgcttgcgattgtgattattctcatggttttctggctgcccaaacggacagtcaaaggcatgaagcgggtaatcgagcaccgagaggaccgcttttcgccgtcgctgcatctggtggatgccgacagtggaacgcgattctccgatgagaccgccgcaaaggcgaaaggggcaataatgcagtccaacgagacgcatgagggcaagctgaccgacgaaaggatcgcgcatgtccgtgcccttcgtcgtgccgcgatccgcagaaggcggattattgttgtctcgatgctggtgatcacaatcgtcgtgttgatgtgtgcgtttgtgttgcatttcagtccgttgtttgctttgattcctgcgtcgctgcttgctggagtgctcgctttgggggtgagggccgccaagcaggccgcagcgtgggagcggaaagtcgccaagtatcgttccaagatgaggaagcgtgctgcggcagagcgcaagcgcgcccaggaagagcaggcggagcgcgctcgtttgcgggagcaggagcttgcggaaattcgcaggatcgccgaatctcaggtgccgaccgatgttatgccggaaggtgagatccgtcaggcgatcgatcgcggcaaggccgaccgtgatgttgttgtaagcaaacgcaaggaggaaaccgaagcgaaatccgctgcggaaccgaacgttgtggatgcgcaagtcgtgccggataagaagaacggtctgtccatccacgatgagcgtgatgaaatcgccaaaaccgagggtgtggatgcatgcgatgcggattcgtccgccgtggccggcgcgtcgcaggatctgatttcgttctcgttgggatcgccacgcaacggtaacgatatcgcgccagccgctccggaaagcatggaaatcaagtccactcgtcaggtcgccaaggccgtgcctccgactgcgagtacggtttccgacaatgtcgagccgttgattgtgccgaccgacgcgatcagcagcatggattccgacgaggccgcagcccgtgtggaggctggtgtgcatctgcaggacgtggataccgtgggattccacgactccgaggtcagcgccgacgttgaggctcccagcgtcacctccgattccctgggtgtgggtttggcgtccatcatggcccgtcgcggggcgtgacggagggaaagcgaacgcacgaaacgcacgaaacatacgaacaagcgtaaagaacatcagcctgaaaccgcatggtttcaggctttttcgtatattttgctctcagcgttagcactcgagttggcagagtgctaataatcgcgctaggatatgtttcagcgcgaaaggacgacgccgtaagtgatcgtcagcctcttgctagcgggtcccggcgcggtaagtaacgatttctcttagaaagaggaggtccacagtgtcgatctcactcacaccgttggaagacaagatcatcgtcaagcaggcggaagctgaaacccagaccgcatccggtttgttcattccggacaatgccaaggagaagccgcagcagggtgaagtcctggctgtcggtccgggccgtcgcaacgacgccggcgagcgcattccggtcgacgtcaaggtcggcgacaaggtgctgtactccaagtatggcggcaccgaggtgcactatcagggtgaggattacctgatcgtctccgcccgcgatattctggccattctcggctgagcgtagcgcgtagctgtttgaagaccccgtcagcgaacgattggtgaacaatcgttgcgttggcggggtcttgttgatttcaagcacttggggttcctgcaataggccgtgcgcagccgatgtatgccgtgttcattggcgttggcgtgctggtgttggcgtgctggtgttggcgtcgctgttcagacggtctgcagggaaagtccagaagaaatactcatgatttttcttttcggaaatatttttcgtgaggatttgctctgattgacaccgacatgtggctgatagtgagaaaacgttggaatttcaacgattttgagactttttggcttccgcgacacgccgtatttgcgttaatcgcatgatctgtggcatactaaacgggttgccggttcgggttcaaccaaacaggcagcacggcggatttcccaagcggtcaaagggaactgactgtaaatcagtcgcctcgtgcttcagtggttcgaatccactatccgccacgcctcgatagctcagtggtagagcacttccttggtaaggaagaggtcgtgagtccgattctcactcgaggctctcatggcgggatagctcagctggctagagcgtacgactcataatcgtaaggtcaagagttcgagtctctttctcgctacaaaggtcgacggaacgtcggcatagcaacgaaccacaagaggtgaacttaaatggcaagcaagagcgccgacattcgtccgggcatcacgctggcatgcaccgagtgcaaggagcgtaactacatcacgacgaagaaccgccgtaacacgccggatcgtcttgagctgaagaagttctgctcccgctgcggcaagcagaccgtgcatcgcgagacccgctgaacgagttcaaagctttatgaaacccgaccaatatggtcgggttttttgttttctttcaaccttttcttgacacctttccaactgccttccccgcacgctaagctaagcatcatgaccaatttcgcagatctcacgaccatcgccgtaggtggaccaatcgcatcctttatcgaaccgacctcgcgtgtcggcgttatcgaagccgtcgaggatgccgacgccaaaggcttgccgctgtgcgtgatcggcggcggatccaatatgctcgtggccgacacgccgttcgatggtgtcgtggtgcgtgacgcgcgacacgccgtaagcgtgcttgatgaggcggctcccgtcgaaaacggcgaaaaaatcgtgcatgtcaacgccgaagcgggttgcaattgggatgatttcgtcgactactgcgtcaacctcggcttggagggcgtggaaggactttccggcattccaggcactgtcggcgcgtcggtcgtgcagaatatcggcgcatacggccaggaagtcgcatccagcgtcgaaagcgtggaagtctgggaccgcaaaaacaagcaaaccaaagagctcaccaatcaggaactgcatttcggctatcgcatgagcgcgctcaaagcgagcatgtacagcgctccggccacgcccgcagccgacttcttcccgacaccgcgctacgtggtgctgtccgtcaccttcgcgctgcatcacagcgcaaccggcgtagttggctacggccagctcgccaaagcattgggcgtggaagtgggcgaacgcatgtcgacaacggatattcgcaacgccgtgttgaaagtacgcgcctccaaaggcatgcttgaagattcccatcgatatctgaccgaagccatgcgcggcaccaaaaaaagcgaactggtcgccatcgcgcatgacgcacagcgcacgcagacaggcaacgatgaacccgactacaatcgccacagctgcggcagcttcttcatgaatccgattctcaccaaagaacaagcggcaaagcttcccgaagacgctccacgattcgacgcgaccctgccggatggcacgccgggcgtcaaaacatccgcggcatggcttatcgatcatgcgggattccataagggctacaaaaccagcggaaatgccgcagcggggctttcgaccatgcatacgctggcattgaccaaccgcggcggagccacagctgcagatatcgcggaacttgccaaaaccgtgcaggatggcgttgaacgggcattcggcatccgtctcgttccagagccggtcatcatcggcatgagcctcaagtaaacgtaagaacgaagggagaagggaaacgcaatgaacgtattacgtaagaaatccgtcgagcagacgctggcggaaacagaggagtcggggcgctccctgaaacgagacctgacctggtgggatttggccattatgggcgtggccgtggccgtcggcgcgggtatcttttccatcggcgcgcaggcggcagccttccatgcgggtccggccgtaatcatcagcttcctcatcgccggcgtggtatgcggtgcggccgtaatgtgctacgccgaattcgcgtccatgattccggttgcgggatccgcctacaccttcacctacaccaccgtcggtgagatcgtcgcgtgggtgatcggctgggacctgatccttgaaatgctgatggcaggctccgtcgtctccaaatactggggcgtctatctcaacgatttcttccgacttgtcggatggaatatcaacaccaacgtcaccatcggatcattcaatttcgatttcgcgccaatcatcgtcgtagctttcttcacagcactcttggtgtgcggcacgaaaatcggcgcacgagtcgacggcgcgctcaccatactgaaaatcgccatcgtactattcgtggtaatcgtcggattcttctacgtcaaagccgaaaacttcaccccattcattccaccgagcgaaccggcgaccgccaccggatccggcttgaccgcaaccatggaacagccattatggcagtgggccaccggcatgacccccagcatttacggcattgccggcatcatctccggagccgcgctcgtgttcttcgcgttcctcggcttcgatgtggtcgccaccacctccgaagaaaccgtcaatccgaagaagaacgttccgctgggcatcggcgtgggcatgggactgatcatcgtactctacaccctcgtcgccatcgtcaccaccggcatggtctcctacaaagacctcgccaagcagaaagacccgtcgctcgccacggcattcgaaatggtcggcgctgactgggccgccaaaatcatcagttttggcattgtgatcggcctggccaccgtggtcatggtgctgctgctcggcctgacccgcgtggtgttcgccatgagccgagacggcctgctgccgcgctcgctcagtcacacaggcaagcacggcactccagtacgtctgcagattgccgtcggcgtggtcatggcactcatcgcagccagctgcaacgtcagtatccttgccgacatggtgaacatcggcacgctgtcggcattcacccttgtttcaatctctattccgatcatgcgcaagaagcgccccgacctgaagcgagtcttcaaaatccccggcaatccatgggtgcctatcctcatcgcgctcgccaacatctggctcatgctcaacctgagcgtgctcacctggatccgattcgtggtctggcttgcggtcggcttctgcatctacttcggctacggctaccgccacgcccgacttggtacgggagagctggaagttggcaatcaagagtagtcttgaacggtaagtgttaaggaggtaaccatgccatacgttgtcgctcagccgtgcgtcgatgtcaaagacaaggcctgcgtggacgaatgcccggtcgattgcatctacgagggctcccgttccctgtacatcaatccgaacgaatgcgtggattgcggcgcatgcgaaccggtgtgcccgactgaagccatcttctatgaagatgatctgccagacgagtgggcctggtacaaggatgccgcagtcagcttcttcgctgaagtcggcgatatgggcggcgcttccgcagccggcccgatcggcaaggatccggagcaggtagctgctctgccgccgcaaaatcagtgatcggcatttgaaagcggccttttcccgttggaagaggccgcatattttttgtttatagaggattataaggagttttcacgatgggctttcatgagttttcttcgccatacgattggtcgcgtatcgcagcatacaagcgcacggcaaaagccgcgttcggaggcatgatcgacctgtccgtgggatctcccgtcgatcccgtgcccgactcggtgcgcaaggcgctcgcagtggcggcgaatgatccgaatgcgtatggatatccggctactgcaggtactgccgatttacgtgctgcgattgctgaatggttttcggcgactcgcaatgttgatttgcaggcgatccatgctgatgtggtgcctacagtcggctccaaagagggcgttgcgttgatggcgtcgctactgcattgcggcgaggatgatgttgtggtgcagccgaaggtttcgtacccgacgtatgagatcggcacgcagttggctggagcgcaggtgcttaaggtcgacgatgtggctgatgtcgcgtcgtggcgcaatgtgcccggcgtcaaagcggtgtgggtgaattccccttgcaatccgacgggcgaggtgtattcggccgaacggatggctggcattgtcgcagctgcgcgtgagatcggcgcggtggtgctttccgacgaatgctatgcgctgatgcagtggaggggtgctacgaatagtgctgatgatgatccgctgcaatcgacgccgtgcgctttgcgaagtgatgtgtgtgcgggctccgccgagggcgtgctggtgctgtattcgttgagcaagcagagcaatatggcggggtatcgtaccgcgttcattgccggagatgagtctttgattgcatcgatgagtgcatatcgcaagcagattggtcagattattcccggtccggtgcaggctgcgatggctgccggattgcgtgatctggaatccgtcaaggttcagcatgcgcgctatcgggaacgtctcggcgtgttggtgagcgcgttgcgtgcttacggatactgcaccgacatgccggatggcgcattgtatgtgtgggtgagagccaagtcgggcgattgctggaccgatatggagcagcttgccaagatcggcatcatcgccagccccggcgagttctatggtgcgccggaatgtctgcgcttctccgccaccgccagcgacgaggcgatcgcttccgctgctgaacgtttggcgcgctaagccgatatgcaaaagggcttccggcaatcgctggaagccctttatctgcggaggcagagggagtccaacgcccatgcgtcttatggctatgcgcagctgttgatgtcgctgatggcaaagtgaacggcgtaggctaggccgcagggcgtcatccctggtttatgggtacgtgtacaggtgaggatggtggcggttcgtctgttgagaatatgttccataacggaatcctctcagtggggtgaaagctgtgtcgttgatcctaggacacatggcttatgtgattcggaatgggcgcaacgatgcgtcgcttctgaattatgatatcgagcttcttgccatctatgatgttttgctgacacttgtcacagtagtttgaggtcttgttttgaagatatgttttgcgctgttgttcggcgtgttcggttggcggggacagcgtaaatagttttcacagttaatcgtgtttgggcggaagcctgtaatttcctgcttttgaaatacttaaatctattcaaaagtttcgtaaatatttgcatatagaacttacgtaacaaaaaattttaagcatttagttaagtgacttgactttcttgaaaatcaagtcatataatcaaacagtgctttaactgaaatgctaaagcatctatgaaacatgacgatgtgtgttcatgcatgtcaccaaaggagaaagacatgatgaggtcaagaacttggaaacgagtgcttgctgctgtttgcgctggtgtagcggccgtttcaatggctgcgtgcggcggaggtactaatagcaccgcgaaggacggagtcattatcaacagtgttatgaattcaacttcgcaggcgtcgttgaattataatccgttctcttctacagctttgaccggtgtggtcggtgctctgtacgagccattgttctatatgaacaaccttaaggacgaccctactaagctggaaccgctaatgggtaaatcctacactatcagtgacgatgcgaaaactattgatgtaacgattcgtgacggtgaaaagtggtctgatggcaaaccttacactgccgaagatgttgcatacacattcaacctccttaattccaacaaggctttgaataccagtggctttgctggctctgtcaaggccctcagcgatacggaagttcgtatcactttggacaagcctgaatcggtgaatgccctgtcgtatctgtccggcacgatgattgtcccgaagcatgtgtgggaaaagatcgatgatccggtaacctataccaataaagacgctgttggctctgggcctttcacagttaagggcgggaacttttccccaaccgcttacacgtttaagaagaatccgtactactgggatgaaggtaagcctgaaattgatggcgtccgttatgttctgatcaccggtggcacccaagcttctcaaaatgccttgaccgctggcgatgtggactggatgtctgcgatcttcccgaatatggatgatgtgctgtcgggatatcctgatattcagacggttaacgttccttctagtcagatggcattcatgacctgttcgaacaaagaactcggctgcagtggtcctatcactgatccggcagtgcgcaaggctatctattacgctcttgatcgtaatcagattaataaactcgctctgaatggccagtacagtgagctggctggttctctgtatccgtatggacagttcaccaagtacgcttcggatgacgtcccggattcacctattccgggtaaaggacgtacggatgaagccgtcaagatactggaggacgccggctatacgaagggtgatgacggcatctatcagaaggacggagttaagctgagcatcaaagtcgctgttatgagtgatgtctctgactggattaacgcgattaacgtcgcctcgcagcagctggcaaaaatcggtattgatctgcatgcggaccaaatgtcttctaatgaatggactcaggcgatgcagcagggccagtttgaaatgtccatttatggtctgtgggtcgcaggtgccgaaccatggatgttctacaaccagttctatgccactgccaatacggctgcagtgggtaaaagcgcttggcctaattacgctcgctacagcaataagaccgtggacgatgctcttaatgtcatcaataccaccactgatgtggcgaccaagaagtctgaatatgagaagattcagactcaggtgtttgaggacatgccgtatatcccgattctgcgccaatccggtctgagcgaaatgtggagcgataaggttaccggttggccgacaaacgataacgtctatgctaatccgcagacttgggcaaatcctgatttgggcattgttctgaagaacctgaaggttaagaagtaacctgacggattttatgaatcaacggtgcacaaggcgttttagatgtgcgctttgtgcaccatttttccatgtagaaatgaggtaacgatgaggttctacctgaaaaagataggattttaccttgttgcattgtttgcggctttgacattgaactttgccatcccgcgactgatgccaggtgatccggtttcagctgttcttaccaggcttgcatcgcgaggtggtactgttgcacccgaaacaagggaagcgattactgcaatgctgggacaaggtggaggcaacatcttccagcagtatattgattatctgaagaatatcttcaccggcaactggggcgtatctgtaacgtatttccccaaccaagttacaacgtccattgcttctgcactgccttggaccatttgtcttgtcggcacaaccacgattatatcgttctttattcaacaggctcttggtatctgggctggttggcgtcgtggtggcgcttttgataacatcatttcccctgtgtccaccattttccaagctgttccttacttctggcttgcactcatcttcatttgggtgtttgcccgtacgctgcattggttccctcagtcaggcggatacaattatcgtgaggttgtgcccggcttcacttgggaattcttctcgagcgcagtgaagtatgcaatcttgccggccttgacgattcttgtcagctctctgggcatgggggttgtcggtatgcgtaatatgatggtctccacgttgtctgaggactacattgttactgctgaggccaagggcttaagtcctaaacgcattatgatgtgctacgcagctcgtaatgcagtgttgccatccatttctggctttggcacgtctatcggtgcagtggtgggcggatcgctgcttactgaacaggtgttctcctatccaggtgttggtcagatgcttttgcaagcggtgaccagtaacgattacgcgctgatgcaaggtatcttcctgattattaccgttactgttctagtcgtgaactttatcattgatttgctttacggcattatcgatccacgtacgcggcaacaggattgaggttaaatatgtctgcaacaaattcttctgctgctgtggctcgtagccaagctaaacatcgtcgctccgctttggattctctcaagcgagttcttcctgagcgttctgcaaaattgacggctggattaaccattgtgatcgcaatggttttgttcgccattattgttcctatcttcacgaaggatcctaataagatcaatgacattggcttgtctgcgccatctgcccagcattggttgggcactacgcagtctggccaggatgttttcactcagcttggctattctgtccgtggctctctgattattggctttgctgttggcttgattgcaactgcgatgtcgttcattttcggtgttttgggcacatatattggcggaatttgggatgatttgttctctctgattaccaatatcatgctggtgattccggggttgcctctgaccatcgtgatttctgcattgatgccttccaagggcacgatgatgttggtcattgttatttcaatcaccgcatgggctggcggtgcccgtgtactgcgggcgcaaacattgtcgatgcgtgggcgtgattatgttcttgccgcaaaaattgcaggtgaacgtccgtggcgcgtgattaccgttgaaattctgcctaatctgttgcctgtgatgggatcgcagtttgtgttctccgttattatggcaatcctgagtgagtcttcgttgtccttcattggcctggggtcgacccaatccttctcgctgggaaccatgctgtattacgcgcagaacggttctgctctgaacacgggcgcatggtggtggttcctgccaccgggactgatgatcgctatcatcggcgccggattgtccttcattaatttctccatcgatgaagtcatcaatccgcgactacgtaagcctaccaagaaaagcaagggaaagaaagggtgaacacgatggcgactcagaattctgatatcctgctttcggtcgataacctcgacgttatctacgatacggatgatccggtgcacgccgtgcagaacgctacattcgaattgcgtcgcggtgagatgcttggtttggctggtgaatccggttgcggcaagagtacattggcgtatagcatcaatcaaatgctgaaagctccgggtaagattaactctggctctgtgattttccatgataagtcagggaaagatattgatatccgtgctttgtcggggcgttcattgcgtgaataccgttgggagaaaacctccatggtgtttcagggcgccatgaattcattaagtcctgtaactaagattggtaagcaacttgccgatatttataaaactcatcgtcctcatatggcgaagagcgaacgacaagaccgttgcgcacatttgcttgagatggtgcatgttgatccaaatcgtctagctgcttacccgtttgaactttccggcggcatgcgtcagcgtgtgatgattgccatggctttggctcttgagccgcagctgattattatggatgaaccgaccacggcattggacgttgttgtacagcgtgaaatcatcgaggaaatttcggaattgcgccgtgacaagggcttctctgttatttttattacgcatgatttgccgatgctcttggagatcacggacaaaattgctgtgatgaaagatggtgtcatcgtagaacaaggcgtttctgaagacgtgtatttcaatccgaagcatccgtatacacaacggttgctgagctcgttcccatctttgacaggagatcgtggctcattcgttcgtgttccacgccatgcgtgaaaggaataatcatgtcagtattgaagcttgagcatgtgaaaaaagattttaccctgcgtaatggtttgaaaaccacgacgattcatgcggtgaaggatgcatcattcgagttagcttcggataagaccattgctcttgttggtgagtctggttccgggaaatcgacaatcgcccgaatgattacatgtttggagacgccgacttctggaagcatcacgttggacggcaagcctgtccctacgcatggtaaggatttgtacgaataccgtcataatgtgcaaatggtatttcaggatccgttcgcttccttgaatccatatcatacgattttccaccatattcttcgtcctcttatgattaatcacatggcaaatagccaagaggaatatgagcagaaggttatcgaactgctggaacgtgttgaattaacgcctgccgtcaatttcatgtatcgacgtcctcatgagctgtctggtggacagcgtcagcgcgtcgcaattgcacgtgcattggctcctaagccaaaggttctaattgcggatgagcctgtttcgatgttggatgtttctttgcggttaggcgtgcttaacctgctgtctagaattcagcaggaagaacacatcggcatgctgtacattacccatgatctggcgactgctcgccatttttcggatgagattatggtgatgtgtcatggagacattattgaacatggtccttctgatgatgtgattttgaatccgcagcaagactacacgaaagtgttgcttaatgccgcacctgatcccgagaagcatttcgcgaagattcgtgatgggcgtagccgtcagtaatgccgcatggaatacgtctgatcatcatctgattgcttgcaactccctcggcctatggccgagggttccatataaaggagtactttatgcaaatcgcaaaccccgttctcccgggattcaatgccgatccctcgatgattcgggtcggggatacctactacatcgccaattccacgttcgaatggttcccaggtgtccgtctgcacgagtccaaggacatggtccattggaacctgttgccgagtccactgagccgcacgagccagcttgacatgcgcggcaatccgtcatccggtggcatctgggctccggatctttcctatgcggacggcaaattctggctgatctacacggacgtgaaggtcgtgaacggtgcgttcaaggattgcacgaactatttggtcactgccgaaagtatccatggtccgtggagcgagccgattcgcgtgaacggtgtcggcttcgacgcaagcctgttccatgacgacgatggccgcaagtatctggtgcagcagacttgggattttcgtgagtaccatcatggcttcgacggcatcacactgaccgaattcgatgtgaagacgatgaagctcaagccggaaactgaacgtacgatttggcgcggtacggacgtcaaactcaccgagggaccgcatctgtacaaaatcaatggctattactatctgttcgccgctgaaggcggtaccgtgtatacgcatcaggaagtcgtggcccgatccaagtctttggacgcgttgtccttcgaaggcatgccgtcgaatccgttcatcacgaatttcgacacgccgcgttcctgtctgcaaaagcaggggcatggcgcgctggtcgataccccgtccggcgaatggtattacgcctcgctgtgcggtcgtccgtggcatcacgacaatgaatccttcactgatccgcgcggctggtgcacgctggggcgtgaaacctccatccagaaggtcgagtggaccgaggatggctggccgtatattgtcggaggccatggcggacagcgttatgtggatgctccgaaggatgccatcgagaccgaggcatctgcggatcacagccagcatgacgatttcatgtccgatacgttggatttgaattggaatacgctgcgtgtgccgttcgatggcgagatgggcaaggtcggtggcggcgtgttggaactgcgtggccagggctcgctgtgcaaccttttcgatctgtcgttggtggcacgtcgttggcaggcgttcaacttcgatgcgaccgtaaaggttgagttcgatccgaagaactaccgccagatggccggcctgacgaactactacgatgatttatgctggtcgtgggtgttcgtgacttgggacgagcggcggcaatgccgcgtgattgaggtcgctcagaacgatttcaacaactacacgtcgttcctgcgggataccgctccagcagtgccggatgacgtgaagtccgtgtggctgcgtacgaaggtgcgcaagcagtggtattcgtatgaatattcgtttgatgggatttcatgggtcgatctgggcgtgaaactggacgcgaagatcctgtcggacgactatatcctgcgtcgatacggcggattcttcaccggagcatttgtcggtttggctgcaatcgatctttctggatacgacagggttgcgaaattcagcgaattcgattatcgggaattgcccgataacgagtaggtgttttggtggcgacgggagcgtgttttcgtcgccactgacgtatgcaagtcgtcatgaatcgtatacggaggctttatgtggacttgtcaaagatggaagaaggaagagcaacgatgcttgcgatgtcgaagattttcgatgacggatgtgtgctgcaatccgggcgggacgtaccggtatggggttggtgcgaaccatggcggagcgttactgtcacggtttaggaacatgtgtgaataaggagattcagcaatgaagtttgaataccatgtcaaaccaaccggcagcgatgctgcgtgtggcgacgcggaacatccgttcgccacgatttccaaggccgcgcaggtggctgctccgggtgatacggtaatcgtgcatgaaggcgtataccgcgaacaagtcgatccgaaacgcggcggtctgagtgaacatgagcgcatcacctactgcggagccgaaggcgaagcacggccggttatcaaaggctcggaatgcgtgcagggctggacggaattggccgatcatccgcatgtgtggacggtggtgcttgataatacgatgttcggggatttcaatccattcgcgaccccgattttcggtgactggctggaaatgcccaagttcggcaaggatccggacaaacatcttggcgatgtgtatctcaacggagtttccttcttcgaatcgacgacgttggaaggcgtatacgatccgcagccgcgtgatacggatgaggatttcgtgttgaagattccctgccctgtgccggatgtggaccgtacacgttatgtatggcatgccgaagtggacgagaatgccggcaccacaacgatctgggcgaatttccaaggtgccgatccgaatgaggaactggtggaggtcagtgttcgtcgcacatgcttcttcccgtcccgcaaccatgtcaactacatcaccgtgcgtggctttgaaatggcgcaggccactggagattgggcgccgcctacctcgcagcagtggggcatgatcggcccgaactggtcgtatggctggatcatcgaagacaacgtgctgcatgacgccaaattctccgcggtgtcattgggcaaggaaatctcatccggcgacaacgagtgggcgaaaaccgagcgtaagaccggtcaccagtaccagttggaggccgtgttcaaggcccgtcgcatcggctgggaaaaggggctgatcggcggtcatatcgtacgcaacaacgacatctacgagtgtggacagaatgccatcgtcggacatatgggcagcgcattctgccgtatcgagcataaccatgtccatcacattgcgttgaagcgtgaattcttcggatgggaggtcgctggcatcaaattccatgccgcattggatacggtcattgccaacaacaacatccacgactgctcgctgggcatgtggatggattggcagacgcagggcacgcgcatcacgcgcaatgtgttccacgataacgtccgtgacctcatgattgaagtgagtcatgggccgtatctggtggacaataacgttttcgcctcgccggtgatgttccagaactggtcgcaaggtggtgccttcgtcaacaatctgatttgcggcggcattgaaccgcataccgtccccgaccgttccacgccgtatcactatccgcacaccaccgaggtggccgggtgcgctgtggtatccggcggcgatgagcgttggctgaacaacatgttcgcgccgcaaccggtgaaaccgaccgtcggtgaatatggtttgtccgcctacagcgattgcccgatgtcgatgcatgaatacttggaacgccagcgggccatgtgggcagatccttcgcagggtggtggcgagcgcaatcctctgcaatctctatacgcgggcggcaacatctatctgtccggcgcacaggggctgaacaagcaggaaggtgcggccgacgattcggagcgtatgcaggaggacgccccgttcttcggcggcaccgcctccacgagcgttgcgtgtgatgagcccatgccggtgacattggtcgaagaacccgatggactgtacctgcggtgcactgtgccacaggccgtcgccgataccaggatgcaggtcgtcaccagcgatatgctcggcgtgcctcgcatcgtggaggaacgctatgaacagcccgatggcagtgactatgtgctggacaccgacttgctggaacaagccttgacggcaacggaacgcaaggccggggcgttgaatggtcttgtctccggagagaatcgcatccgaatctgggaatggaacaactgatatgacaaatgcaaccgataccaacaagacattgggcgagtccatgttcgcacagtgcggatatgcccaggacgccatcgataagcgcgtgtcacaggtctggcatgaaattttcgaaggtccgaacaaattctattgggagaacgacgaaggtcttgcctatgtgatggacaccggcaacaacgatgtacgtaccgagggtatgagctatgcgatgatgatcgccctgcaatacgaccgtaaggacgtattcgacaagctgtggggctgggtaatgcgtcacatgtacatggaggacggccatcatgcgcattatttcgcatggtcggtcgcgccggacggtacgccgaactcgaatggtcctgcacctgacggcgaggaatatttcgcgatggacctgttcctcgcctcccgtcgctggggtgatggcgaggatatctacgaatattccgcatggggacgcgagatcttgagatattgcgttcataagggcgaacgctacgacggcgagcccatgtggaatcccgacaacaagctcatcaagttcattccggaaaccgagtggagcgatccgtcctaccatctgccgcacttctatgaagtattcgccgaagaggccgacgaagaagaccgtccattttggcatgaggcagccgccgcaagccgtcgctatctgcaggcggcctgcgacgagcggaccggcatgaacgctgaatacgcggattatgacggaaagccgcatgtcgacgagtccaatcattggcatttctattccgatgcctaccgtaccgcggcgaatatcgggctggatgcagcctggaacggtccgcaggaagtgctgtgcgaccgcgtcgccgcgctgcagcgattcttcctgacccacgaccgtactagcgtctacgccatcgacggcaccgccgtggacgaggtcgtgcttcatccggtcggattcctggccgcgaccgcgcaaggcgcacttgcggcggtgcattcggcccagcccgacgcggagcataatgcccgtgaatgggtgcgcatgctgtggaatacgccgatgcgaaccggcacgcgtcgttactatgacaatttcctctatgctttcgccatgctggcgttgagcggaaagtatcggtatgaatgatgattacctcaactaatcctatggtctacacggattttcctgatccagacatcatccgggtcgggggcgtgtattacatggccactacgactatgcatttcacacccgggtgcgatattctgcgcagctatgacctagtgcattgggaattcattgcgcacgcattgaatatcgtggcggatacccctgaagaacgtttggaatgtgaaggtgccaacgcctacggtcgaggcatgtgggcgccgtcactgcgttaccatcggggcacctggtatgtgttgttcgccgccaacgatacgcatgtcagctatctgctgacggcggacgatccatgcggcccatggcgaaagcgtgagcttgacggcttctattacgacagcggactgttctttgacgacgatgatcgagcctatgtcgtacatgggcagtcgacattgcgcatcacggagttgaatcctgaattaagcgggccgatgccgggtgggctcgaccgggtcatcgtgcaggacgatccgcaggctgaccttggttatgagggcagtcacctgtacaagcatgatggacgctattacgtcttcacctgtcacttcccgcaaggcaagggcaaaacagaagcctgcttgatggccgaatccttggatggcgctttcgaagtgcgtgaaattatcgacgacgacctgtccttccacggttacggagtcgcgcaaggcggtatggtggacactccggacggcgactggtatgcattcatgatgcaggaccgcggcggtgtgggacgcgtgccgatactgatgccgatgcggttcggcgaggacggattccccgtcgtcggcgagaacggcaaagtgccgcagtcggtcagcgtgccggctgcaagctgtgccgaacctgtcacgcccatcaacggcagcgaattcatagcccggcataacgccgaaggcggagtcgatgccaactgtctgcagccatactggcagttcaatcacatcccacataacgaatactggtcactgacggaacgtccgggagcattccgcctgcattccggacgcatcagctcgaatctcaatcatgcatggaatacgctgacgcagcgcacgatggggccggtgacggtggccgaagtcaccgtcgacgcgtcgacattgcatgatggcgacttcgccggattggcggcgttccaaggatgctattcctacatcgcgcttacgcgaaggaacggccgcacgatgctgaccgtccaatacaagccggcgaatgacgattccatcttctccgacgatgattgggacagtccagccgtaacggatgcggaaatcatggcggatgcggattgcatgcgcctgcgcgcggtatatgatttcaccgattgcaaggatgaagtgacgttcttctaccgcgatgcggatacgccggaatccgaatggtgtccattggggacagcgcaccggatgatcttcaaaatggatcatttcacaggttgccgtatcggattgttcctgtattcgacaaaagagaccggtggaatcgccgatttttgcgactttgcgtattcgacgccggatacgaaggaaagagagcaatgaagcgacaggtcatagtggcgcaaggaactgtcgaaggcttggcggctgaagatcagggcatcaccgtgttccgaggggttccgttcgcccagcctcccgtcggcggtctgcgctggcgtgcgccgcagccggccctgccatgggatggtgtgctgcaagccttcgatttcgggcctaccgcgatgcagccgacgccgggcgcctccaatgatttctatgatcgtgaatggggcaccgatccggccgtgccgatgagcgaggattgcctctacctgaatatttggactccggcattacgcggatatggtgcggatagcatggtagcctccgaaaagctgccggtcatggtctggatctacggcggagcctatcaatgcggcggcacatgtgaaaaggaattcgacggcacacgtctcgccgcgaacggcgtcgttgtggtcagtgtggcctatcgtctgaatgcatttgggtttatgacgcaccctttgctgcatgaggaggccgtagaacgcggcgacggcgaaccatatgcgaatttcggattcctggatcagcgtgccggaatccaatgggtgaaggaaaacatcgcgaagttcggcggagatccggaaaacatcacggttttcggccaatcggccggtgccgccagcgtcttggcccagatctgctcgccgatgaatcatggcctgtttcagaaagccatcatgcaatccggcgcaggcctagggcatttcaatgcgcggcaggacacgctggagcatgcgcaggccaatggaatccgtctgttcgaagcattgggtgtctccacgctggagcaggcccgtgcaatcccggcccgaacggtattggaagccgccgagtccctgcctgttccaccggacagcggacgtgaagatgactggtcgatgatcgtcaattgggtgccatgcgtggacggcctgttccttcccgatcaggaggagcgtatcgtcgagggctgcaaggccaacaacgtcgacatgctggtcggcaacacgaccaatgagttcatcgctgcgactgaagatgggaagcctgtgcatgtcggtcagctcggcaatctcacgctgatccgcaaatggaccgcaagcggtgggaccgcgccatactactatcatttcgatgtcgctatgccgggggatgatgccggagccttccactcgtccgatctgtggttctcctttggaagccttgcgaaatgctggcgtccgttcgttggatggcattacgatctggcaaggcgaatggggctgtactggaccaatttcgcagccaatggcgatcccaacggaacggaccgtgacggaacgccgcttcctgtatgggatccttgcatcggtgaggaatgccctgccatgcatttatgccaagaaccgggcatgcggacggattggcttaccgaaacggatcgaaaagcattcggcctgtgacggcatgccgttgatgtataaatacggatatgtaaacagggacggtctttgtggatcgtccctgccgcataatggtttgccgttgcgcgtgcaggaggatttcgagactgattatccgacttttcaccgtttccgtaggctggttcgtcggtggcgtctcgcggaggctcagagcatcaaagaccctgttcggcgtcgtgcggctattgtgaggctaggagttgtttgaagtgtcctaggccggatatttcgccgtataggggcgtttctgcgtggattccgtcggatgtggcgtctcaatcgttggacgtggcggtgagcgtgaacgggggtgattatgaggaagactgaaccccccgctcatgactagcgcggacactatggcgtatgtgcagtgcagtcgtcagcatgtcttgttgggtactcaactcgggtaccttgctgggtaccggaaatgttgacattggcgtacatttccgtacattctctgtttgtgccgtatgtcttgaaatcgttggtattccgccgttttggcatgaaaaaagggcttccggatttctccgaaaaccctcaaggcggagtcagagggattcgaaccctcgagccgctaaaaacgactaacaccttagcagggtgcccctatcggccactcaggcatgactccactgttttaccgttttcacggcgcaacagcatgcaactataccatccatttgcgggcaaaacaccatatctcgcaaaaaagatgagaaaacgttgaaatttcaacgaaaatacgtgttgtgggattgtgctgccatgctggtttcgggtttgccgacacgccgttgcgttaaggtgcggcactatattcgaacatttgtttcaatatcttgcgaaaaacggttatcatggaaccatgagcaccgcaccgagaatcgcagcagccaaacgtgactggggtcacgacgaggctggctgcacggtgctgcacatcgacatggacgccttctacgcatctttggaggtggcgaggcatccggaatatcgcggcaagccggtgatcatcggcgtgggcaaccgttcggtggtgtccgcagccagctacgaggctcgccaatacggcgttaattcggccatggcgagttccagggcgcaaaagctctgcccgaacggcattttccttccggtcgacatgcgctactatcgcgcgatgtcgcatcgcattttcgaggaagtgttcagtcggatcaccgatcgtatcgaacaggtatcggtcgatgaatgctatatggacgtttccggggcgctgttgcggtgggggagtcctcgcgccattggggcgtggattcgcgaacaggtggtttcgcgttacaacgtcacctgttccgtaggcatcgcggcaaacaagctggtcgccaaaatggcatccaccaatgccaagcccaacggcatgcttatgattcctgtggcgcggcatgcgcaattcgtgcagatgatgccattgcgtggcattcccggcattgggccttctttggagaaacgactgaatgcgtggggcgtcaactccgttgccgatcttgcgcgtatgagtcttgaatcgttggaacaggctactggatcggctatttccgcgcgtgggctgtatcaggcggcccgaggactggatggtagacccgtcgtgccgtatacgcaggaaaaatcgattggcgcggaacgcaccttcgatgcggatacgcaagacatgcggcaggtgtgctccatgctccgctggtgttgcgatgacgtggccacgtctttgcgcaggaggggtttcctcgctcgtaaagtcatggtcaaacttcggtttccggatttgagctacgcaacaaaagggcacacactgggccgtcctacggatgcggcgagcgtgctctacccgcaatgtgccaatctgctgctctccatgatgggcatggctccggagtctgcgcatgccatttcccttacgcgccccgtgcgtttggcgggaatgagcgccagtgggcttgtacttgccgaagaagctgtgattcagccttcgctggatgatctgctcgaagaaaacgaagtcgaacagcgtgctgaaatctccggcggcagcgcccagtcgcagacgcattcggcgcgtttgcgtggcgcggaggcggcgcttgatgcggtgcgtcgaaaatacggtaacaatatcgccagcttcggggtgtagaagcaagggcatatccgttattcttgaagtgatgagttgagaaggtccagaggaaggcaggggcgccatgaaatacaggaaagaggcggtgcacgcgaccaatccggaagtgcttgcggccggccgtcgcaaacttgtgtttgcggcattggcggtgcttgccgtcgtgcttgtggcgggaacttggctgttggtgcatagtcttcaaccgaagcagaacgatgctgccgtgaagccggagacggcggtaagccagccgaaaacggttgaaaagaagcaggcgactgagtctgcggagcatcatggcaattctccggattgccccgacaccgactgcatcgccatgcttgtcaacggtgatctgctgttccacgaggggctttggaaccagtacgccagcaccaacaccgcggccacggatggcacggcattcgactttaccggcttgttcgagccgatgcgcaaatacattgatgcatccgacattgccgtatgcgaattcgaaacacctatcgcgcagcgaggcggtccatatacgggctatccggtattcaatattccggcagaagtggccgacgccgcgaaaaacgtggggtatcgcgcctgcacgcatgcgtcgaatcattcctgggaccaaggtgctgacggcatcgcgcgcttgtgggacacacttgatcaggatggcatcgcccagaccggctcctataaaaccgaagaggattcgtataagccgttggtcatcgattcgcctaccggtggcggtaagctcggtctgattgcgggaaccgtgtcgttgaacgcgcagacgcctgactacgactggcgtgtggatcgtctgcgtgaatccggagacccgaaccaccaagccgatatcgacaaggcggtagccaaagcgaaggccgctcgcgagcagggtgccgatgtggtggccatagccatgcattccgtgcaggagtatttggattacgctgattcctggcagcaaagtgaggctcatgaactggccgataccggtgcgttcgacgtgatttatggcgctggatgccattgcgcgcagccggtcgagaattacaacggcacttggatcatctacggtttgggcaatgccgtgaccgaatcggccaatactgcggacacgttggtgaacaatcaaggcattaccgtgcgtattcaattcgcgggcaagaaaggcgtggccggttcgtggcgtgtcaaccgcattgactgggtgcccagtgccaacgaaacccaaggcaaataccaatggtgttcccttgcaagcgatcatcctgacggcacctgctgggacgaaacgcaagacgccaatgtgcgccaacgcatctgggacgtgctctattccatgggcgccgatcagaacgtggtcaaggaatggaatattaccgcggagcaaacgagttcatctggccagtagttttccgtggcacaatatgcctcatgccgtgagtcgcatatgcgtaagaactctcgaacatacaatgtgaggtgaaaacatggaaatctacgaaacccaaccggaacgcaccgatctgccactggtggtcatgcccgtcatcatcgaatcgatgatcgaaccgttcgaaaagaacttcgaactgctcaaagacattgcccgcgtgcgcatgtacaaggatttcacgcttgacgaagacaccatcgtcgaacgttgcgccgaagctgacgccatcatggtgatcggattccactgcgccgattccatcctcgatcggttgaacgccaaatgctatgcattcggcggcaccggcgtggccagttacatcgatctcgacaaagccaaggaacgtggaatccgcgtatgcaatgtggtgcactatggcgaccatgctgtggccgaacacaccatcgcactgcttatggaactcgccagacaggtcggcaaactcgacaggcaagtcaaaacaggcgattgggacggtgccgacggctacgagctgtacggcaagaagcttggcatcatcggccttggcggcatcggtcagaccgtggcacgcatcgccggagctttgggcatgaacgtgtccgcatggaactcccatgtgccggagcaggtgttcgccgatctgaatatcactccagtcaacgatatgaacgagctgattgccggttccgacgtggtatccatccatatgccgctgctggactccacaaaaggcatcgtcactgcggaaaacctcgaagctctgaaaccgggaaccatgttcatcaacacggcccgtgcggaaatcatcgaaccgggcgcattgctcgccagactccagcgaggcgacattcctgcggcgctcgatgtgttcgaacacgagccgctcactgccgacgatccgctctgttcgattccaggcatcatcctcaccccgcacaccgcgtggcgcaccgatggcgcctatgtgggcatcaccagacaggtggtccaatccgttgcggcattctgcaagggcgaggatttcaacgtcgtcgtgtgaataaccgcaaaaccggtatgggcaaaacatgtggacggtcggcgtgattgggtaggttgaaagacatgcagaccatactcgattccgccgatcagcccgcgcatgatgcgttcgtcgagaaaaaatcggaattcatcggcgacgcctgtcatatcgactccttggatgaggcgctcgcgtttgtgcagacgattcgcgaccagcatccgaaagcgcgtcatgtcgcctatgctgcggtgtgcggcggttccgacggtcgtttggccgaacgcatgagcgatgacggcgagccatcgggcacggcgggcaaaccgattcttgacgtgttgcgcgccaacgagatgacggattgcgtggttgccgtcacccgatatttcggaggtattctgctgggttccggaggcctgatccgcgcatattccacgggtgcgtccattgcggtcaaagcggcgaacaaagcgaagatcgtgccatgttgcgaatatcaggtgacgcttgactatccgcaattgggaagctttcagaatctgcttgcgtcagtggacggcgagcaggcggatgcgcaatataccgatcgcatcgtgctgtcaattatcgttccgcaggaacaatcgcagaaattcaaatcacgaattatcgaaacgttcaatgcgaccgtcacgccgcggcaaacgggcacgtccaatcgcccggtgcgatactgaaatccaacgatgacgaatggaatattgagcagaacataacgtaaggtggaacgcatgaccgaagatatgagctcgcaagacactactgccgtggaaaccgccgaaaataccgtcgaaaccgttgtggggaacgccgacgaacaagcatcaaaccaagaggttccttcggatttcgagcctttgaccgcaacctacgagcggttgcgtcactccacggatgccgccgaattgagcgaattcgcgcgccgtccgctgcctgaccgttccgaacaggccgctttctcgcgtgccacggcattgctggaagccgtcgccggcaatgcgcatacaccgttggaagatcgcgtttttcttgcggaaaccatgccgtttccgaatattctcgtcaaactgtccaccgacgaatccgttgaggtgcgtaaagctgttgcgggcaatgccaatgataagaattggctggtggggcgtctcaccaaggatgagtccctcgaagtgcgcgatgtcgcgttgcgcaacaagcagacgtcttggaagatgcggctcgaaggcgcgcaggatccgggtatggattccacggcccttgattttctgggatctttgggggtcggcgtcgagccgaatgctcctgccgtgcttgcttccatggtacgtagggccgttgctttgaacccgaacacgtctgatcagatgttggaaaaacttgcgcaggatgcgtcaggagaggtgaaaagggccgctgaacggcatctttcggaaaaataattgcatacgttgtcatttttatgagatttttgcgcgtggtgcatgtgattggggcatagactgttgtttatgacagaacagaccgaaaatgcaacgcgtctagcccgtccgatcattcgcctggcaaagttggtgggtatcgccaccagttacgtcggcatgagccgcgactaccacgaaatcgaagacgatgttctcgtggcggtgctcaaggcgctcggaatcgacgcttccaacgatggggcgatcgagcagtccatcaccaccattcagcgcgaacgcgacacacgtatcgttcctccgaccgtgctgcacgttgtcggcaaggaaagcaaggttgaggttcacggcggagcgcttgacgttcctgaagcttccatcatgctggaagacggtggggcgtatgccggcaaaatcgagctcgagggtggcagcgataccgtggtcgaggtcgacggcggcttcgtgtgcacctcatatctggtgcttccggcagatcttcccgaggggtatcacacccttgaagtcaccgttggtggcaagacggagattgcaaccgttatcagcgctccggaaaagatcgagctgcttgacgacatgaaggaaggctccctgtggggctggatgagccagctctactccattcgttccagcggttcctggggtatcggcgactatgaggatctgaagaccctgctcgtcgagtccaagaagaagaccggcgccgacttcatgctgatcaatccgctgcatgccgccgaaccggtgccgccgatcgagccatcgccgtatctgccgatttcgcgccgtttcattaatttcagctatattcgaccggaatccatgccggaatatgccgtgctttcgccggaagacaaggcgaaagtggatgaactgcatgagcaggtcaagccgctcaacggcaatgcgcggatcttggatcgcgaaaccatgtggcgtaccaagatgcaggcgttgtggatcatctacaagtccggcctttccgcacagcgtcaagccgagttcgaccagtatctcgccgaagtgggcgatgagatcgaatcctatgccacatggtgcctgtgctacgacaagtggggcgcctcgaatggcagcgacgacgattgggtgcgcaagtacaatcgtgattccgaggaagtcgcgcagcttcgcgcacagtacccggacacgcttgaattctatcgttggctcgaatgggtcgccaccgagcagctgcatgcgacccagcaggcggcgcgcgaggccggcatgaagatcggcatcgtcgccgacatggctgtgggcgtgcatccggccggttccgacgtgtggtggaacccggagcgttttgccaagggcgccacggtcggcgctccgccggacatgttcaaccagcagggtcaggattggagtcagccgccgctgaatccaatcgctctcgaacagaccggctacaaggtgtaccgagatatggtgcacggcatgttctccaatgcaggcgcggtacgtattgaccatattctcggcttgttccgcttgtggtggattccggaaggcaagaaagccatggacggcacctacgtgcattacgattctgacatcatgctcggcattctcgcattggaagcatcccgcgccggtggtgtggtcgtgggcgaggatctcggcgtggttccggcatacgtgtccaagtcgctgtccgagcacggcattctcggttgcgctgtggaatggttcgagcagttcgacggcgaattccgtgcgccgaaggattggcgtccgtatgcgttggcatccgtcaacacgcacgatttgcctccggcagccggctacttggagtacgggcatgtcaaattgcgtgaacagcttggactgctgtccggtccggtcgaagaattccagaagtccgcggaagccgaacataacgccatgctgagcatgcttgtcgacgaaggctatctcgacgcttccgcgctggaagacgagcttgccaacgaaaacgagatcatcgacgcgctgtaccgcggtttgaagggatcgccatgcaagctcatggcggcgtccatcgtcgacgcggtcggcgaaaagcgcacgcagaaccagccgggcaccagcaacgaatatccgaactggcgtattccgctggctgacggcgatggcaatgtcgtgccgctggagcagttgttcgacaatactcgactgcaggagatcgcagcgattatgcgcggctgagcttgcagcggattgaggctgattgcagctgatttcgattggcggaaggccggcgatgcaaggtagggagacctgccaagcgtcgccggcttttgcgtgtcgattgctgtgtttccgtattcgcaagtactaggggttgatgtgtcgcgaatgtcaaggctggcgatatactagtagattgttgtgtttccctacggggtccttcaaagcgcttttcccactcgccatcgaggactttcagggagcccacggataatgagacctgaaaaaggcatcattccgcgcctaaccaacgcagagatgttgatggaaggtccggaacacaatatatagaaaaggtacatcgtgaaaactttcactccgaagccagctgatctgactcacgactggtacgtcatcgacgccaccgacgtggtgctcggccgtctcgcttcccaggcagccatcctgctgcgtggcaagaacaagccgacctacgctccgcacgccgattccggcaaccacgtgatcattctcaacgccgataagatcgctctgaccggcaataagttgggcaaggaactgtacatgcactccggtcgtccgggtggcctgcgtcgcgatagctacggcaagctgctcaagaccaaccctgagcgcatcatcaagtccgctatcaagggcatgctgccgaagaatcgtctggccaaggtccagctggatcgcctccacatcatctgtggcaccgagcatccgtacgctggccagaagccgcaggttttcgagatcgctcaggtctcgcagcaggctaagtgaaccgaagggagataagaaacatggctgaaaacaccaacaactccgcggttctcgagaccgaagaggagctcacctcgtacaccaccgagaccaacgctggcgctggcaccggtacttccgctatcgctccgggctatggcaccggtcgtcgtaaggaagccgtcgctcgtgtccgcctggttccgggcaccggcaagtggaccatcaatggtcgcaccctggaagagtacttcccggccaagctgctgcagcgtgaggtcaactccccgatcgtgcttctcaagctcgaaggcaagttcgacgctatcgtcctcgttgacggtggcggcaccaccggccaggctggcgcaatccgcctgggcgttgcccgcgctctgaacgctatcgatcgtgatgcgaaccgcgcagccctgaagaaggctggcttcctgacccgcgacgctcgcgtcgtggaacgcaagaaggccggtctgcacaaggctcgtcgcgctccgcagttctcgaagcgctaaagctttacggcttatacgaaacccctcggaaattcgacttccgaggggtttcttggtattccagacggtattttgactggcgtttagatggttggcatctgcttcatcgcgctgatgctcaatgccggaagcgtccacaatgtcggatcatcttccgacagcccatcatcggcggattgcagattgtccgcatcgtctttcatttgccagtacatcatgttgatgcggtgcagatggttgcggagcctgcccgcgggcttgctttccgattcttcgtcgaattccgacacccgttcgatggacgttcccaatcccggatattcgccgacaatctccgatgaggaccagaccatctcccattcgatgtctttcggcagatgaaaacgcgtgacctcatcggaaccgttgatcagaatcagcagacttggctcgtcgggggatagcagctgcatggcgaacgaacggacggaaggattcgtccaatccgcatcatttggcatctgtccattcggcaaataccaatgcacgcgatcggatttcttcagcaaaccgatttcgctcaggcgagtgaagaaatcctcatgattgtacaaatcgcgggatttacgcaatgtgattaaacgggaagtgagattgaactgcttcaattccggcgtttgttcggtactgtacagccaatcccaatcaagccaggtggtgtcgttatcctgcgtgtaggcgttgttgttgccgttctgcgaattgccgaattcgtcgccggcaagcagcattggcgtgcctagcgaaagcagcagcgtacccagcaggttcatggtggcgcgttgccgttgctgcacgatgatttgatcgccgctggggccctcgtgaccgaagttgacggaatgattgtcgtttgttccgtcgcggttgttttcgccgttggtctcgttatgcttggttttgtacatggtcagatcggctgtggtgaagccgtcatggcatgccacgtaattcacggacgcggtcgaaccgcggcctggatcggtggcgaacaggtcggatgatccgcacaaacgtgtggccatctcctgcatggtcatttcgccgtattctccaccgcgcatgcgatccacgtcggtcagccagaatttgcgtgtgcaatcgcggaacctgtcgttccattcggcgaaggggatgccgaattcgccggtgcgccagccatttggaccgcaatcccaaggttccatgatcattttgagattgccgagcagcatgtcggaacgcaatgcatacaggaacggatggtagcgggtgaattcaccgtcgagacgtgccagcgtcgccgcgagatcgaatcggaatccgtcgatgccaatgcgtttggcccaatagcgcaacgaatccacggcgaatgtggtgacgtgcgtgttggtgaaatcaagcgtgttgccgcagccggtggtgtcgtacaggcggctgatcttatctttggtgcgtcgataatatgccagattgtcgagtccgcgccagcatacggtcggtccttccggaccggattcgcaggtgtggttgtagaccacgtccataatcacttcgaatccggcctcatgcaaggctcgtaccatgtcgatgacttcctggcgtactgcggccgcaccggcctcctgggagcgcttggtggcgtatgaggcttccggcgcgaaatagccgagcgtcgaatatccccaatagttgacgcgtccgcgttcctgcagaaacagttcggattgcttggcttgaatcggcagcagctcaatggaagtgacgcccaaatcctgcaggtaggagagcgtcgccggatgtgccaaacctgcataggtgccgcgaagctctttgggaagccaaggcgcgttggctgtgaagcccttgacatgcagctcgtagatcacggttttgctccatgctacatgcgggtgtgagggctcaccgtcatgcttgttggtggcacgatcgtctatcgccacggaaacgggaacatgccccacggagtcgatggtgctcatcgggccgaatggcgaacctttgactttgccgttcacgatctcgcattcataggagaacgctccgggatcaagctccattgatccttcgatgcctttggcataggggtcgagcaacagtttgtacgggttgaagctcacgccgtggtcggggtcccatgggccgttgacgcggtatccgtattgcatgccgtcccatgcttgcggcacgtgcacgtaccacagtccgtaattgggcccgtccatgcggaatagtgtttcgcgaagattgagcgaggggattcgccgagtgcagatgcgctgtttcatcgcctgatcgatgaaggtcagccccggctcgttgaacaatcgtactgcgtcggcatagaaggcactgggttggtcgagcggctcaagtacgcaaaaccacacttggtccgctgtttccgagcggacgatggcatccgccccaccatcatcggtgaagtagagacctggacgagttgcataacggtgcaaagacgggttcttcataacctcattctaaacactttgaaattatctgttgacttactatgtcgaggctgtcgacgctcgtgccggtctgatccggccgtgagcttgaactcgagcaggtgcaggacttcctcgacggcaaaatcgccgccgcttccaaggctgtcgtcaaaatcggtgctgacgctgtttattcgtcctgaacagcctggaattagcaaaaaagtgtcacgatatgacggcaaatgcgccgctggcatcgccgcatagcgcatatcctaatcacaaaagggaaaaacgtatcgtaccaaccatcacaaggagggtattatgaccaaaccaatgtctgaattcaccaccgatctgcagcattccggcatgccggcgaaagatctggacgaaaccatcgaattctataccaagaaactcggtttcgagttggcgggactgttccataacggtgaaaaccgttgcgcattcctgcgttacggccatctgaccatcgaaacctgggaaggcgacccagcgccgctgaccaccggtgccatcaaccactgggcgttcgatactcccgacattgaagccgcgttcgaaaacgcgaaggaactcggactgaatttcaaagacactgaaattcagcatatcgacagcttctgggagcacggcattcgctacttcaatgtatacggaccgaacggcgaaaccatcgaattctgccagattgtcaaataactatcattagatgattaccgtcaaataatcgctgaaaaaatacaacaagtgaagcagacggaagcgaacaaagaagcgtgcgttgaaccttatatacgggttcggcaacacgcttcttttgttatgcaagcgatgcgattaataatatatgcacaaaaggtcacatatcgcatagttcgcgtacgtacggctccacaaaacgcagggccgcgccgataatgtcttgatggtcgagcgccattcccttgcgcagggtgaaatccgtggtgccgaatggcgtatgttccaccacgcgttcgcgtagtccggccatatcgtcatcatcgagatattgtgctgcctcaccgctgatgatcacgtcaccggccagtaccgagcgaatgttcgttaccgccagcgccacataatccagccattgcgagaatcgtttgcgatgctcctgctcgccttgttccaacaccgaaaagaagccgggcaggctttcgccgtcttccatcagcgtttccggcgagcaatacgtgtccatgcagcctaattgcccgcaatagcaagggtttccgcctggaatcagcgtcatatgttcgattgagccattgcattggttcggcccttggtagagcgatccgtccacgatgaccgcgcctcctgggcgacgttcaaggtagatacagacggcgtccttcagattgtggtcgaaccagagttccgccatggcagaagcgtcggaatcgtgaatcatcagcgacggatagttgagaccatggctgagttcgctgagtttcaggccggtgttgcccatgattttgccgaaagtgatcgactggccgtccgccgacacgatgccttgcatgcagaaggccacgccgagtaccgtgctgccttgtttcgccagttcttgcgcgaaatcgttgatgatgccattcatgcgctggtagtaggcgtcgttgttgcgataggggagtgtgcgctgtctggtggctacggatttgccgttcagatcaatggcgatggccgtgatttgtgtggtttggatgcgcacgccgatcgccacgctggagtgtgccgcgaattcgtagatttgcgctttgcgtccaccggtggattgctgcatctcgcctttgacgatgagcccgtcggcctccatggcgcgcagattctgcgtgatggttggcaggctgagccctaattcgtgttcgaacatctgcttggtggctgaaccttgggtatagatgaacgcggtcatggccttgagattggcttctttgactgatagggcggattgggctttcactggttgatccttcctgcgcaacttctttttcaagactacttcataaaagtcctttccttatgtctcgtgttggtctgagatatcaggtattgcaaaaaagtatcaaaaatagctgtgcataaaggattttctgccacttttctgcgtcgaaaatatgtttatcaacaaaaaagttgagacggtgacaacgacgttctaccaagaaaagaggcatgttatgaagataggtctgccgcgcacgctattggccggcttggtcgccatagcggtgttcatgaccggcgatggctttgaattgacttttttgtccaaatacatcgtggaccagggattcagttcttcacaatcgtcgctgatgttcaccatgtacgggctgatggctgcgcttgctggctgggcgtccggtgtgctagctgaaatgttcggtgccaaacgcatcatgctgatcggcgcgagcgcctgggtcgttttgcacctgctgttcgttggtgtggcgctgccgagcggcgtctatccgctgatgttaggagtgtatgcgttgcggggtgttggctacccgctgttcatctactcgttcgtggtgttgatggcgcaaaccatcgatactgccaagctcgcgtcggccatggggtggttttgggccgcctactcgttcggcattggcgtgttcggcgcatatttgccgagtttcaccattccgctggtgggcgagtactactcgctgtggctttcgttgcctttttctatagctggactgctgatttgcctgctgctggtgccgaaaagcaagggtgctgacacctcttccatgagcaatgcagacaagctgcgcgagcttagtcgaggagtcaccattctggtgcataatcgccaaatcgctttggctgcggtggtgcgtgtgatctgcaatctgacgttgtacggctttcccgtcatcatgccactctacttggccactaccaacaatggcggcggcgcttggtttaaggtttcgcaatggagtcagatttggggattccagtttgtggtcaccattttcggcaatgtgttctggggtcgtatgggcgattcgcatggttggatgcggcaaatgcgctggtttggctgctggttctgtgtgatcggcacgctgggcatgtattacattccgcagtttttcggggcgaatatggtgcttatgtgtgctgatgcggttgttcttggattgggaatttccgctttcgttcctatgggagccgtgtttcccgcgttggcgtcggaacataagggtgctgcgatttccgcgcataatctcgcttccggcctgactacgtttttcggtccgctgattgcgacggtgctgatttccactatcggattcggcggcgtgtgctggacgtatgcgatctgctatgcgatcggatcgttggtcacgctcggcattcatcctcatcaacccggatttgacgatcgtggccatcgcattaccgcgatcgaacgtaactaatcgcaattgaatatcaattgctcaatcatcatttttctcaaaaaaacatcattatccacaaaggagaataatcatgaaggcagtcgttctcgaagagcagggcgtcatcaatgtgcgtgaggtgcctgacgtccccgcacctggtctaggcgagctgaagatcgcgccgcataccgttggtgtgtgcggttctgacctgcattattacacgcatggtcgcgtgggtaaatatgtggtggagcagccgatgattctcggtcatgaggcttccggcacggtggttgaggtcggtcctggcgtcgaaggcttcaaggtgggcgatcgtgtggccatggagcccggcattccggatatgagttcgcgtgccagcaaactgggcatgtataacgtcgatcctgcggtgcgtttctttgccactccgccgattgatggctgcctgtgcgaaacggtgaaccatcctgcggcgttcacctacaagctgcccgacaatgtgagcttcggtgagggtgcgctgcttgaaccgttggctgtgggcatgtggtccgccaccaaggctcgtatcaagccgggcgatgtctgcgtggtcaccggatcaggcacggtcggcatgctgaccgcgtcgtgcgcgttggcgggtggcgcttccaaggtgctgatctctgatgtgtcggcaatcaaactggcgattgcggctcagattccaggtattattccggtggatctcaccaaggaggatctggtggggcgcgtccgcgaggaaacggggggctggggtgctgatgtggctttcgagtgctcgggctcgccgaagtcatacgagacattctggaagctgattgctcccggtggcgctgccgttatcgttggcattccggtcaatccggtggccatcgatattacggagctgcaggctaccgaggtgcgcatcgaaaatatcttccgttatgccaatgtgtatcagaaggccattgacctcgtggctaacggtaaactgaatctgaagccattcatcaccgacacctatgcgatggaggatgcccaggcggcgttcgatcgcatggctgaggggcgtcctggagacattaagctgcagattaccgtgaaaaacgactgacgttacgcacgttacggaacgacgaaaggggtctgtgtcatgggtgctgttgcacaagtcaacgataatcggcatgggaaggcggctttggctcagacctcttttggtggattcgtgccgaaaggtggaagtccgaacgattctggcgtattggagatcattgtgccggacgcgcaggcttcggtgcgttgggcgaagcatggctacccaagctcgttggcgaaatggcatcatcatcctcatattgaaattcatctgattcgggaaggtaccggattgatgatggcgggcaatgccgttgttccgtatgaggccgggcaggttgcgctgattggttcaaatcttccgcataattgggtgtccgacatcgctccgggggagcggcttcgtcagcgtgatgtggtgtgccatgtgcgtccggaaaccatgcgtctgctgatgtctggatttccggaaacgtctggttttgcaatggtgttgaaacgtgcggggcaggcattggtgctgagcggtgaatccgctcgtcaggccggttcgattctggaaaacatggaggaacatagtcttgcttgccgtgttagtgatctgattcgtgtgttggatgtgttcgcgcatgcccccgcagatgaatcctatacggtggttgcgtccggatacgatccggctgtatgcagtggtgcggaacgtgtggtcaatgatgccatcgagtacatttcatcgcatctgagcggtgaaattagcatggatttggccgcccgccaggccggaatgagcgtttcggctttctctcgtctgttcaaaagggctgcgggaatagggttttcggattttgttcgacgattgcgtatcgggcatgcatgcagattgctgacgaccacgaatcaaagcgtcgcttcgattcgtcgcgcttgcggatatggtaacgcttcgaatttcaatcgtcgtttctttgaagaaacaggcgaaactcctactggctggcggaaaaaatacattggacgaacaagataaataaatcgactttgtaaaagctcgatatgattgatatcatatagaaaatacttttataaaagatatggaggtgagacttgagaaagtgtgtgtgatttatgataaaaagcaacaaaaacgctcaaaatgatgtttttgaggctttttgattccataaaagaacgcaatctaaacattaaatgaacagaagataacatttctcttgcgacacgacacagtggaacatcatattgcatactcactaaagtgtgtcctgggtcacaaaagaccagcaacgcgtccatccgcttcgaggcggatggaataacgggaaactactttgcaaacccccaaagaatcgaggaggacttcaagtggcagacgcaaagaaggaagagccgaccaagccgactccggaagagaagctcgccgcagctgaggctgaggtcgacgctctggtcaagaagggcctgaaggctcttgacgatttcgaaaagctcgatcagaagcaggttgaccgtatcgtcgccaaggcttccgtcgcagcactgaacaagcatctggtgctcgccaagatggccgttgaggaaaccggccgtggtttggtggaagacaaggccaccaagaacatcttcgcctgcgagcacgtcaccaactatctggccggtcagaagaccgtcggcatcattcgtgaagacgatgtcatgggcatcgacgagatcgccgaaccggtcggtgtcgtcgccggcgtgaccccggtcaccaacccaacctccaccgccatcttcaagtcgctgatcgcgctgaagacccgctgcccgatcatcttcggcttccacccgggcgcacagaagtgctccgtcgaagccgccaagatcgtgcgcgacgcagccatcgcggcaggcgctcctgagaactgtatccagtggatcgagcacccgtccatcgaagccaccggcgccctgatgaagcatgatggtatcgccaccatcctcgccaccggtggcccgggcatggtcaaggcggcatattcctccggcaagccggccctcggcgtcggcgctggcaacgctccggcatatgtcgacaagaacgtcgacatcgtgcgcgccgccaacgatctggtgctctccaagcacttcgattacggcatgatctgcgccaccgagcaggccatcatcgccgacaaggaagtctacgctccgctgatcaaggaactcaagcgccgcaaggcctacttcgtgaacgacgaagagaaggccaagctcgagcagtacatgttcggctgcaccgcatattccggccagaccccgaagctcaactctgtggtgccgggcaagtccccgcagtacatcgccaaggccgcaggttttgagattccggaagacgccaccattcttgccgccgagtgcaaggaagtcggcgagaacgagccgttgaccatggagaagctcgctccggtccaggccgtactgaagtccgacaacaaggaacaggccttcgaaatgtgcgaagccatgctcaagcatggtgcaggccacaccgcagccatccacaccaacgatcaggctctggtccgcgaatacggccagcgcatgcacgcatgccgcatcatctggaactctccgagctccctcggcggcgtgggcgacatctacaacgccatcgcaccgtcgctgaccctcggctgcggctcctacggcggcaactccgtgtctggcaacgttcaggcagctaaccttctcaacatcaagcgcatcgctcggaggaacaacaacatgcagtggttcaagattccggccaagacttacttcgagccgaacgccatcaagtacctgcgcgacatgtacggcatcgagagggccgtcatcgtgtgcgataaggtcatggagcagctcggtgtggtcgacaagatcatcgaccagctccgcgcacgttccaaccgtgtgaccttccgcatcatcgactacgtcgagccggagccgagcgtcgaaaccgtcgagcgcggtgccaccatgatgcgtgaggagttcgagccggacaccatcatcgccgtcggcggtggttccccgatggacgcctccaagatcatgtggctgctgtacgagcacccggaaatctccttctccgacgtgcgtgagaagttcttcgatatccgtaagcgcgccttcaagatcccgccgctgggcaagaaggccaagctcgtgtgcatcccgacctcttccggcaccggttccgaagtcacgccgttcgctgtgatcaccgatcacaagaccggctacaagtacccgatcaccgattacgcgctgaccccgtccgtcgccatcgtcgatccggtgctggcgcgtacccagccgcgcaagctcgcatccgatgctggcttcgacgccctgacccactccttcgaggcttacgtctccgtctatgccaacgatttcaccgatggcatggcgttgcacgcggccaagttgatttgggacaacctcgccgagtccgtcaacggcgagccgggtgaagacaagatcaaggcccaggagaagatgcacaacgccgccaccatggccggcatggcattcggctccgcattcctcggcatgtgccacggcatggcccacaccatcggtgctctgtgccacgttgcccatggtcgtaccaactccatcctgctgccgtacgtcatccgctacaacggctccattccggaggaaccgaccagctggccgaagtacaacaagtacatcgctccggaacgttaccaggagatcgccaagaaccttggcgtgaacccgggcaagactccggaagagggcgttgagaacctggccaaggccgtcgaggactaccgtgacaacaagctcggcatgaacaagagcttccaggagtgcggtgtggacgaggactacttctggtccatcctcgatcagatcggcatgcgtgcctatgaggatcagtgcgctccggcaaatccgcgtatcccgcagatcgaggatatgaaggacatcgccatcgccgcatactacggcgtcagccaggccgaaggacacaagctgcgcgtccagcgtcagggcgaggctgccacggaagaagcttccgagcgtgcatgagtcgcttcatgtataggccatcagcagtgacctacatataaggtgcttgcgttatatcggcaagcatcatagataacgaggaatttggttggattcgttcaaccggattcctcgttttttatatgtggaaaagcattttcggatgatgctgcattatgatcgcaacagacgatcggcaatgtgcatctcattcgttttcagggacttgaaaacaggacttgagaccgcgacacgcgaggatttcttaagactacccctgatgcttaaataaagaagttgcctgattttagggctcgcaaattggaattaaaaaagcgagcgtggcacagtgatcacgagagtgaaaactgcatggctgcgcactgatgtggtatgaccacggaacttccacggtttcgggggtcttctgcgccggtgccctttgagaagcaggctggtaaacagtaactaacgaatcgctagaaagggcggaaggcaatggcgggacagaaaatccgcatcaggcttaagtcctatgaccatgaggtcatcgaccaatcggcgaagaagatcgtcgaaacggtgacgaacgcgggcgcaactgtggttggcccggttccgctcccgaccgagaagaacgtgttcgtcgttatccgttctcctcacaagtacaaggattctcgcgagcatttcgagatgcgtactcataagcgtctcatcgacattgtggacccgaccccgaaggccgtggattcccttatgcacattgatctgcccgcagatgtgaacatcgagatcaagctgtaagggaggagggaaccattatgtctaatcgcaccgcactgctgggcaagaagctcggcatgtctcaggtctgggacgagaacggtttcttcgttcctgtgaccctcgttgacgtctccaccaacgtggtgactgctgtcaagtccgaagagtccgacggctacaaggctgttcagcttggctacggccaggttgacccgaccaaggtgactaagccgcttgccggccacttcgccaaggctggcgtcaccccgcgtcgtcacctcgctgaggtccgcaccgataacgccgaagagttcgagccgggtcaggagctgaccgctgagctgttcccggagggcaccttggtcgatgtgaccggtaccaccaagggcaagggcttcgcaggcaccatcaagcgctggggcttcaagtcctatcgtcgtacccacggctctcacaagaacgagcgtcgtcctggctctgttggcgcatgcgctaccccgagccgtatcctcaagggcaagcgtatggctggccgcatgggtcatgtaaccaacaccacgctgaacctcaccatcgtttcgtcggatgttgagaacggcgtgctcgccatcaagggcgccatcccgggcccgaagggcagcatcgttctcgtccgttcggcagtgaagggagcctgataaatcatggcaaacgttactctgaacgttaccgataaccagggcaatgcaaccggaaccgttgaggctccggctgagatcttcggcttctccgccgaagaagtccagtcccgtatcccgctgatccaccaggttgtggtggcccagcgcgccgctgctcgccagggcacccacgccaccaagactcgcggcatggtttccggcggtggccgcaagccgtggaagcagaagggcaccggtcgtgctcgtcagggctccattcgtgcaccgcagtggtaccacggtggcaccgtgttcggtccgcagccgcgtgactactcccagcgcaccccgaagaagatgaaggccgctgctctcaagtacgtgctttccgatcgcgccaacgcaggtcgcgtggcagtcgtggacttcggcgtttccgaagccccgtccaccaaggccgctgttgccgctcttaccccggtgaccgagaacaagttcaccaccgtggtgctctctcgcgagaatgtgaacgaatggctttccgttcgtaacatcccgaccgttcacccgatcttcgccgatcagctcaacacgtacgatgtggtcaccgctcagtacgtggtcttctccaaggaaggcttcgacgctttccttgctgcgaaggctgagccggctgcaaaggaggcctgattttcatggtcgctattcacaagcccgcacacgacatcatcctcaagcctgtcgtttctgagaagagctacgctctgtccgatcgcggtcagtacaccttcgtggtggccccgaacgcgaacaaggtccagatcaagcaggcaatcgaagagatcttcaatgtcaaggtgacgaacgtcaacaccctcaaccgcgccggcaagcgtcagcgcacccgcaacggtttcggtcagcgcgtcaatcagaagcgcgctatcgtgaccgtcgccgagggccagacgatcgacatcttcggtaactgaaggctagccgagaaaagttaaaggaagaactagattatggctatccgcgtttataagccgacgactgcaggccgccgtaacgcgtccgtctcggacttctccgagcttacgcgttctacgcctgagaagtcgctggttcgcaaactcagcaagactggcggtcgtaactcttacggccgtatgacctcccgtcatcgtggcggcggtcacaagcgccagtaccgtctcatcgacttcaagcgttgggacaaggacggcgtgccggcaacggtcgctcacatcgagtacgacccgaaccgttccgcccgcatcgcactgctgcactacgcagacggtgagaagcgctacatcatcgctccggaaggtatcaagcagggtgacgtcatcgagaccggcgcccaggctgatatcaagccgggcaacaacctgccgctgcgcaacatcccgactggtaccgtggtgcacgcaatcgagctccgcccgctgggtggcgccaagatcgcccgctccgctggtgcagccgtgcagctcgtcgctaaggatggcgcttacgcccagctgcgtatgccgtccggagaaatccgcaacgtggatgctcgctgccgcgcaaccgtcggtgaggtcggcaactccgatcacgccaacatccagctcggtaaggcaggtcgtgcacgttggatgggcaagcgcccgatcacccgtggtgaatccatgaaccctgtcgatcacccgcacggcggtcgtacccgcggtggcaagccgccggtttctccgtggggcaagggcgaggttcgtacccgccgtccgaagaaggcttcgaacaagatgattgttcgtcgtcgcccgaatggtaagaaccgtaagtaagggagtgtcgagtagatgactcgtagcatcaagaagggccccttcgtcgacgcccacctgcagaagaaagtcgacgagcagaacgagaagggtacgcacaacgtcatcaagacgtggtcccgtcgttcgatgatcacccctgatttcatcggacacaccttcgccgttcacgatggtcgcaagcatgttccggtgttcgtcaccgaatccatggttggccacaagctcggtgagttcgccccgaccaagaccttcaagggtcatgtgaaggacgacaagaaggcacgccgctaaaggagagtaaggacacatggaagctaaagcaatcgctcgtcacgtccgcgtgacgccgcgcaaggctcgccgtatggtcgacctcatccgaggcaagaaggcgaccgaagccatcaccattctgaagttcgctccgcaggacgcatcccttccggtgcgtaaggtcctggagagcgccatcgcgaacgctcgcgtgaaggccgacaaggccggcgagccgttccgtgagaacgacctggtcgtgaaggagacctatgtggacgaaggcgtgacgctcaagcgtttccgcgctcgtgcacagggccgtgccgctcgtatcaacaagcgcaccagccacatcacggtcgtcgtcgctaacaaggaaggaaaccgctaaagatgggtcagaagatcaatccgtttggctaccgcctgggaatcactgagaaccatcgttccaagtggttctccgattccaacaaggttggcgaacgctaccgcgacttcgttctcgaagatgacgccatccgcaaggccatgagcaaggatcttgagcgtgcgggcgtgtcccgtatcgtcatcgagcgtacccgcgaccgcgtgcgtgtggatatccacaccgctcgcccgggcatcgtcatcggccgccgtggcgccgaagctgagcgcgttcgcgccaagctcgagaagctcaccggcaagcaggtccagctcaacatcttcgaagtgaagaacgcagcactggacgcccagctcgtcgcacagggcatcgctgagcagctgaccaaccgcgtgaccttccgtcgcgcgatgcgtaaggcccagcaggatgccatgcgtgcaggcgccaagggtatccgtatcaagctctccggccgccttggtggcgccgaaatgagccgttccgagttctatcgcgagggtcgcgttccgctgcagaccctgcgtgccctcatcgattacggcttcttcgaggccaagaccacttacggccgcatcggcgtgaaggtctggatctataagggcgatatgaccgagcgtgagttcgaagagcagcaggcacagcagggcaacaaccgccagggacgtcgcggcgatcgccgtccgcgccgtggtcagcgtaacgctgcccagcagcagaacgcagcagcagaggctccggccgcagctgaggcacctgccgcaacggaaacgaaggagtgagctgagaaatgcttatcccaaagagaaccaagtatcgtaagcagcaccgtccggtccgccgtggtatgtccaagggcggcaacgagatcgcattcggcgatttcggtattcaggctcttgctccagcttatgtgaccaaccgtcagatcgaggccgctcgtatcgccatgacccgctacatcaagcgtggtggccgcgtgtggatcacgatcttcccggatcgtccgctgaccaagaagccgctcggcacccgaatgggttccggtaagggtactccggaattctggatcgctaacgtccacccgggtcgcgtcatgttcgagatcggtggcgtgtccgaggatgtcgctcgcgaggctctgcgccgcgcaatcgacaagctccctatgaagtgccgtgttattgctcgtgaaggcggtgacatctgatggcagtcggaactgcagactacaccatgaagaatctgaacgagaagaccaacgaggagatcgagggcttcctcaagaagtccaaggaagagctgttcaacctgcgcttccagtccgcgaccggtcagctcgaaaataccgcccgcctcaaggcggtcaagcacgacatcgccaggatgtacaccgtcctgcgcgagcgtgagctcggcatcagccaggcccccgaggcgaccgaaacgaaagctgaggagaagtaatggctgaagagcgtaacttccgcaaggttcgtcgcggttacgtcgtgtccgataagatggacaagacgatttccgtcgagctcgagcagcgttcgacccacccgctgtacggcaaggtcgtgcgttccactcgtacggtcaaggtccatgatgaacacaacgaggctcacattggcgacctcgtgagtattatggagactcggcccctgagcaagaccaagcgttggcgtctcgataccatcatcgagcgcgctaagtaaataagttcggcaaggctccgtgagtcaccccgcctgcttcaagcaggcaggcggggtgcttggggagaaccagctcggctaaggagaatcaatgattcagcaggaaacgcggcttcatgtcgccgacaacacgggtgcgaaggaactcctcgccatccgagtgctcggcggatcgaagcgacgctatgccggcatcggcgacgtgatcgtcgcctccgtcaaggacgccatccctggcgggtcggtcaagaagggcgacgtcgtcaaggctgtcgtcgtccgcactgtcaaggagcaccgtcgtgtggacggctcctacatcaagttcgacgagaacgccgccgtcattctcggctctggccgtgaaccgaagggcactcgtatcttcggaccggtcggtcgtgaactgcgcgacaagcgcttcatgaagatcgtgtccctcgccccggaggtgatctgacatggcagccaagattaagagcggcgacctggtcaaggtcattcgcggcaaggatcgcggcaaggaaggcaccgtcaagcaggtgctcaaggacgatcgtctgatcgttgaaggcgtgcagatcgtcaagaagcacgttcgcgctacgcagcagggccagcaggccggcatcgtggctgtcgaggctccgatccatcgctccaacgtgatggtcatcgatccggagaccaagcagccgacccgcgtgcgcatcgtcgaaaaggaagaggctcgcgacggcaaggtgaagaccgtgcgtgtgcgtgttgccaagaagtccggaaaggagctggcatgaccgataccactgtcgaagcgccggcaactccgcgcttgaagcagaagtacaacgagcagatcgtgccggagctggagaaggaattccactactccaacccgatgcaggtcgctcgcgtccagaaggtcgtcgtctccatgggcgttggcgccgctgctcgcgactccaagcttatcgaaggcgcagtcaaggacctcaccctgatcaccggccagaagccgaagatcaccaaggctaagaagtccgtcgcacagttccacctgcgcgaaggacaggccatcggcgcttacgtcaccctgcgtggcgagcgtatgtgggagttcctggatcgccttctgaccatggctctgccgcgtatccgcgatttccgtggcatcaacggcaaccagttcgacggtcagggcaactacaactttggcctcactgagcagtccatgttccacgagatcgatccggattcgatcgatcaccagcgcggtatggacatcaccgtggtgaccagcaccaaggacgacaaggaagctcgcgtgctcctgaagcacctcggcttccccttcaaggagaactgatatggcaaaaaccgctcttaagaacaaggcggccgctaagccgaagttcaaggtgcgcgcttatacgcgttgccaggtctgcggtcgtcctcactccgtctaccgcaagttcggcctttgccgcatctgccttcgtgagaaggcccaccgcggcgagctgcccggcgttacgaagtccagttggtaaataacgacgctgaaggtccgcggcccaatcgctcaatggagcgtgcgggcggcggaaaccacggcgagaaagggcaataagcccaaatgacaatgacagatccgatcgcagacatgcttacgcgtctgcgtaatgcgagcgcggcaaagcacgagaccgtggatatgccgtactccaagttcaaggcgaacatcgccgagatcctgaagcgtgaaggctacatcaaggacttcaccgccaaggaagccaaggtcggccagactctcgaggtcaccctcaagtacggtccgaacggcgagcgttccatccagggcatcaagcgcatctccaagccgggcctgcgtcgctacgcaaagtccgatgctctgccgatgccgctcggtggccttggcatcgcaatcatctcgactagctcgggactgctgacccagaaggaatgcctcgatcgaggcatcggcggcgaaatcgtcgctttcgtttggtgagaaaggagagctgaaacatggcatcgcatattggtaagctccccgtcaccattcctgctggcgtggaagtcaagatcgacggtcagtccttcaccgccaagggcgccaagggcactgactcctacgagattccggaaggcatcaccgctcaggtcgaaggcaacgagatcatcctcgttccggctgacgatctgcgtccgacccgtgcaaagcacggcctggctcgttccatcgtggcgagcatggtcaagggcgtgcacgagggttacgccaagactctggacatcatcggcaccggttaccgtgctcaggcgaagggcaagggtatcgagttctccctcggttactcccacaccattaccgttgagccgccggaaggtatcgagttcgaactgccgaatccgaaccaggtgatcgtcaagggtatcgacaagcaggctgtcggccagtgcgccgctaacatccgcaagcttcgcgctccggaaccctacaagggcaagggcatcaagtactcggatgaacgcatcctgcgcaaggctggaaaggctggtaagtaatgagcgtccagattttcggtaagggcaagaaggtcgcgcttcagcgccgtcacgctcgtctgcgcaagcgcatcagcggtaccccggagctcccgcgtctggtggttacccgttccaaccgtcacatggttgcccagatcatcgatgacaccaagggcattaccttggtgagcgaatccactctgatgagcgatttcgcaggtttcgaaggcaccaagaccgaagctgccaagaaggtcggcgaactgattgccaagaaggctcaggacgcaggcatcaccgcggttgtgttcgatcgtggcggcaacaagtatcatggccgcgtcgcagctgtcgctgaaggcgcccgcgagggaggtctggcactgtgagcgacaacgaaaaggaaacccaagtggctgaagaaactcagaacactcaggctgctgctgaagctaccaacgaggatcgcaagtcccgtcgtggccagcgtggtgagggtcgtcgtggcgagcgtcgcaaccgtcgtgaggaatctcacgagaacgagatgctcgatcgcgtggtgaccatcaaccgtgtgtccaagacccacaagggtggtcgtacgttcagcttcgctgccctcgtggtggttggcgacggcaacggcaccgtgggtgtcggctacggcaagtcccgtgaggtcccggctgcaatcgctaagggccagctggatgccaagaagcacatgttcaccgttccgcgcatcaagggcaccgtcactcacccggtgatcggccatgatgctgctggcaccgtgctcctgcgtccggctgctccgggtaccggcgttatcgccggcggtgcggtccgcgccgtcatggaatgcgctggcatcaccgacgtcctgaccaagtcgatgggctccgccaccgccgttaacgtggtgcgcgcaaccgtcgacgctctcaagaagctcgaagagccggaagagatcgcagcccgtcgtggcatgtccctcgaagaggtggctcctgactccctgctgcgtgctcgcgccgaaggcatcgccgaggctcgtaaggcccgtgaagaagcacaggccaaggccgctcagaaggacggtgagtgatgactaacctgaacatcaagctgcaccacggtctggtgaactccactccgaagcagcgtgctgcggctcagactctgggcctgaacaagattggcaagaccgtgacccgtgaagacacgccggccctccgtggccagctgctggtcctccgtcacctggtcaccgttgaggaggctgactgattatggcagatattctgcagatgcatgacctgaagccggctccgggcgccaagaaggatcgcactcgcgtcggccgtggtgaaggctccaagggtaagacctcgggccgtggcgacaagggcaccaagaagcgttaccaggttcgtccgggcttcgaaggtggccagctgccgctgtacatgcgccttccgaagctgcgtggcttcaagagcccgttcaagaaggaatatcaggtcgtcaacgttgctgctctcgcggaactgttcccgcagggtggcgaaatcaccgttgccgatctggtcgccaagggtgccgtgcgtgacggctacccggtcaaggtcctgggcgacggcgaggtttcggcagcctacaccatcaagggtgttaaggcttccgcttccgccaagtccaagatcgaggctgccggcggctccatctccgaggactgattccaaggaatgtagagctgactgaagcttgcaagtgaggcttctcccgcttagacgggggaggcctcacttcgttttggtccagtacggggaacaaaacgaaaacaatgcctcgaaatcttgtaaaaaaccgacaaaggatggaacactccacgtgtaggtagacgccgtacgctagactcgatcggtagagtctgttttgcatgggtgcgcaggcgcgcacgtcgatggaaggaatcccaggtgaggacgttaatccaggccttgaaaaccaaggagttgaggaacaagatcctcttcactcttggtatcatcatcatttatcgtattggttcgttcattccgaccccaggcgtcgactataaggtcgttcagcagtgcctcggttcgatggatagcacctccgaaaacttcattggtctggtgaacctcttctccggcggcgcaatgttgcagctatcgatcttcgcactgggcgttatgccgtacatcacggcatccatcgtcatccagctgctgcgtgtggtgattccccgcttcgaggcgctgcacaaggaaggccagtccggcgaagccaaactgacccagtacacccgttacctgaccatcggcctcgctgtgctgcagtccaccaccattctggtgaccgcccgctccggcgccctgttcaactaccggtgctcccaggttgtgcctgacggttccgtctggaacctcgtggtcatggtgctcgtcatgactggcggcaccggcctcatcatgtggatggccgaattgatcaccgataagggtcttggtcagggtatgtccatccttatcttcatgtccatctgctccggcttcctgccgcagctttgggagatcggttggggcaccaaaggcaccgatggcaattgggcgaagtttgccgcggtcgtcggtgtgctgctggtcatcatgatcctcgtcatctacgtcgagctttcccagcgtcgtattccggtgcagtacacccgtcgtatgattggccgtaagatgtacggcggatcctccacctacctgccgctgaagatcaatatgagcggcgttattccaccgatcttcgcgtcctccattctggccatcccgaccctgatcgcacagttcggcaaatccgaccagtcctgggtcaagtggatcaactccaacttggccaacaccacttccgtgtggtacatcgcactgtacgcgttgatgatcgtgttcttctgcttcttctacacggaaatcaccttcaacccggacgaaaccgcggacaacatgaagcagtacggtggcttcattcctggcatccgcgcaggcagcgctaccagccgttatctgagctacgtgatgaacaggctcaacaccgtcggtgccgtgtacctactattcgtggcgcttattccgaccgtgctcatcatggcgcttgacctcaacaccaagttgccgttcggcggcaccaccatcctgatcatcgcaggcgtcggccttgacaccctgcgccaggccaaggcccagaccgaacagttccagtacgctggattcctgttcgagggcactgaccacaaggaaggcaagtaaaacctcaaaatcgtgataccgtttcgacgtgaagcggtatcacgattttcatgtaaccaatcgagaatcagaaagcctcgcaagaggctcaatgaaacggagaataacatgcgactgctgattatgggaccgcagggcgtcggcaagggcacccaggctgcgctgctgagcgagcactacggtattccggcaatctccaccggcgatatcttccgctacaacatcaagaacaagaccgagctcggtgttgaggcactgaagtacatcgacaagggcgaactggttccggacgagctgaccaacaagatcgtcaaggatcgtctggccatggatgatgccaagaacggttggatcctcgacggctatccgcgcaacgcatcccaggttgaggcactggacgccatcctcgccgatctgaacactcctctggacgctgtggtggctctcgacgctgaccatgacgtgcttatggagcgcatgaagaagcgtgccgagatcgaaggccgttccgacgacactccggaagccatcgccaagcgtcttgatgtgtatgccaaggaaaccgctccgttgctggccacctatgaagagcgcgggctgctgaagaccttcaacggcgtcggttccgttgaagagatccaatccaccatcgtggctgagcttggctgatatagctgaaaatcgggcagattcaaatcgtatgcaacgataagaaagcccaataaaataccacaaatcaatcgaaaacgggaattgcgacacgccgaacgtgccgtagttcccgttttcgtgtattcttgcaagttggtgtgtcttcgggcacgcatagtaatcgccaaagaacggaacgaggctcatggctaaagacggtgtgattgaagtcgaaggacaggtagtggaagcactgccgaacgcgatgttccgcgttgaactcgagaacaagcatatcgtgctcgcaaccatctcgggcaagatgaggaagaactatattcgcattctgccgcaggatcgtgttgtgctggaaatgagcccttatgatctgaaccgcggccgtattacgtaccgttacaagtaaggtacacaagcaaaggaaaaccatgaaggtcagccctagtgtgaagaggatctgcgagaactgccgcgtgatccgtcgtcacggccgcgtcatggtgatctgcgtcaacccgcgccacaagcagcgtcagggctgagagcagatccagcggcataataagtacaggcgctgagtcacagatcgcgcaagcggtatgaaccccgggtacgcaggcccgggccgggaaaccggacgactcggtgcaagacctgcggaaaacagaaggaatcgcaatggcacgtcttgccggagtcgacatccccaatgagaagcgcatcgagatcgccctcacctacatctttggtgtgggtcgcactcgtgccaaggaaacgcttgccgcgaccggtatcaacccggacattcgcgtcaaggatctgacggatgagcagctgatcacgctgcgtgactacctcgagggtaactacaagatcgagggcgatctgcgtcgtgaaatcgatgcggatatccgtcgtaagattcagatcaactgctaccaaggccagcgtcaccgtaagggacttcctgtgcgcggtcagcgcaccaagaccaatgctcgtacccgcaagggcccgaagcgcacggtcgccggaaagaagaaggccaccaagtaataggtggctgtcagttcagaccacgagacgtaagtttcatcgcctgaacaacaaagcaaattcgttattaggaaacgagggtcaatggcagctcaaaagcaagccgcgcgcaagccgcgtcgccgcgaccgcaagtcggtcccggttgggcaggcgcacatcaagtccactttcaacaacactattatttcgatcaccgacccgtccggcgcagttgtgtcctgggcgtccggtggcgatgtcggtttcaagggctcccgtaagtccacgccgtacgccgctggtatggccgctgaatccgcagcccgcaaggctatggagcacggtctgaagaaggtcgacgtgttcgtgaagggcccgggttccggtcgtgaaaccgctatccgttccttgcagtccgccggactcgaagtcggttccatcaccgacgtcaccccgcaggcacacaacggcgttcgtcctccgaagcgccgtcgcgtctgagcactagaagaaatcatcaatccaacgccgcttatggccggtgagtgcaccaccggcctgaagctgaaaggataaccacagtgcttatcgcacagcgtccgacacttaccgaggaatctctcaaccctcagcgttcccgcttcaccatcgagcctctcgagcctggtttcggctacacgcttggcaactcgctgcgccgtaccctcctgagctccatccctggagcggctgtgacttcggtgcgtatctccggcgtcccgcatgagttcaccactctgccgggtgttgaagaggacgttaccgagatcctgttgaacatcaagggcatcgtgctcaccagcgaatacgatgagccggttgtcatgtatctgcgcaagagcggcaagggcgaggccaccgcgggtgatatcactccgccggccggcgtcactatcgccaacccggatatgcatatcgcaactctcgctgaagatggcgaactcgagatcgagttcaccgtcgagcgtggccgcggttatgtgccagcccagatgaacaagcaggataacgccgagatcggccgtatcccggtcgactcgatttactccccggtgctcaaggtgagctatcgcgtggaagccactcgcgttgaacagcgcactgacttcgacaagctcatcctggacgtggagaccaagccggcaatctccccgcgtgatgctgttgcatccgcaggctccaccttggtggaactcttcggcctgtgccgcgagctcaacacccaggctgagggcgtcgaggttggacctgccccggtggcagaggaaaccaacccggagatggccgttccgatcgaggatctcaacctcacccagcgcagctacaactgcctgaagcgcgagggcatccacacgatcggcgagctggtcgcccacaccgagcaggatctgctcgacatccgcaatttcggtatgaagtccattgacgaagtcaaggaaaagctccagtccttgggtctggccctcaaggcttccccgctgggcaacttcgataccaacaacctcgaaggcggcactttcttctcgccggaagacgagtgattcgccgcttttgacctaaccgcttcgtcggattcggatgttcgggcaactgcccacctgagtccgacggggctttcaaggagaaacaatgcctacaccaaagaagggtccgcgtctggcctccagcccggctcatgagcgtcttatgctcgcgaacatggctaccagcctgttccagcgtggccgcatcaccaccaccctgccgaaggccaagcgccttcgtccgctggctgagcgtctgatcacgctcgccaagcgtggtgatctgcacagccgtcgtcgcgtgatgcgtgtcatccgcaacaagtccgtcgtgcacaagctgttcaccgagattgccgagcagatggagcagcgtgagggtggctacacccgcatcgtcaagattgctccgcgtcgtggcgatgccgctccggcagccatcatcgagctcgtcaccgagccggtgagcccgaagcaggctgtggtcaaggaagccgaagctgcaaccaaggttgccgctgaagaagctccggttgtcgaagaggcaccggttgaggctcaggaagccaccgcagagaacgccgagtgattggcatcaagcaggcttgactagctgatgaaaaggctgggaatcgaaaggttcccagccttttgctatgcgttgtcatatgttgttatgcgccttttgttatgctcattgccgtgagattacgtatcgacttggcatatgacggcaccgatttttacggatgggcgaaacagcctgacatgcgtaccgtgcagggagaaatcgaacgagtgctgcataccgttcttcgtgtaccggaaggcgatgatgacgagccgctgcgcctgaccgtcgcgggtcgtaccgataccggcgtgcatgcgtcgcaccaagtttgccatctcgacatcaatgaggagacgcttgcacgttgcgtcgggcatatgcaggtcgaaccggtgatggcgttgaagcgacggctgcaacgcatgctgccgaatgacatcgccattcattccatcgaggaagctcccgaaggattcgacgcacgtttctccgcactggaacgcacttacgtatatcgcattgccgaccgatcaagcgaaatcgatccgcgtatccgcaattgcgtgctgcatatcgacgatgatctcaacatcgaagctatgaacaaggcagctgaaatgacgatcggcctgcatgatttcggctcgttcgcaaccccgaatcctggaggcaccaccatacgcgaggtgaaaaccgcgtattggcgtcgtataccgcagcatccgctgatcgacgacggaaatacgatgggggagcgatatcgcacgcctgcggtcgaatccggactgctgtgcttcaccatcgttgcggacgctttcgcacgcaatatggtgcgatcgctggttaatggttgtgtgcaggtaggcatcggcaaacgttccgtggattggttcgccgaaaagatgacgacgccgttgcgtgaaggcagcaccggtccgatcgctccgcaaggattgacgttggaacatatcgaatatccggaagacgaccagttggcgattcgtgccgaagcgattcgtgcgaaacgtactttgtaagagcacatactgtacggatacacagaagattgcgctatacaatcgcaccaaatatcgcatcacaaaaccacatcacgcaatcgcaaaaacgcaaaaacgggatatagccgaaaagaacacgagaatcatgtgaaatgtcacgacgacgttacgacgttctcacgagtccataaccgagacgcaatcgtaacaattcgtagcatcttaaggtaatcgaacgtcagtacgtcttctatcgaggattgagcggccttaagacaggcatgcattttcaggggtagaagaagtgtgcgacgatgaatgaaggcataaaagttgcagatcgtctaaagcaataaccttggctcctatgtgctcctacgtgccacagggctgtaagcaataaaaaaaccgaagcgccgttgctccggtttttctacttgcggataaggcgagattcgaactcgcggaggggttcgccctcacacgctttcgaggcgtgctccttagaccgctcggacacttatccattgtgctacttgaaaacaagcaacttcatcattttgccacagctttggcgattgtcaaatccgattgagggatttttgcgatgtctgcgattgctcggcgtgtcttattcgcgggaacactgcgtcgcattgcgtgaagacggttgcgcggacagcgtacgcaagtctgcgctatgcgaatagcgcttcgtcgaatgccggataaccccagtcgagtgccagatccacgcgatcggcgatcatgctggcgagcatgcccagtgactgttcccgggagtcatccgaatggtcgtccgaggttgtttgggacttcgtcgaggcgttcgacgaagtcgagcttgccgcaacggctgcgatttcgctgcgcgcgcaattcatttccaggacggcatcggttggcgcgtgcaagcccgttgcggaatccacgatggtattaggattggcgagcagctgcgtgacatcataggttttcgcacgattgtcttcggctccggaaagagaaatcaggcgttgcgaagtggttttatgacgatcgctgatgtcaagcgtcgcatgaccgaaggaacgcgcggcgaacacctccatcgcgaaccccacctgatcttccgcaacggacatggcggaaagcgaatccgcgtcaatatcaagtgagtcaatgtcatcgcaacgcgacagcgtgggctgtgcgatgttgatcgcaagtcgcgctgccatcagacgggcagtgtgacgggcctgcgcactacgcaacgtgccgtcggcgaaccgtgcagggcagtaggccgcggtgtttgcccaatctgaaaccgcctcctgcgcggcaagatagcgcatgacgatatggcgtgacctgtctgccatgatgtcggcgttggcagtcgcgtctgcatacgccctttcgcaaggacttggctgctgttcggcttcggcgcgacctgcgattcgaggagcggaacacgcggccagtgatgccacaagggcgctcgcgcacaccaagacgcaggcgcgtctgacagtcgacaaggccaaggggaaaaacggggagcgtgtctgcatgaaacattagactagtagtcgactgtgaccattgggccgagcgctcggaataacttcatataggaggtcttggaagtatggaactggacctggcaggaatgcaccagctcgcagctgggcagggaatcgatcccgagacgctggatgccgcactctcggaagcattgcgactggcatatctgaaaacgccgcacgcggcgaagcatgctcgtgtggagcttgatccgcgtgccggaagctttaccgtttgggctcaggatgagatccccgtcgagccgaccgaggataacccgcaccctgcgccgactctgggcgaggaatatgatgacaccccgcgcgacttcggccgtctggccgccgccaccgcgcgtcaggtcatcagccagctgttccgcaaggccgaggacgacaaggtgttcggcgcgttctccgggcagaagggcaagctgatcaccggcattgtgcagcaggatgtgaaggacacctccaatgtgcacgtggccgttggcgacgtcgaagcgttgctgccgcgtcgtgaacaggtgccgggagagcgttaccgccatggtgagcgcatccgcgtgtatgtggtgaatgtcgcacgtggcctcaaaggcccggaaatcgtggtgtcccgctcccatcccgagctggttcgccgtctgttcgaacgtgaggttccggaactggtttccggtgccgtctcgatcatggccatcgcgcgtgaggccggtgcccgtaccaagatcgcggtgcgcgccaacactgagggcgtcaatccgaagggcgctctgatcggccccggcggtgctcgcgtgcgtgcggtgatggagaaccttgggccggagaagatcgatatcgtcgactggtctgccgatccggcgaagttcgtcgcggcggcactgtctccggcggtcgccaccggtgtgcaggtaatcagcgagaagaaccagaccgcaatcgccttcattcatgatgatcagctgtcgctggccatcggcaaggaaggccagaacgcacgtttggccgccaagctgaccggatggaagatcggcatcgaatccgccgaggcacacgccaagaagatggccgaagcgcaggcttcgaccagcggggaaaccgccgaataaccaacactttcagcagcggtaagcccgtgggcgttcaatccacgggcttgagtatgctggactcgataatccaaagcgtgggggtacgtgccgtcatgcccagggaaaagacgaggtatcacgaacatggttgcacgatgagaaggaacaagctcgccgtgaatcagtagcggtcgcgctcgtatgcgcgcggcccaagataggagaaattgagtgccgaaagcacgcgtatatgaacttgccaaggaacttggcgttgacagcaagactgttttgaacaaacttgaggcgatgggcgaatttgtgaagtccgcatcgtctaccgttgaacctccggttgcccgtaagctgaggaatgctttcgcttccaacgcgcagggcaacgcatccgaatccaagaagcctgcggtcccggccaagaagccggctgccccggcagcttcgcctactcctgcgcctcgtgccactccggctgctcccgcggcatccgcggcaaagcctgtcgctccaaagccggcacgtcctgcagcatccaagtccgaagccccgaagcccggccagcgcatgcctcgtccgggtgattcccgccagcatggcaatcgtgccaacggcaacgctccgcgtccgcagggcgaacgccgtcagggcggcaagccggctccggttccgggacctcgcgcacagcgcaacaataacaataccaatgctccgcagggcggcaatggcaacaatgccgccaatggtgcgaagccgcacactccgggcccacgtccgggtaacaatccgttcagccgcaagcagggcatgcataccccgactccgggtgacattccgcgtccgcatccgatgaaccgtccgaacgccaacaacaataacaacggcgaaggtcgtcgcggcggacgcccgggtcagggcggcggccagcgtggaggtttccgtggtcgtccgggccaaggcaccggtgcgaagccgggtcagtggggccagcatcgtccgggtcagggcggcggtcagcgtccggcaggtggtggcaaccgtttcggtggcggcgccaataccaatggtggcggcttccagggcggcaacagcgctccgagcaacggtccggcacgcggcggcggtcgcggtcgtggcggtgctgcaggcgcgttcggtcgtcagggcggcaagtcctcgaaggctcgtaagaaccgtctggcaaagcgtcaggaattccaggagatgaaggccccggtcatcggcggcgtgcgtattcctaccggcaacggtcagaccgttcgtctgcgtcagggcgcatcccttgccgatctggccgagaagatcaacgtcaatccggcggcactggtcaccgtactgttccaccttggtgagatggccacggcaacccagtccttggacgaatccaccttccagatcctcggtgaggaaatcggctgggacatcaagatcgtgtccgccgaagaggaagacaaggaactgctgcagcagttcgacatcgatctggacgaagaagaacttcaggaagatgaagatctgaagccgcgtccgccggtcgtcaccgtgatgggccatgtcgatcatggtaagacccgactgcttgacaccatccgtcgtaccaacgtcatcgcacgtgaggccggcggcattacccagcgtatcggtgcataccaggtgaccgtcgatctcgaaggcgaaccgcgtaagatcacgttcctcgataccccgggccacgaagccttcaccgccatgcgtgcccgtggcgccgaactcaccgacgttgcgatccttgtggtcgcggccgatgacggcgtgatgccgcagaccgtggaagccatcaaccacgctcaggcggccaacgtgccgatcgtggtggccgtcaacaagattgataagccgggcgcgaacccagacaaggtccgtggccagctcaccgagtacggcctcgttccggaagagtacggtggcaacaccatgttcgtcgacatttccgccaagcagggcaccaatgtcgacaagctgctggaagccgtgctgctgaccgcggacgccgaacttgatctgcgtgccaacccggatatggacgctcgcggtgccaccgtggaagcccgactcgacaagggtcgcggtgccgtggcaaccgtgctcgttcagtccggtactctgcacatcggcgattccatcgtcgcgggaacgtcgtatggccgtgtccgcgccatgctcgacgaaaacggcacccatatgaaggaagccacgccgtccactccggtgcaggtgcttggtttgacctccgtgccgacagcaggcgatctgttcctggtggcctccgatgaccgtaccgcacgccagatcgccgaaaagcgtcaggccaccgagcgtgcggcccagctggccaagcgtcgtaaggtcgtgtcgctcgaaagcctcaaggagcagttcgccaaggctgaggtcgacatgctcaacatcgtcatcaagggcgattcctccggttccgtcgaggcgctggaagattccttgatgaagatcgaggtgtctgacgaggtcggcatccaggtgatccaccgcggtgtcggtgccatcacccagaacgatgtcaacttggctaccgtcgacaaggccgtcatcatcggcttcaacgttcgtccgaaccgtcaggtggcggatatggccgaacgcgaaggcgtggaaatcaagtactactcgatcatctacaaggccatcgaagacatcgaagcatccctcaagggcatgctcaagccggaattcgaagaggtcgtcacgtcccactccgagatccgcgagatcttccgttcttccaagttcggcaatatcgcaggtgttatggtgcaggacggcgaagtcaagcgcggtacgaagtgccgtattctgcgcaacggcatcgccaccgtcaatgatctcgaaatctcctcgctgcgtcgcttcaaggacgatgtcaactccgtcaaggaaggctacgaagcgggtatcaacctcggttcgttcaacgacatcgagcttggcgatatcatcgagaccttcgaaatgcaggaaatcgaacgcaagtagtcgattgattcgaaccagcaatcgataacaagaaaggaacgcccacagctgacatacggctgcgggcgttccgtaatacaacagaacttacctgattaaaggacaacaatggcaggaaccaatcctcgcgccgcacgcatcgcggcgttgatccaacgtgtgatcgcatcctccatggaggcgcaattgcacgataagcgtctcacaaacgtgaccatcaccgaagtgcgtgtgaccaacgatctgcagatcgccaaagtctattggacccagcttggccgtgaaggccatgagcagggcgaacgccgccgtgcacagcaggcactgaaccaagccaagggtcgtctgcgttcccttgtgggcaccaaggccggtctgcgtttgaccccgcagctcgaattcgtattcgacgaggtgccgggcgaggcacatgagatcgaagacattctcgccatcgcgcgcaagcgtgacgaagaactcgccaaggctcgtgaaaccgcccagtatgcgggcgaagccgatccgtacaagcatccggaagaggatgacgacgatgatttcgacgatgatgacgtcgaagtcgaagattgggatgatgacgaagaagcctgaacattccggcctgctggtcatcgacaagccgcagggggtcaccagccatgacgtggtcgcggccgtgcgcggcgccctgcatatgaagcgtgtcggccatgctggcacgctcgacccgatggccaccggcgtgctggtggtgggtttcggcaatgccacgcgactgctcaactacattgtcgaccataacaaaacgtacgaggccaccattcgccttggacagcgcaccactacggacgatgccgaaggcgagctgttgccggcgggggagcgggcagtgaactttccttcgcgtcaagccgtggaacagctgatcacagaacggttcaccgggcgcatcgaacaggtaccgaacgtctactccgccattaaggtcaatggccagcgtgcctatgatctggcgcgcgaaggcaaggatgtggagcttaaggcacgtcctgtgaccatcgaagagttcaacgtgcggcaggcgcgttacggctacacgcatagcgatcgtgccggcacggaacttgctggcgcagtcgtggccgagagggcaggagatggatggattgccgacactgcaccgtatgaagatatgcagcccgttatggaactcgacgtgaccgtgacctgttccgcaggtacctacattcgcgcgctcgcacgcgatctgggtgaggaactcgggttgggaggccatctgacgatgctgcgacgcacacgtgtcggcagattctcagtgaatatgcccaacgtcatgagcgcccacgctgaatccaaaacattcaccaatcgtgaaggcatggaagtgacgcgcaatcgtgcagtgcttgacgatgcagatcatgcgctcgatcatgcgctcgatcccgtggccagcgcggcggcttccatgaatatgctggccgtgagcgatcaggaagcggccgacttgcgtttcggacgcagaatcgcgcatgacatacgtacgaccacggcggcgtacgttgaggaaaccaacgatttggtcgccatcctcgaacgtgcgaaacgcggtgaggctaaaccggtcgcggtattcaactgaaccatccaatcagactacagatacgaattcatacacaagaaggacatgatgaagacaatcacgctcacgcctgatgccagcggcatggtggattggcctacgctgagcaacgataagaaatccgtggtgaccatcggttcgttcgatggcatgcatcagggccatcaggcggtgattcgccgcgtggtggaactcgccaagaaggaacagtccttctccgtggtggtgctgttcgatccacgcccagcgctcgtgcacggctacgcggcgcaaaacggtggccaggagccgccggcaggcatgatcgacacgcaggcgctcaccagcatgcaggagcgtctgcgcgccatcaacaagctgggcgtggattacacgctcatcgtgcgttacacgctggcgttcgcggcgaaatcgtaccgattcttccttggacaaatggtgggcaagctgggcatgcgcgcgctagtgctcggatccgatgcggccatgggtgcgaaccgtgccggcgatgtgaaggccatcgagaatctggcgctcgccaccggcgtgttccagcttgacgtggtcgacgatcgtggaccgggcgaaacccgcgtgccagccaatgcgaagccggttatgcccaccgaccatggtgagccggccgatccgctggaaggcgcgtccaaggcggaacgtcgcgcatggagcaagaaaaaccaggcgaaggccgtgcgcgtgtggagctccacgaatgtgcgctacctgctgggccaggggcgcatcaaagacgccgacgcgattctgggacatccgcatgccgtggaaggcgccgtggtgcatggcgaggaacgtgggcgcaccatcggcttccccacggcgaatctgagcgagaatgtggcaggctatctgccggtcgacggcgtatacgccggttggcttgtggacttgggcgcgaagacggcggacgatgatgcgcaggacgcttccgaaggtgtttcgcagcagttcgattcctctgccgtggacgcgcgacttgccgatcattcgccatatcgttggcccgctgcgatttccatcggcaccaagccgaccttcaacgaggtgaccggaatgaacgatcgcgtggtcgaagcctacgccatcaccgacgattggcttgatttatacgatcaccaggtacgcgtggaattcgcaggattcctgcgtccgcaaatcaaattcgattccgcacaggatctgatcgacgagctgaagcgcaatgtcgaggaaaccaagcgaattactgcctgatgctaatcacaacgatgatcgcaataataatcacgataatgacagtgattaatgaatgctgatatttccagtaaaaacgtatcagtattcaaaaatagtggggctcttacgtaagcatttacgtaagagccccacttgtataggttaaaaaaataacataatgtatatgtttcgcgtgcatacatgcgaaaacggtatgtagggtgtgtattatcgcaacatggcgccaagcgcatcctgcaatgtgtcgacctgaacgatcgacaatccgggaattgcgatttctctacgtaatgtcggcactacagcggtggtgaaaccaagacgggcggcttcgcgcaaccggtattccaatcgcggcaccggacgcacctgcccggtcaacgaaatctcgccaatcgcacacgtggtgcggccaatcgccttcgacttcgcggcgctcgccaacgcgccgacgatcgccagatcgcatccgggctcgcgcgcctggcctccggcgatggtggaaatatacagatcgttcgccaaaagattgacgttgccatgcctgtatagcaccgccaccagcatggcgatgcggttggcgtcgacgccgttcgcggcacgtcgtggcgttggcagtacggatttggtgaccagcgactgcacttcgatgggaagactgcgatgaccgtccaacgtgaaggtcacgcacgtgccctccaccggagagggatctgcggaattggacgaggaaagaaacagtccggacgggtccgtcacctcttcgatgccttcgccgctcatatcgaaacagccgacctcatcagtagggccgaaacggtttttcaccgcgcgcagcatacgcaatgcggtttcggtgtcgccctcgaactggcagaccacatcaaccaaatgttccaacgtgcgcgggccggcaatcgacccgtctttggtgacatgaccgaccaacaataccggaatatcaagcgttttggcggtgtcgatcagcgcgctcgccacttcgcgcacctgagtcgagcctccggagatgccatcgacttcctgcgagacgatggtttgcgcggaatcgacgatggccagcgcaggcttgcattgttcgataagccccagcgcggttgacaggtcggtggtggcggccagaagcagattcggttcgaccgcgccgatgcgcgaggccctcatgcgcacctgcgcctgcgattcctcaccggaaatatagagcaccgtgttgcgctcgggctgtgctgcggaaagacgggcaacattgcctgcggtctccagcagcagcgttgatttgccgatacccggttcgcccgcgataagcgtgacggaaccgggaacgatgccgccgccaagtacgcggttgaattccgtgaacccagtgtcgattctggaaatgttttccgtactgatttccgtgatcggtttcgccgcggaatcgggcactgcatgcgatagcgtgcgcgatgtgcgtccgggagcggcggtgcgtgacgatgcggaggggcgcgcttcatggaattcctcgatggtgccccactggccgcattcagggcagcggcccagccatttcggcccgctccagccgcattcggaacatacaaattgcgaggacgtctttgccatatcgccgacaatacggatattttgggacaatcgttttcggagatattaagggggtgctggtgcgggataatggcgagatcacggtttctggattcgagcgtctcacggatatgaaagaataacagccatgtctactacgcaaacttcctcttctcatggcaaactgatcgtggctgtcattgccgccgctttggtggtcgtgctcgccttggtgtccgctttcatctggcccggctgggctctgaacaagggcgatgaagcgtccactcagggcaccaccacctcgcagggcgcgtcgcaggatgcctctgagccgaccacgccgtccattgacgctgtggcgttgccggatgacgccagcgaactgttgaaggccatgcctgattccgtgttgaatttcgcgcgcaccaaggccgatgccagcacttcgtggagcggcgcttccccggtcgaggagtacacgttgacgtattccacgggcaaggacggtcagggtatcaccttgaaagtggcgcaatggtctcagtccgaggatgcgcaaagtcagtatgacaatctgaccggtgccatgaccggcaaggagctgggcggcggcaatgtgaaggtttccggtgaagcgaccggcgcctatagcgccaaaaccgatccggacgacgaaaccaaggctatcgcggtctggcgcaacgataccgtggtgttccaagccacgggagccaaggattcggtgcagcgcttctaccagcagttcccgctatgatactgcctacggctggttgtgcgatcctatgattcatgcatgattcacgtaagattcagccgtggaccatgcggactgcgtttgcctgatcttccgataaagaggtgcgtgcttccaccatatgaatgcggttgtgtgtgttagtccccgaagcagtgtagtattgggcaagttgcaaacttttaccctttgagtttaagaacggaggctgagatgggctcggtcatcaagaagcgccgcaagcgcatgagcaagaagaagcaccgcaaactgcttcgtaagactcgccaccagcgcaagtagtcttcaggcgcggttgaagcgtcgcttaaacaaaatcccgtatgtcttcttgaggtatgcgggatttttgcatattgcaaagaaataaacgaaaagtacgagaatcgaaaatcaatagatgcaaaaagaaggctgtgcgctcgaagttgaacgcacagcctcatatggttttcgtgtaggttcgcgaaaatccgcggaaaatgcggaacttacgctacttcaaactcacttgttggagttggtgagcacgcgcggaccgttgggatcgcccacgatgacctggtccaccatgtgcaggaacaggccatgctccaccacgccaacggtgttgatgagatcgtcggccagagcctccgggtgttcgatgcattcgaggtgcagatcgaccacgtagttgttctcgtcggtgcgcaccggctggccttcggcgtcgaggcgaagcaccggcttgtagccgcgggattcgaacttcttgacgacctggcctgcgccgaacggaatcacctcaaccggcagcgggaacttgccgatggtgtccacaaccttggactcgtccacgatccacacgatcttgttggagttggtggccacgatcttctcccacagcagagcggcgccgccgcccttgatgccgttgaagttcttgtcgacctcgtcggcgccgtcgatggtcacgtcgatgtgatcaacgtcatcgatgtcgacgatcttgatgccgtagccttcggcctgctcctgagtgcggcgggaggtggtcacgccggtgaactccaagccttcctcctgcacgcggcggccgagctcgtcgaccaggaagcgcacggtcgagccggtgcccagacctgcgatcatgccgttctgaatcagcttggcagcttcgatgccggctgccttcttcaatgcgtcctgctgtgccttgtccatgatcctccttcgatatggggttaagaccgtctccatattatcggatgtgttgatttttgtgcgtttgcggacatgtcatgaacgaaggtgtgccattggtggtcagcaaatgttttcacaggatgtttcacgcactttcgaggcgttaaggtcgaaagtgctggctcgttagttgtgcttgactgcaaatggcgcttcgtcgaggacgagcgtgccgtcgccttgcacgtagccttccaccgcgatgtaaccgcggatcaggcgtggcttgccgtcgaacgtcggactggaatttggcgggggagtgaagcgaatggtgcccgacaccgccaatcccgaaggactggcgcgatgcggcagtttcggcaaatcggcgacggcgttcgttggcgccgacgcgtttgcggattcggctgattcgctcgttggcgccggcgtgttttccgaggaattcgcggattgttcgttctgtgcatcgtcggctggctgccgctcgtcatgctcgtggggaaaacagtccggcttgagcagcatttcggcatacgatttgcgcggtgcctcggcgtcaggcgtcgtgccatcaggcatggtcgtatcaagcgcggtggtcggttccggcatgtcgtcggattccaccggcatttcgttggacgtcaacggcaatgtcgcctcgtcgggcgctggatagccttccggctccaccagcatatcggcgatggaacgcggacgcggctccggatcggccgcgcccatcagatcatcggccaacgatccttgagcggacttgccttgcccgcgccccatatggtattcgtccgtagtgattttgctgtcaagcagcatttgggcatcatcgggaacatcggtaccttgcgaatattcggaagccagcagcgactgccaaccctccaaaggaagatatccttcacggatcttcgaacggcaatcgcccgcataggtgcgcgccagctcgtccaccttctcattgccggcattgccggcatgacccttgacccatacgaatttcaccggtccggggcgcttggagatttcggcatcgatcgcgcgaatcagatccgcgttctttaccggcttcttctgcgagttcttccagccgttcttcttccagccgtgaacccacgtggtggaacagttgatcgcatactgcgaatcggtttcgatcaccaacggttcggagccggggtgcgcgcgcaacgcctccagcactgcgcacagctcgccaatctgattggtgccgttcgtagctccgccggcatcgcagtcgctgtcatggtgatgccccggcttgccgcctgtggcaagctcatgatcggcccaaccccaacccatcggaccattcggattgcctaaagcggaaccgtctgtagaaaccgtaatcgtcatatctctaccctacgaaagccgtgagacgctgccatacgtggtgaactgcgaactgtgatcgggcgacgtcgaacgggaatctcaatcatccaaacacagcatgacggaagcgcggaacagcgtgccgtcataatcgaacgaggtcgcgccatgatgccgttccgcggtttcgcgcacggtggcggtgcccaaaccttcacccccatgcttggttgaggcgaaagcgtcgccaacctgcataatggaggaatcgtgcgtgttgtcgaccacaatgaacagtgatgcgggcggcccagtgcgatatttgatgcgcaccctgagttttttctccccatcctgttgtttcataatggcctcagacgcattttccagtagattgccgaccatggaacataattcggcattattgatgttgagatattgcggcaccgacgctttgacatcgacttcagcccctatatggcggatccagtcacagtagtagaccagcaccgcgttcaacgaagcatgttcgcaatactgcatggggatggggtgcaacagcctatgattggccatctcctccaaatacgaggtgatgccgggcatatcgtcggccgcggcgagagcctgcaacgtctgaatatgatgccggatattgtgcttgatctgcctcgcttcgttgatgcgttcgttcatatgctgcagctgcaaggtctgcatggcttcgtaatgttcgcgtttgctggcttcgcgcagtcggtccgcctgctggatcatataccagatgaggaagtaggccatggtcatgaaaccggaatatgcgatggatacggtgaaggcgatgctaagcacgcgggtgtcgagcagcgatgcgttgtcggcgggcatgcaccacaccacaattgctgtggaaatgaacggaaaaagccagatgaccctccaaaaattcctgctgatggaaggtgaatcgaatgttgcggaaaatgaatgatggaacggatggaaaagtgtagtcgccgcaatcaaatcaaaaatcagcagactgatcattcccggccatccgacacgtaaattcatggactgctcattcagaacagctaaatccacggccaaagacaggtaataaatgatcgcgacgatatatgcggctgttgaaacgacgaaaagaagctgctcccaaggaagattcgtcatcttacgtaaagccaataccacaaccggagccgaaggaatcacggaccagagcgaggggacgtgagcgaggcaacatgcgatgccgcacaggaagaagacaatcacgccggaaatcatgagaataaggccgtctcgcttgggattctccatatgatgccaggtcatgtacaggcagagaagcaggcccgttagcgcgtttagctgttcgccgatggcgaagaacatgcatgatggcgcgatcgatgcgagtgcgtcaagcatggctagtcctccattctcatgcgggtgaacgtgtattccgcgtattttctgcaggtggtggtcaccgcggttttcgtgatgggaatgtgcttgccgcctttcatcacgaattcattgttgctgatgcctgatacgtagtcgaagttgacgagcactcctcgcgcggtgcggtagaagttgctgaatacggtgagacgatgttccacatcggagaagttggtgcggattttcgcgcaggtgccgtcggcgaaggtgaattccacataatgcgcgctggaaagcgcgtaggcgataaggcgacggtccatggtgatggcgggattgccgaacgccacctgccatgcggcgtccgtgctgctttgtgcattgcctgtcgattgatgttttttcagatgagtgaccggtgttttcgtgtcgagctgcgctgcgacgcggtccatggtcgcattgaacgcgtcgtgattcaggggcttcaacagatatccgcttgcctgcacctcgtagccgagcacggcgaaatcggtgcttgacgtgatgaacacgatcgggcaattgtcgttttgtctgcgcaacgtccgtgcgatatcaagtccggtcgccgcatgcgtggcggtttcgtcgtccgacagatagcagtcgagcagcagcaggtcgtatcgggcgtctttccagcttttgatgaaggattccgcatcggcgaaggtcacgcattccacgccgatatcgcgggtgcgtttgaaatattccgcgcacatgacggccatcagttggcgttcggcggcgtggtcttcgacgatggcgatgcgcatcgttcacctcccatgaagattggcggggaccgctggactgagtgttgtgtcgttatcattcaagcgtaatgcgaagcggggccggcaggagggtgatagcgtgcgtgtcatgccagaattcggcgtttcgtgccatatcgcacgattcgtgttcgttgcgattcgtattcgggcggatatgcgagaagcccgcctttttcaggaaagcgggcttctcagtgagtttgcgaatgattggcgaatggctggattacgccgattcgccaatgatcactcggccaaggccttgtccacgacttcggtggcttcggcgagcaccttgtcgagggcttcgggggattcgaaggactcggcgtacaccttgtagatgttctcggtgccggaaggacgggccgcgaaccagttgttctcggtggtgaccttcaggccgccgatcttggcgtggttgcccggggcttcggtgagcttggcggtgatgtcctcgccggccagctgggtggccgcgacgtcgtcgccggaaagcttggcgaacttctgcttctgctccaaggtggtcggcgtgtcgactcgcttgtaccagctttcgccaaagcgatcgacctgctcctgatgcagctgggctgggttcttgccggtcttggcggtgatttccgcagccagcaggtcagggatcagaccatccttatcggtggtccacacgcggccgtccttgcgcaggaagctcatgccggagctctcttcgccgccgaaggcgacttcgcccttgaacagcgggtcaacgaaccacttgaagccgaccggaacctcaacgagcttggcgtcgatggaagcggccacgcggtcgatcagggaggaggacaccagcgtcttgccgatgccggcgccttccggccagcccaggcggttgccgccgaacaggtactctacgcacacggcgatgtagtggttcgggttcatcacgccccagttcgggcatacgatgccgtgacggtcggcgtccggatcggtgccgccgaccaggtcgtacttgtcccaagcgccgttgttgagggagtccacaagacccttcatggcgtacggggagctcggatccatgcggatcttgccatcatggtcgatggtcatgaagctccaggtcggatcgacctgcgggcgcaccacgtcgatggtcaggttgaacttctcgttcatcagcggccagtagttgacggaagcgccgccgagcgggtcgatgcccaggcgcacgccggaggaacggatcacatcgaagtcgatgacgttctccagatcggcgacatagtgctcgcggaagtcgaagcgctcgaccagatcggacttgacggcctgatcgaacggaacgcgcttgatgttcttgaaatcgccgagcagctcgttggcacgatccgcgatggcgttggtgacgtcggacggagccgggccgccggtgaccgggtcatacttgaagccgccatcggtcggcgggttgtgcgacggggtcaccacgatgccgtcggccaggccttcgccggtgaaacgctgggtgccatccgctgcgcggttgtgggtcaggatggcctgggacacaaccggggtcggggtgaagtcgtcgcgggaatcgatgcgcacggtcacgccgttggcgacgagcacttcgatggcggtcttccaagccggctcggacagagcatgagtgtcgcggccgatgtacagcgggccagtcacgccggccttcttgcggtattcggcgatggcctgggtgatggcgacgatatgggcctcgttgaacgaggtcttcagagacgatccgcggtggccggaggtgccgaaggagacacgctgctccggaacgttggggtcggggacgacgtcatagtacttgccgatgacctcgtcgacattgatcagatctgctggggtagcgggcattcccgcattgtttgcaaccatagtcactattctgccacgcttttgcgtcagatgtgcgtaactgtcccattatgcgcgatgaatacgttgtctgtttagtgcatgttcggatgtgtgtacatgaattttcgaaaatggcggattctgcgcttagccgagttgcgcaatgtcaaacgatggtgtatagttctatgctattcgactgatgcagggttgctagtcaacataaagacgcaagacctgagatgtggctgaactatagccatatctcaggtcttttttttgttgcccgaagcggtgttgctcggatcgaatcggttgtaagggaaagaaaggaaatcaggatggctgactcactcgcatcgcagatcatcactgcaatcggtggtcctgaaaacgttcgcagtctgacgcattgcgccactcgactgcgctttgaactggttgacgcatccaaggtcgatcagaatagtctcgagcacatgcagggcgtgctcggcgcggtgccgcagagcggcgaccgcttccaggtggtcatcggcggtggcgttgccaccgtgtacgaaaacatcatgcatctgcccgaaatggccggtgtcggcggtgcctccgcatccgacgatggtcagaagagcaatgccgacgtcaaggccgaagcccgttccaaggcccgcggcaaggtggcttggctggactccttcttcgagtatctctccgattccttccgcccgattctgggcgtgctgctcggcgcttccatcatcatcgcgctggtcaacctgcttatttcgctgaacgtcattccgaatgacgaggtttccgcaggctgggtattcgtgaaagccatctggaagggcgtattctacttcctgccgatcatggtcgcctacaacgcgtccaagaagctcaaagtcgacccatggctgggtggtgccatcatggccatgctcatgaccccgcagttcaccggcttgatggacgccaagaccaccacgtgcgtggagaacgccgctctgggcaccaagtcttgcatggccaacatattcggtctgccgatggcattgagcgactattccggcaacgtgttcgtgccgctgctcatggccgccgtgcttgctctcgtctaccacggattgaagaggatcatcccggaaagcgtccagctggtcttcgtgccgttcttctgcatgatcatcgttggcgcgctgaccgcctttatcatcggcccgatcggcgtgtgggtcggcaacggcctcggcgtcggcttggcctggatgaacacccatgccccgttcatcttcgccatcatcattccgatgctgtacccgttcctcgtgccgctcggtttgcactggccgctcaacgccctgatgctcatgaacatccagactctcggctacgacttcatccaaggcccgatgggcgtgtggaacttcgcctgcttcggcgctaccgctggcgtgctcttccttgctgtgcgtgacaaggataaggacatgcgccagaccgctttgggcgcacttgcggccggcctgctcggtggcgtttccgaaccgtctctgtacggcattcacctgcgttacaagctcatctacaagcgcatgctggtgggctgcggtctcggtggcgtcgtcatcgccatcctcggttggctcttcccgtccgtcaccgccgccggccagaccgtgcatggcgtgaccaccaccgctttcgcattcacctcgttgctgaccattccggtcttcaatcagatgtgggtgtatgcagtgtccatcgccgtgtccttcctcacctccttccttctgatcatcaccttcgactaccgcactccggaacagaaggccgaagtgctggcccgcgcggctgccaatcagaagaccgctgtctcgtcggtcgaagccaagggagtcgctccggctgctgccactgttaccgccaccaagactgaagccccggctgctgccgccaccaccgtggtgaacgctccagtcgcaggccatgtgatttccctggatgaaaccggcgatccggtgttcgcgtcccgcgcactaggcgaaggcgtcggcatccagccggcagacagcaccgtcgtcgcgccggtatccggcgtgctgcagaccgtcgccgaaaccggtcacgcattcggcatcaaaaccgatgatggcgtggaagtgctcgtgcacgtcggcatcgacacggtgaagatgaacggcgaaggcttcgatgtgaaggtcaaggccaacgaacacgtgaacgcgggggacaacctcgttgtcgtcgactttgataaggttaaggaagctggatacagcaccaccacattgatgacggtgctgaacacagtggccttcgcgtccgtcacgccaaagaccggcgtcgacgtcaaggccggtgagtcggtgatcgacattcagcgctgaccaatcgcatagtcggaaggggccgacgtggacgttcttcgcgtattcaacaataatgtcgtactggcaaaagacggcaatagtgaggtgattctcaccggtcgaggcataggtttccaagccaagcccggccagcatgttgacgacgcgaagatcgtccgtcggttcgttcccgtagatggcaaggatcccgaccatatggcccaacaggtggccgggattccgcccgaaatcattcgtctcgttacggacgccatgaaccgcaccggtctgaaggaacaggccgacagacagcctgcattggtgctggcattatccgaccatatttgcggtgcgattcgccgatcgcaaaacaagcagaccatcgaatatccgctggaagccgaagtgcgttcgctctacgcgagcgaatatgccaaaggcaaagctctggtcgatgccatgaacacgtatctgggaggcgccctaccggattgcgaagccgtggctttggccctgcacttggtcaatgcgggcttctctaccggcgatctttccgccacatacaccatgaccggcgtcatccagcaaatgctgacggtcatcgaaggctattacggcatcagccttgaccagaacagcgtcaatgtggcgcgtttcatcacgcatctgcgctatcttttcgtgcgcatccaccaacatgaacagcttgacgacgagcctgaaccaatcgtggaatccatcaaaacctcatatccgaaagcatcggattgcgcaaacaaactcgcgatcatcatcaaaatgcgattggatgcaagtctttcgcaagcggaaatcgcctatctcaccttgcatgtcgcacgagtgacttctcatgcgacggaatcgcatgagaatgacaatgccaatgcataatctgcataaaatacataatcatcgtaataaataatttaataattacgataatagttactgatttacattggaagtattggcttcgggcgcttccggcacacgcacgcacaacgacttacgctccacactgaaacgaatatgctgcgtttcgggaagcatatcgccatccacctgagccaacacgggcttctccaacttgatttccgcgctgacgccctgaatctggtcaaccgtggaattcgtggacagcggactctgctgggccttgccggtgatcgtctgatgcagcacatcgccgaacagattcgcccaaccgatcaaaccgccggatgtgtcaatgatctcgtaatcgagaatgccgtcatcgtacacggcgtcgggcatgagcgaaaataccggaatctggccgcaattgccggccatgaacgtgcggaaggtcaatccgtgcgtggtgtgcgtgctgccgtcggcgctggtaatggtcacatcacccttgtacttcggggcgaacaggttcttcacgcccgacacgaaataggcgagccagctgatgttcttcttcaactcaggatcggtgtcgtcgatcatcaccgcatcaaagccgatgcccgcgataatgaggaacgcatggccgtgatcggcggcttcatcatcgagcagcgtcagtcggccgacatccaccaaacgcgaaccatgagatgtggcgacggtcagtgccgcatcgatatcatccacaggaatgcccatattgcgggcaaacagattgccggtgccaatagggatgatgcccagcgcgtggccggttcccgaaagtgcgctcgccaccgtgcgcaccgtgccgtcgccgccgaccgcgaccaccacgtcggcgccatgctccaaggcttccagcgcgcaggcgcgaccatccttatcaagctgcgttccgatatattcaacctgcgtgagatgcttcgcctcgcagaactcctgaatatgctgcttgcgttgttccgcctgcggtttcgaaggattgatcacaaacgcgtaatgcacctgatcatcgtcgcgcttgtcgagctgttccgcaagtttgcgatgcttatacgcgcgtactgcgaaaaagacggccgcgcacaccgctgcgaccgcaagaacgacaatcagaatgataacaggcataggcatgtcatctattgttcacggaagatgcgaaaaaagcgaatcaagactgatttattcgacgattcctgcacgttgtatacaaaaatgagaggactgcggcgggtgtcggctttcagcactaggctaggaggcatgcttgatatccaattcattcgtgaacatgctgacgttgttaaggaatcccagcgcaagcgtggcgaatcggtcgaactggtcgacgaggtgctgcgctccgacgaggttcgtcgttcctctctgaaggaattcgaggctgcccgtgcgcagcagaaggaaatcggcaagaaggtcgccgcggctccggccgacgaaaaggccaagctgattgccgaaaccaaggaactctcccagaaggtttccgaatacaaggccgcagcggacgccgcagccgaagaatacaccaccgccatgtggaagctctccaacgtggttgagccggaagctccggaaggtggcgaagacgattacgtggtggtcaagaaggttggacagatccgcgatttcgcagccgaaggtttcgagccgaaggatcacctgaccctcggtcgtggcgttgccggcatcgatatggaacgtggcgtgaaggtcggcggttcccgcttctacttcctgcgcggccaggtggcacgtatgcagatcgccatgctcaccatggctgtggaccaggccgaagagcacggcttcacgctggccatcaccccgacgctggtgcgtccggaagtgatgcgcggcactggcttcctcaactcccacgccgacgaaatctaccgtctgcgcgaacctgacgagcagtacttggtcggtacttccgaagtggcgctcgccggtatgcacgagaacgagattctcgacctgtctgacggtccgctgcgttactgcggttggagctcctgctaccgccgtgaggctggcgcagctggcaaggatacttccggcatcatccgcgtgcaccagttcgacaaggtggaaatgttcgtttacaccaagcaggaggactcctacaaggagcatgagcacctgctggccatggagcaggaaatgctcggcaaggtcgaggtgccgtaccgcatcatcgataccgctgccggcgatctgggctcttccgcagcccgcaagttcgactgcgaggcttgggtgccgacccagggtcgctaccgtgagctgacctccacttccaactgcaccgaatatcaggctcgccgtctgaacattcgcgaacgtatggaagatggtggcacccgcgccgtttccacgctgaacggtacgctggccaccacccgttggctggttgccattcttgagaaccatcagcagaaggacggctccatcgtcatcccgcaggccatgcgtgcctacatgggtggcaaggaagtcatcgagccgaccaagtgggaagcctgatagaatttgggtttgcttggcagagtctgatagcttgggttgctcgtggagtttggtaactcgggtttgtttatcggttccactgagttgctgagctactaaactgctgaaacggacttctgcaatacgaaatatggaagtctgaggatgcctggcatttggcacttgccgatttctggcttttctggcttatgggaagggactcgcggtgagcgggtcccttcttttttgttttcgccgcgttctttcctttgttcttgctcgctttcttcccctcgttctttgggttgtgctatattagcgtttcgtgcgtgatgcacatgggtaggtgtctgagcggtctaaagagacggtcttgaaaaccgttgaggtgcaagcctccgcgagttcgaatctcgccttacccgcctataaggcttactgagagcgctctaagcacccggtaagccttttttgttgctgcaatccgggtaaactccacccaagttcggctcagcaccgtccaagtctcaattcttccatccaccggaataattctccccgctagggagcgcgtgaaagtccgtattcttccatccactggaacaatcttcccgctgttggccctgtgagcgtccagattcttccagtgggtggaggatttgggtcgctgggatggtctgtggcggggtgattcttccagtgactgggggatttttcccgctgggggggcttgtgggcgtctgtttttctccaatgggtggaagatttgggtcgttgagaggcttgtaaatgtccactttcttccagtgactggaaggattggggagggattgtgatgttgttcggtgtacgatcaggctgagttgtgagaaaggctgctgtgactatgcgtgagaatgggatgcaaatgaaggaacgagcgatgggagctatggctgggcttgcgttgggcgatgcgttgggaatgcctacgcaaagcatgtcggtcaagcagattcgccggtattacgacggtccgatcacgaaacttatgaatgccgtgccgcagcagccgatcgcaccgaatatgaaagctggtgccgtcaccgacgatacagaacaggctttcgtactcgcacggcgacttatcgacgataacggctgcattgataacacccgatacgcccacgatctgctgcaatgggaagctgcgatgaaggccaagggatcgcttgacctgctgggaccttccaccaaagcagcgctgcaaaaacttaccgaaggcgtaagtctggaagagaccggccgattcggcaccaccaacggcggtgcaatgcgtgccacgccggtgggcatcgcattccgtccaggccaagcgctcgccgacgccgcctggcggtcctgtgtggtgacgcataacacggtgcagggcattgaagcgaccactttggtggctgcggcggtgagctttgccattgaaggagaacgtgactttttgcacctcgcggtggaattcgtacggaagcttccacagcgtggcaattggtcggcaaaggcttcggtgcttgcgcgtgtgcaatatttcatgaattgggccgaaactgatggatgcaggctcaatgacaacgaattcgctgctgtgctgcaacggaattgcggtaccagcgtggaatcgaacgagtccgtggccgccgctttcgccattgcggcgcgcttttttgacgatcccacgcatgctttgtgtttcgcggcttctatcggtggcgacactgacaccattgcggctattgcgggcgcgatgctgggggcgtggcatggtatgcaaggtttcgacaaaaccatgcttgatcaggtgctttcacaacttgctgaagataatcaccttgatttggtcggcactgttacgtcgctacgcgcgttacgcgatgatagtgcgcttaatgatgtaaatatcgtttgatctgcaggaaccgtagttagcgaaactatgacggaagtgcgaaaggcatcgcaatgactggaaaagttatttctcttgggcaggttattgtcgatctgaccatgaatgtggacgcggtgccgcgtgcgggtgaagatgtgttcgccggcaatgtgcaaacgcaggttggtgccagcttcaacacgctgtatgccgtgcgccgcatgggcgttaaggcgtctcatgctggtgtgattggtacggggccgtgggcttcgcagattctgcaaacgttggaaaatcaggaaattcagcatatcggcaagcgggatgccgtgcacgattcgggattttgcgtggcgttgaccgacgcgaatgctgaacggacgttcatttcgacgaggggcgcagaagcgtacggcagtgccgatgcgttcgattctgtgaatccagaaaagcgggatgttgtgcatgtgagcggatacacgttggtgcatcacactgcggacgcgctgcttgcttttgtgaaaagaacgactgaacatcgtgagttcactgcggtattcgatccttctccgatgatctcggcagttgatgatgacgttttccgtgtgatgctcgcatatcgtccgatatggtcgtgcaatgaacgcgaggcaacgttgattgcgcaacgtttggcggcgctcgatagtggcgattcttgcgattgcaaggtttcgcgggatatgctgcaagagattgagagtgcgaatgtcaatgaggagacggttgcgtggctgtgcgatcgattgcaatctcctgtaatcgttcgcgtgggcgcggatggtgcgtggtcggcgattcccggtgacgaagtgctgcgaattccaggttttccaatgaaagcggtggataccaatggcgctggtgattgtcacgcgggtgtgttgtgcgccctgctgtgcgaaggcgtgccgttggaggaggctgtacgttgcgccaatgctgcttcggcgttgtctgtaacgcgatcagggccggctacctgccctgatcgaaaggaggttgagcggctcctaggaagggcgttctaagacttatggtacaaatgactataagtggttatatcatgtgcacgattgcgctgacgcggcgtgcatgtcgcttgcccgcggcgttgctcggcagattcaaggagattagtttcacatgagcaatgagaaagggaccctctccatcgaggagcagggtatcgacaccatatccgaagaggagcgtaagggcacgccggccagtctgttttggccctggttcgctgccaatgtttccatgttcgccatgtcgtacggcgcgtgggcgctcggtttcggcatttcgttctggcaggccaccgccatgaccattattggcgtggtcatctcgttcctgctggtcggcatcatttccatcgcgggcaaacgcggcaacgcgcccaccatggtgctcacccgcgccacgttcggcgtggaaggtgccaaagtgccagcggctctgagctggatcgccacattaggctgggagatttcactgaccaccaccgctgtgttggcattatcaagcaccatcgaaaaactcggttggggctctggtgtcgcgcccaagatcatctccaccattgtggtggtcggccttgtggtggtcgcaggtattttcggatacgacctgattatgcgttgtcagcaggtcatcaccatcgtgaccggtgtgatcaccgtcggtttctttatcctcggctggggacatattgacttttccgccattgcctcggttccggcgggatcattgccggccatgctcggctgctgcttcttcgtgatgaccggctttggcttgggctgggtgaatatcgctgccgattactcgcgctatctgccgcgcaactcctccaatggcggcattgtgttctggaccacattcggtgcgtccattgccaatgtgttcctgattttctacggtctgctgctcgcggtttccaatgccgacatggcggaaaacgttggaaatgatccgattggagccatggcttccattctgccgacctggtacttgattccgtacaccattgtggccgtgctcggtttgatgtccggctccattatggacaattattccaacgggcttgcgctgctgtcgttcggtgtgaagttgccgcgtaccgtggctgccgcgctcaccgccgctttgactgtgcttggtgtggtctacgtgactttcttctccgacacgttcattggcccgttccaaggctttctgaccacgctcggtgtgccgatggccgtatgggccggcatgttcgtggccgatgtgatcattcgcaagaaggattacagcaccgctgatttgtatgatccgaaggggcgttacggtgcgtggaacggtaagtctttcgccattcttgtcgtcggtaccgtgcttggttggggattggtggtcaacactgccgccagctggctgaactggcaggggtatctgctgttccttatcggtggcaaagaaggtagttgggctgccgccaatcttggtgtgattgttgcgctgattattggtcttgcgggatcgttgatgttccagcgtggcgatattgccaagcaggaagctgatctgccggtttcggaagcatgagttgcttattgcgataatacaaggaaaggaaaagtcatgattgcggaagatgaatggctggtagttatcgacaggcagcgtgtttttgcggaaagtgaatggtccgcatgggcttgcccggacggctcctatcacactactgatgaagcgttcgcacgattggctaaggcgttcggcgatcgtgtggtctatacgcgatatgttgcgcctgagccaccgcaaaacgcttgggttgattatttcaaagattggccgcagtttttggttgctcccgacgatccgatgtacgatctcaccgcggataccgcggaattggcgcagggccatgccgtggtcagttgcgacactttcggcaagtggggaagcgtgctgagcgaagccattaaaggcgctaaaaagatcacggtatgtggtgtcgccaccgattgctgtgtgcttaccactgtgctcgccgcggctgacaatggtgtagcggtacgcgttgctgctgacgcttgtgcaggcagttcgccagaaaaccatcagatggcattgagcaccatggcattgttcacgccgctggtcaccgtcactgatactgattccatcgtaggataggtaaggactttgattctgcggggtttgttgagttctgctcagcaaaccccgcttttttgtatgtcgtgcatattgcgccaaaacttggatgatgctcggctggcatcggtaatgagccattaatcttgcggtgcgcttttgtaactgcggcgtaacagtgcggtggtgattgtaacggacgattccggcacaatcgtgggtatcgacagtttcgtgaagaggttttactgacggacatgtctctcacaggaaaaatcccatgtatgaatcgaggccaccatggcacagcagatcactagcttgcttgacgatcctacgcaagcggtcagtctagacactttcagtgggctcaccaaaggatgccccgcaccattctggcttttccaaggcgtttgcgcggcttggggcatcgaccaccagcgggcgcaactcaacctcatcaccgtatccgagaacgcgacgttcctgctgttgctggacggcgagccccaaggcgtggtacgtgtctcgcagccgggctatgtgggaggtcccgaggcggtggcgtcggaaatcagctggttgaatgcgttgcatgatattgaaggtatcagcctgatcaatccggttcccaccatccgtggcacgttcgtaacgaaaatcactgatctgaacggtgtcggctggacggtgatctccacgaaatatgtggaaggaaccgtgctggaagatcttgagaatcctgcaccgtattacgagacgatcggtgaatgggctgcgaaattccatgagcagtcgcgcacgtggagcaaaccgtacggtttcacccgcttcaattgggatctttcgaacatggttggtccggcaccgcgttggggacgttgggaaaacgccaatctcaccgacgaagagaagcagctgtgcgacaccgcgctgtggaaggccatggacgtggtgatgaaagtgccgagaaccaacgaaacttgggggcttatccatgccgacttgcgcccgtcgaacgtgattcgcggcaatgacgggagactgaccgtcatcgatttcgacgatgccggatacagctggtatctctacgattacgcttcatcgctgagtttcatcgaacatgaaccgtatgctcccgatcttgccaaggcgtgggtcaagggataccagcgcgtcgcaggttcgttcacggatgaggaactgcgtatcatgtccgcgctttccatgatccgacgcatgcagatgctcggctggaccaccagccaccgtgaggatgccctgcccgacggtctcgctgcacagcaggctcccggcagcgtgatgtgcgcaaaaaactatcttgaggatccgctctggctgctgcattaggcaagttgcatgaaacaagcgtaattacgcagaaaccagacaatccaagaaatccaatcgtaagcacgtaaaaatacgcaattacgaaaatctcaatttttataacttaacaacatctgaccgcaaccaaccaaacgaggaatcaatggcataactcgccgaacaataagagaggaaggcgattacaatgactgcgtcaactgtttcgggacgatcgataggcggcgtgacctacgttgaaaccgacaaggactatttcgcaaaacgacagcttaagcgaaccgcgggagcgttcggtctatgggccatcggcatttccgcggtgatctccggcgacttctccggctggaacggaggcatcgcccaagccggatggggtggcatgctggtggccgccatcgtggtgtacctcatgtacgtgcttatgctcaactccatcagcgaaatggcgtcggccatgccgcacacgggtggcgcgtattccttcgcgcgtgccgccatgggtccgtggggcggcttcttcaccggccttgcggaaaccatcgagtatgtgatgaccgcagccaccatcgtctacttctcgtcggcatacgctgatgcgatcctgtcgaacctgaccggatattcgcttgacgatcatggcttggcttgggtttggtggcttgccttgtatgcgattttcgtagtggtcaattggctgggcgccgaaacgtcgttccgtttcgccgaagtcgtgtcgatcgccgcgctcgccatcgtcgcactgttcggtatcggcgctttcgccactggtaaggccgatttctccacgctgctcaatatcacgcctaccgaaggcaactccgcgttcctgccgttcggcccaggtgccatcttctacgccatgccgttcgccatgtggttgttccttggtattgagcagctgcctctggctgcagaggaagtgcgtgagccggaaaagaacattccgaagtcgtcccgcctgtgcattttcacgctgggattgtccgcgctgatcatcgtgttcctgaacccggctgtggtcggttccgaagcgctcgctggttccgatgagccgttgctggatggctatcgtgcgattctgccgggcaatctcgccgcggtgctgtccgcattcgcgttgatcggtctgctcgcttccatccaaggcattatgttcgcgtatggccgcaacctgtattcactgtcccgtgcaggctattatccggcgttcctgtcgctgaccggtaagaagaagacgccgtactggggtctggtcgtcggcgcgatcatcggtttcgcagccctgttcatcatcgcgtacggcggtgatggcgccggttcggtggtgttgaacatcgctgtgtggggtgcggtgctggcatatctgctgcagatggtttcctatgtgatcctcaggaagaagatgcctgatatcaagcgtccgttcaccagcccgttcggcgtgccgggcgcggtaatcgcaggtttgcttgcattctgcattttcgttgccgtgctgctgaacccggattatcgactggccgtctacgccatggtggtcatctacgttctcgcgaccatcttcttcgcggtttacggacgtaagcacctggtgctttctccggaagaagagttcgccgcttccggcggaaaggtcgcatataagactgaagactgactgattttctgtgattatcgtttcgttttcttgaaataaaacgatatcgccaaggccgtgttcatctgggatgcggcctttttcaatcatcggaaatatgtaaaaaggtcaaccaaataggtggaaaacagcggaaatggtttgtttctgcgctgtatcagccactcaacattactgcgttaccgtgtgggtaacgccacaggaagccaacgaaagaaggaatcatggcaactcgatcaaccatcatggacaccaatagcttccgtccggaaatggcggccgcgctcgacccagaaacacgcaaactaaccgaagagcgtgacgtgcttggtccggcctaccgtttgttctaccgcaatccagtgcatctggtgaagggccgtggctcgcatctttgggatgccgacggcgaggaatacttggacgtgtacaacaatgtcgcatccgtcggccactgtcacccgcgcgtggtggatgcacttacccagcaggcttcgatgctcaacacccacacgcgctacctgcatgagaacatcctgcattatgcggaagatatcctctccaccatgcctgacgaacttgaccgcatcatgttccagtgcactggttccgaagccaacgatctggccattcgcgtagcacagacctacactggcggcgaaggcgtgatcgtgaccagcgaggcctaccatggcaattcggcactcacctccaagctttccccagcgctcggcaccgcgcaaacgcttggcttgaccatgcgcatgattcccacgccggacacttaccgcttggtcattgacggcaagcctgccgcggaatgcgccgccgaggaattcggcaactggatggctggcgaagtgcgcaaggccgttgccgatatggaacgtcatggcatcaagtttgcggcattgcttgccgactccatcttctcctccgacggcgtgtaccccgatccggtcggctatctgaagccggtgatcgacaccgttcatgaactgggtggcgtatggatcgccgacgaagtgcagccgggcttcactcgcaccggcgacgcattctggggattcggacgccaaggcattgttcccgatctggtcacatccggcaagcccatggccaacggtctgcccacgtcgatgatggccgcccgccacgaagtacttgaaccgttcgcaggctccattccttacttcaacactttcggcggcaacccggtatgcatggccgcggcccaggcggtgcttgacgtgatgcgtgacgaagacaccatgggcaacgccaagaaggtcggcgcaatattcaaggatgccgtcgcgtcgcttatgccggcacacccctgcatcggcgacgtgcgtggcgcgggcctgtacatcggctgcgaaatcgtcaagccgggcaccaaggatcccgaccagcaggcagcgctcgatatcctcgaaaccctgcgtgacaaccacatcctcacctccgtatgcggccgttacggcaatatcctcaagctgcgcccgccgctggtgttcagcgaatccgatgtggattggttcatggatggattcacgaagactctggaaacattgaagctgtaaaacgacagataaccataaagaaagggcgcggatatggaagatcataccggcatcaggcgcacgcgaagcgctacgagcgaactggtctaccgtatccgcgctcgcattcgtgaacaggagcttcttcccggagagaaactcggatcggaacgggcgctcgccgacagtcttggcgtcagccgttccgatttgcgcaatgcgttgaccgtgttggaatccgatcatgaaatcatccgcaaaatcggtcgtgccggaggcatcgtcatatcggacggacgtttggaacgcaatatcaacacggtggaatcattgccgacgatcgcgcgaagacaaggcatgcgcgtttcgtcgaaagtattgcaggcggtgattgccccggcttccgtttctgacgtgcgtttgctgcgattgccgggcgagcatccgatgatctacgacattacgcgattgcggtatatcgaaaatcggccgctttcgttggaacggtcgcatttgccggcatatctgtttcctctgttccttacacgcgatttgacgaccccgttctacaccatgttcgaacgtgattatggtgtgtatccgtgcaatgtcgacgaaacattggaatcggtggtcggcgacgagcaggagaacgagctgctgcagatcgaggcgggaactccgctgatgcgcattcaccggatcgcctatgcgtcggatggatgcccgttcgagcgtgccactgacgtgtatatcgctgatcgcatgcgattcaccatgcatcattccggctatgtacgcctgtccgcaacgtctacgcagaatatgacgaaataagccggaagattcttcggttatacgatgcggcggtcggcggcccagcgggtgagttcggtgcggtttgacagctgcagtttgcgtagtacggagctgacgtgcgtttccacggttttgatggaaataaacagttccgcagccacttccttgtacgtgtagccgcgcgcgatcaagcgcatgacttcctgctcacggttcgacaagcggtccagctcgtcatcgtggatcggtccgcttgcagggccgcccatgccagccggtgagccattttggaaagcggacagcacgaatcccgccaatttcggcgaaaacacggcatagccctcatgcacttgcttgatggaagaaatcaaatcatcgccggaaatcgtctttgtcacatagccttgcgctccggcacgaatcaccgaaccgacatcctgcggcgaatcagacaccgacagcgccagaaacacggtattaggggagtatgcgcgcgatttcacgagaatttcagctccgccgccaccctcgccaccgggaacatgcacatcaagcagcaccacatccggcttcgtctgcgcgatcatcgccaccgatccctcgacatcggccgcttgcccgacgatgtcgaaatgcggctgcagcgttgcgataacgcccgcacggaacatttcatgatcgtcaacgatggcgatgcggatctgctgttcctgctcgttcattgctgctcctcgaaatggttggtaggttgattgctgaattgattggtacgttgattgttggattgacggttatggtgattgggaaaatcggtttgttgtgagttgctttgcggctcgtgcgattgctgcgcattcgtgtcggcggctgcggatgcgggcatgtctgcgattggcatatgcatgcgtacctccgtgccccattgcggtctcgatactatctccactgtaccgccacgacgcttgattcgtccgataatcgattcacgaatgccaaggcgattcgcggggatggcattcacgtcaaatccgttgccatggtcgcgcacgaacacttccaccagtttgctgcttgcctcgcagtagacggaaatcggctctcctccatgcgctaccgcattgataagcgcctgttgcgtggcgtcaagcaacgcatcggtttgcgcgcttggacgtgcgtcgcccaccgtcaccacttcgatcggcttgccatgcgtgtcttccacatgtgcggcgatttctttcaagccggcgttcacggaacggtcagacgtggtgcgttcctgatacagccattcacgcaattcgcgttcctgcgaacgcgccagcgaaaacaccgtctgctgatcgtcggcatgcaactgaatcagcgccaacgtttgcagtacgccatcatgcagatgcgcggtcatgtcggcacgttcctcttcgcgttccttcgatgcgcgttccgtacccaaatcgcgaatcagcgccatgatccatggcacaatcgcaagcaatacgccaatcagcagtgccaaaccggcgcacagtatgcgaatcatggaaaacgcgtcaaaatgcatgcaggaactgacgtacaaagcgtatgcggcgaaaataatcgcaatgccgccaagcatcgtccataactgaccttcttcggcattgaaacgcaaccaagagacgccgataccgaccagaccaagcagcaggggcacaatcagagtgcgttcaacaccgcctgcgaacatgacgaaacagatggaaagcagcatcagaccagctaatgcaagcaaagcgggttttggtgctttcttcagtgtctgctcaagactttcgctggaagattgcgtatcgccatgcgttccgtcgttgcatgcagtcgtatcttcaaaagatggtggttgcgggtgcggaccatcttgcggagctgtaaaagattgatattccggggaaacgggatatatcccgtacggcatgttgccccgggaaagcggtgcctgccatggcgaacgtttgccggcaataatgtacgtctgctgtatggggtctcccacgggaagtgccatccacaggaaaatgtaagcgatgagccctgaaccgaacagacatgtggtggcgaggaaaaacaggcgcacccatagcacggcaatgcccaaatgcatgctgatcgccttgcatacgccggctcccatgcgtccgtatggaggacgcatcaacggcagtttggccggctgcgtcggcagcggacgtccctcatgcagggcttgatcgcagcagtagcgcatatatacggcgcttgcctggtcgtattggctttgcgtataccacggttttcctaaggatttcatacttctattgtgccttgtaagggacgccgtttcagggcattcatatagtgttcagggcagattcagggtgttccccgatacatgtggcatgcgcgagttgctgtaatggaaccatgagcaatgcaaacaatggtccgctgggcgatcgcggcaacgcagggccgcagccttctgctggacagccgtatcatcggcagcctgcgtacggttcgccgcaaccttcccgcggcggccgtttcttcgcgtggattcgttccagccaggtcaagcgtggacatgaccgttggattggcggcgtgtgcgatggcatagcacgtcgtcttggttggaataccacgttggtccgtgcgcttatggtggttgccacactgtttttcggcgcgggtgccgcgttctatggcctggcgtggtttgtgctgccggatgagcgcgacaatcagattcttgctgaggatttgattaacggcaagtgggattggaattgcattggcgcgctgttgtgctgccttgttgccatctgtttgccgggggcaggatggtttgctttcgcgttggccgcgttggttctgtggcttctgctcaataggcagatttatgcgccgaatgttcctccaaatcagtggcagcagcccccgtatggtcaggctccgtacggtcaaccgcaatatggtcagcctcaatatggaagtccttcgtacggacagccggtgcctcctgcatcgccatctccaacgcaatcgaatccttatactcagccgatgcaggcgagcggcgcatataacggggcggtcaacacggcttcgtcaccggaatcgcaatcgcctcagccccaacgccttcagcctcaacagcctcagtatcatgcctaccaacaacagcaggccaatggtccgtccgcttttgccacggccaatgttcctccaacattcaccgctccggcagtcccggtagcgcagacgcctacgtcgccaagaaggggacgccgtaagccggctggtccactgctggtattgatgatgttcggtctcacgatgatcgcatgcgcgctatgcgtatggtgcattatgacgtacggcgttcaaggcgggcagcggggcaccgaatacacgttgcaggcatgcgcggcattcgtcggtggcatctgtctggtgacgggaatcgttattgtcgcgctcggattcgcgggcagaagaacgggaggattgcatcctctgacatggatatccgtattcatgtcgttggtcatggtgatggctttggcgggttattcgctgttcagctatcggattgacacgagcattccctcatcctacaaaagggtcaatgtgtcgggaatgaccaccatgggctccaccgccagtgaaatgagcgaatacgagcagggcatcgtcgcgcaaggcgatgattacgccaccgacgtgctgcatatcgacttaagcgattacgcgaaaaacaacggtccgcacaaagtggatcttcaggatggcacacagggcacgacttcctgccctacaggaacgttgaatgtggtggcctcaagcgcacaggtcgtggtgaccttgccgaacggctgctggtgggcgttcgggtctgacggtaatttctacaacatcaccgatttcgtcggcagttcggacgggctcacgttggattccggcaatatctatgtctcgcttatgggcaacgattccacgaaatcggtagtgaaaaagcgtgcgctgggaacttacgatcggagttgcggctcgtacggagacgaatccggcatcgaggatttcggtgatgagaccgatacggaagatggcatggataccggcgccgattccactaggaccgattcccccttcaaagacgggaatgtagataaggcctaccgcgaaatctacgacaatcatcaatattggccgtgcttcaccgatgatggcaaggctccggtcatgccaaccggactgcggatcaatactatggcaacggtcggcggcagcgtcgcggtgcagtatgcgtccgacaacacattgggcaaagcgggaaaggagtgaccatgagcgacgacaagacccaggaaatgccggtcatggctgatgccggagatatgcctaccgaaacgttgcataccgtggatgcgcagtccacgtatgaccagtcgcagcgcagtgggcgtgcaacgcaggatgataagccgcgcgtggaatccgctccagcgcaaggcgttccgacctataccgcttcggtagccggtgcgaatgatgggcacaagaatcggcagactggagacgacatcatcagaccttccggaagaagcggttcgaccatcgcgctcggcgtgttcacgtgcttcatgggggtggtgacgctgctttgcggcatacatgtgccaatgaatctctggtggtgggccagcgatccgaaacagttcttcgtattcctgctcggaggcatcggcgtgctgcttatcgccgtcgccgtgatctgggcgatagtcagcgcggtgcgttcaaaccgatccaagaatggaggcgatgcggacagcgacgatccattcgacgctccccatagctcggatgccacggccttttcgactgattcggataagtcgccggtttcggaacgatcgtgagaatcagctgaatagcccctgatatcagccgcaccaacgaaatcgaggctgacatcgcaaacaaatacgtgaccaccatggcatgaccaaatccaacacttgcttttccatcttgacgttggattttggtcgtaccatggtggtcattttcatggtgatgtacggggcttaccgcagttttcagtaattgtcacggtgtgttttcactgtgtttactgtgcggcctcagcctgtgccaaatcctcaaatccagccaaacgaaccgtattgcgaatcgtctcttcggtgagattgcgccgctcatgccgcaaacgctccacaaaatcgtggtacaacgccacggtacggtcggaataggtgcccaattcgccgcgcagatacgtttcgaacgacgtggtctctggcgtatcttcgacagtggtcagcacacgcatcgcctcgccgagatgaggaaaacgctcacgaaaatcacgcgcccacgacacctgaactgttatgatgccttcctgcaagacgttgcgattcgcggaaatccggggaatatacggcgcaatgtttgcacaatactcctgtggatatgtggattgcatcatgcgaccatacttttccgtcaccaaattacgtccaacacggtcggcttcctgcaagtccgaccggtaactgcgcagcaattcctccggccacgtcatgaactgactggcacgcatctgatgaaacatcggccaattgccttggcaggacgcgcggccgccctcattattggtttgctgaaactgattccactccagtttgataatggattcaacaagatttgctgtatcgtgaccgtctattacatctgaaattacgctgctattcatatgatttcgattcttgatttcgtctgattattgctctgatttgcaatgcttgcgatggattttttgattgtaggcacgtcacaggctgtgcagacaactcgcgtcggacttgatatggttctcaacatacggccgctgccattccacaaacgtttcgtgggattcggtcaatccctcccgcagcaattcatccacaacatcactgcagatgcgctcaacagtggcgataatgcgctccgccgcaggcttcgcacccttgccgccctcaccgaaaccgacaccaccgaaacatgcggcggaactcaatcgcaatatgtcttccaactgttcgcacacgccggcaagtcttgttgccatacggcggctcagcttgcgcatggcagcaaactgccatttgtaatacggcagatacccaacgctcaccggctcattgaccagaaacatcaacgaagccgtggcgttcacgaactcatgaatgctcaacatcgcagcagcaccatcgccacgttgcagcatgcgcggcagattgtattgccccgcctgagccatcatgcccaaacggcgggaaatcaaggaaagtcgaacatcttccggcatgaacttgaacccctgccgagtcttggaaaacacccccaacggatcagcgaacacctgaccgtttgtggcagtggccaacgtatcttcctgcaaacttagccaagatgcaacatcgttctgcgccggagcctcacgaaacagcgtgatccgctcgaaaaaatcgccgatacgaaacacgccatcacggcggaactcgccttgcgcacgcggcgtaagtggcgattgagatgcggcaagagcgtcggaattagccgaaccatgccctgcaaaatgcggcttgccctgctcggcaacagtgaaatcgcgactcaacgcatcgtaatcagcctgcaattgctcgccaatcgcatcataatcctcatcggtaagccacaggcagaaacgcggcgcgaaatcatgatcgcgcgaaaactcatcgtcgaaaccgaaacattccgaaccataaccgaccaaacctgcggcaatccgcccctgatatgccgaatatgcgccggcaagcaacggtttgccgagatcattccagaatgcgcgagacaaagcaagtcctgaaatatggtgagaaatcgcaggaatcgaagatgcgccggattctgccatatagtgcggttcacttgattgctgagattcgattgatttcggtgaatgctgagattccaaggattcttgcgattcttgatattcttgcgattcccgcgttttatgagatgatggcatgtgcttatgcaacgcctgttttgccacttcaagattgactgcagtcgtgtgatagtagtcggtgttgcgtccgtagcattcctcaatcacgctcaacgcatgctcatagccggaaaccgcatcctgcaggcagccggccatatagcaggcctgcgcatagccggccagcgccgaagcataatgcgcactatgttccaaatgcccggtacggtagattgtcaacgctttctgggcgtgctgtatggcatcgctcgcccaataccggtccatctgcaggagcaacaatgcaagattggtgtgcgtggaggcaacgtcgatgtcagcgctcgcatcgggggaagattgctccaacaggtccagcgcctgttccagctcgcgcttcgcctgattgagacgaccggtttcgctgtacaacatggacatattgttatgcagcgcgtccaggcgtcggtcggtgggggagaaggcggacgtggccgcgtcaagcgcctgacggtacagctgttcggcctcctcgtactggcctgcggctcgcatgcccgtggccgcgttgatcagcgtcgtagcccacgcctgcgggtcgatttcctgaagatgcaaatgatccgcaatgcttaacgattcgcggataatcggcagattgtcggtatggcgaccttgcgaacggtaaaaccccatcgtttcgttcaacaccgtcagcaaaccggcgtcatcatgactgtgttcggcttcggtccgcgccttctgcagatacggttcagcctgttcaggagccttatgcgcatcgaaaatcgcatcaagaccacgcaaaaattgttgtacatcaaatgttgcgcatccgtcatcgcaattattcatattcagattgacatcactgtctgccatcgcaatcccttcatcggtgacttccatcatctcccgaactgcagacggcatcgcagacggcgaaacaacgaaagatggggaacatgcgatacgtcgtacaaagaacaacgggatatctcatcacaataattgtgatgagatatcccgttacataacagaaataatcgaaataactgactgtcgaatgtcagacatgcacttcgcgcatacgctccgtagcacccgtatgcgtttcgtaacgacgcgaataggtgaccagcataatcaccgcgatcaaagcgatcggagcaccggccaaaccggtgtaatggtagttcatggtgtttgccgtcaatgcggcaccaccaacgatcgaaccaaccgcattgccaaaattgaacgcgatctgcacggccgcgcccgcaatcagctcgccgccgccctcaccggcctgcaccatcagcagctgctgtggagacgagttgaagaacagtgcgaaaccaatcaggaatgtcagcagagcggtggtcacatgattgccaggaacaaagaacaccagcaacaagccaagcgtggcaatggcctgcgaaagtccggcggtggcaccaggcttccacaaatcagtcaaacggccgcccgcaataccaccgatcaccatgccgaaaccggcaagcaccattaacaggggaaccagcgaagaatcccatccaccgaccttctgcagccacggtgaaacgtagctccaccagcagaaaataccggaattaccgcagaacaccgccatgagaataaaccacggaccggcgtgagtgaggaaacggaactgccctttaataccagcgtccttgatcggcgcgacgaacggcacccacgcaatcaccaacaccatcgtcatcaatgcccaagcggcaagaatcgcaaacgccaaacgccacgacagcatttccgaaagcaatgtgcccgcaggcacacccaacatattggcaaccgtctgacccgtcaccatcatcgacacggactgcgcttccttgcccttatcggccaacgtcttggcgatcagcgtggccgtaccgaaaaacgcgccatgcggcaagcccgaaatgaaacgagcagccaacaacatgggggaattgaacgaaaccgcgctcaacgtattgccgaccagcgcgatgatcatgaacagaataatgagattcttcggcggtatcttacggccgaacaccagaatcagcgtgcccacgcacacgccgatcgcatatgcggaaatataatggcctgccgcaggaatgctgacctgcatggcggcggctgtctgaggcaaaatgcccatcatcacgaattcggcggcaccaagaataaaggcgccggaagccaaagccagaatgcttcttttcacagtctctcctccatgaatgtgaagcgtgttggtgtgcgcgattgtttacgcgcttgtgtattacgtgttttttgatttttcaggtggttgcgtctcgcatatgctgttttgcaccgctgatgcgctggaaataaaaaaggcggaaccgaagttccgccttgagttgtcgggctggcgggatttgaacccgcggcctcttcgtcccgaacgaagcgcgctaccaagctgcgctacagcccgttttgcaacagttggaaatattacacgattgcttaagtaatgcaaatacggcgtgtcgcgtgtggtgtagtggcttctcggtacactgtgggcttatgagtgagaccatcgaatcgcaagaaaatcagaatgaagaggctgccgttcccgctatgactacggtggagcgcgccgaaatgctgctgcagcaggatgcggctatctacgccaagatcaatgacggcgccaccctggatgaggccgtcgatccgggcaataaggaattcggcccgctggcgcatccggaacaggtgcagatgcgtgtggccaagcgcgccatgatgcttaaggacggcattcagccgtacccggtgaccttggacgtcaccgccaccatcgaagaggttcgcgccaagtatgacggcaagcttgaagccggagacgaaaccgaagacgtggtcggcatcgccggtcgcgtgctcttcctgcgtaacgccggtggcttgtgcttcgtgcagctttccgctggcgacggcaccaagatccagggcatgatttccaagaaggagattggcgccgattccttgaagcagttcaagcagctggttgacttgggtgatcacctgttcatcaagggtcgtgtgattgcctccaagaccggcgaactgtccgtgttcgccaccgaatgggccattgcagccaaggctctgcagccgctgccggccctgcacaaggacctgaacgaagacacccgcacccgcaagccgtacatcggcatgatcgccgacgagaagatgcgcaatatggtgcgtaaccgctccaaggccgttgcttccctgcgcaagaccttcgccgatcacgacttcctcgaggtcgagactccgatgttgcagaccgtgcacggcggtgccgccgcacgtccgttcaccacgcacatgaacgcgttcgaccttgacctgtatctgcgtatcgcgccggaactgttcctcaagcgttgcctggtcggcggcatcgaccgcgtgttcgagatcaaccgtgacttccgtaacgaaggcgttgacgccacccatgctccggaattcaccatggttgaggcctatcaggcttacggcaactacgacaccatcggcgcgctcgtcaagcagctcgtgcaagacaccgccatggacgtgttcggcacccacaaggtgacgttgctcgacggttccgaatacgatttcggcggcgaatggaagaccatcagcatgtatgattccctctccgaggctcttggcgaggaaatcgtgccgaatggcggcccggacaatccgggcacttccgtggaacatctcggtgccattgccgacaagctcggtgtggaacgcgacgatgtggagaaccacggcaagctcgtcgaacacctgtgggagcacttctacgaagacaagctgttcgagccgaccttcgtgcgtgacttcccggtcgaaacctccccgctggtcaagggccaccgttccaagcccggcgtggtcgaaaagtgggatctgtatgtgcgcggcttcgagctggccaccggctactccgaattgaacgatccggtcgtgcagcgtgaacgtttcgtggctcaggccaaggatgcgctcgccggcgacgaagaggcctgcgatatcgatgaggacttcctcgaggcgctcggcgtgggcatgcctccggcaggcggcatgggcatgggtatcgaccgactgctcatcgccctgaccggcgccaccatccgcgagaccatcaccttcccgctggtgaagccgctgaattaaggcaaagccttaattcaatatcggcttcacgcgaaggcggatcaagagaacagccctgtgggctgttctcccgccgtaaccttccttttcagttgaagccgctgaattaaggcgaagcacagttcgcaataaacttgatacggactgaaggggctgacgacctactcggccgtcagccccttctgtttttggctggcggcgggtccgcgtgcgaatcaaaaacatgatgagcggcctccgccgtccgagtagccgccgattaagaatgacgatggtaaattcgaatccatatggctcactcaacaatggggacgtcaggaaaactggaccgcacatagaatggtgtccatgcaaatatcgacttggattcgtggcgctcgccctcaaacgctgccgctgggtcttgccccggttctggtcggcgttgccgccagttggcggtgggaggctttgggtggcctgcggtcgtgcccagcttttccgggaagattgctggaagagcatgatgctggtgatgtgctggggtattgtgcgttttctcggccgtggtttgcggtcgttgcgatgttgtgcgccgtggtggcggtcggtctgcagattgctgtgaattatctcaacgattatgccgatggtgtacgcggcacggacgcccgacgaggcagtgacgccgcgggacctcggcggttggtcgcttccggagtggatcccagtcacgtgttgctggctgccgcggtcgctgctttagccgcctgtgccgccggactggtcgctgtcgtcataactggtcgctggtggctgatagcgcttggcgcaacctgtctggtggcggcctggggatataccaacggtcggcatccttacggatatcggggtctgggcgaacttgcggcattcgtattcttcgggttggttccagccctcggcacgcagtatgcgctaagcgggtcgatcaccgtgacgggggtggccggttcggtgatctgcggcctgctgtccgtcagcgtcatgatggtgaataacctgcgcgatctcgaagatgacgccgcgcacggcaagcgcacgctgatggtgcgcatcggcagtgggaagggcaaatgctggtgcatgcgtgcgctgggatgggctgctggtctgacggtggttttcgccatgccattatcggtgtatgccaaacttctggatctgctcataaagctgcctgcggaggtggatcgcgaccgttcatgcacggaatatggcatatgcggtgactggtcgtggggaaacgccgattggatgagccttgcggcgttcgtatccatcgcagggtgtgtggcgattgctactcgtgccgtcgcggccgtccggcatgaccagtggcgtcgggcgttgccattgtgctcgatgacctcgttggtcgcagccggcgcgttcgtgctcaatgcctgtcaggccggtttcatggcgtagctgcatcctgcatttacgatttcgtcattgagcaccggcgattgcctgatgatgcaaacggcatgcaacagaatgaaaattgttgcatgaacgtaaccaaataatcgtcatcgacggttgtgttgggcgtgctaggcggtagactggcaggtatgacttacaaactagtactgctccgtcacggacagagcgcatggaataaaaccaatcagttcaccggctgggtcgacgtcccgctgaccgagcagggtgtcgaggaagccaagaacggcggccgcctgctcaaggagaagaatgtccttccggatatcgttttcacctcgatgctgcgtcgtgccatcaacaccgccaacgtggctctggatgaggcagatcgtctgtggattccggtcaagcgcagctggcgtctgaacgagcgtcactacggcgctctgcagggcaagaacaagaccgagatccgtcaggagtacggtgacgagaagttcatgctgtggcgccgttcctacgccactccgccgccggagatcgatccgaacgacgagtacgcgcagaacaatgatccgcgctacaccggcgatccggttccggaagccgaatgcctggccgacgtggtcaagcgcgttgagccgtacttcaagtccgacatcgagccggagctgaaggctggcaagaccgttctgatcgccgctcacggcaactccctgcgcgccatcgtgaagatgctcgacaacctctccgaagaggagatcgccaaggtcaacatcccgaccgcaatgccgctgctgtacgagctggacgagaacttcaagccgatcaagccgcgtggcgagtatctggatccggaagccgccgctgctggtgccgccgctgtcgccgcccagggccagaagtgagtttgttgcgattgatacgcaggtaatcgcgttcaatcgtacggaacgtatatgaaaaggtggaaatccacagtatgtgggtttccacctttttgcgtccggtatctttgttgggttattacgtccgtctgccggatgaaatatggaacatgggatgtgcggcagacggacgtcaatcgcaatcggctcagatcacgccgtattccttaagtaacatcggaatatcggtggaatcgagcttcttcagaatctgcttcaacacggtcttttcaatggggttgagtttcatgtcggtaatcggcttgccgtcacgcagcattaccgtggcgttgagcaggttgcgtacgtcgtagaccgaaccccacacttccggcacgccacggtccacatcgcacagcgtgtacaccgcttccatgccggtgcgcatcgaatactcggtggtgaagatcgtgtcgcgcggggtttcggcgaactggccgaggaatgcgaaattcacggcaccatcaggcaccacatcagggcggtcgccggcggaacgaggcatgaagaacgcgtcgatgtatggcatcatcaccggaaccgtgttcgcgtggtttttggccagatcctcaatcttttcgaccggtacgcccatatggtagagccattcctcgcagatctcctcacccgtgcattcctgcatcggcttcttcacatagttgccgggcttgtcggggaacagaccgtacacccacacgcacagctggcctttcggctggtcgcggaactgctgttgacggttcaacgtccagctcatcagccagttggaatcctccacggtgacgatgccgcctgttaccacgcggccggagaacgggtcgcgcttgcagattttctgaatatacggcggaatttccatatccagtgtggttacggtggcactcatccacttcgaatgttccggatcgccgcagaatacgtccgggtggccgaagctcgggtcttgcttggcgatgcgacgccacatatcccagccgccgccgggcttgatttccggagtccacgcggccggctcggtctgcgagcccatcgacgagttctccacgcagccgccgttggtgatgaacaccaagtcgttttcgcccaaatcaatgcttcgcgcggtgccatccgcttcggtcaggtcgatgcgcgtagccattttcttggttggcgaactgtacggattgcgtacgaacacgccggattcagcctgcttcttcaaaatcgtgtcttgaccggtgccggtatgcgaacgtaccggtcccatgcctccgccaatcttgaaatcgacattctccactttcacgttgtagtggaactgcacgccgaatccttccaaatatgtgagcatcggaagaatcatcgactcatactggttgtagcgggtgaaacgcaacgcactgaagtccggcaatccgccaatatgatgaatatatcgacgaatatacagcttcatttccaacgcactatgccaattttcaaaagcgaacatggtgcgccagtacatccagaaattcgaattgaaaacctcatcgtcgaaataatcagaaattttcttgccgtacagttcctcattcggcgtgaagaacaatttcatgatctccatcgaggctttgtctgacagattgaatttgccgttcgtgcctgcgtcaacgccgcgcgcttttgtggagcggcagagcgagaagttgggatcttccttgttcagccagtaatactcgtcaagtacggaaacgccttccgtttcgatggatggaatggaacggaacatgtcccacatcacttcgaagtggttgtccatttcgcggccgccgcgcattacgtagccgacgccgggaatgttcgcgccatcgcaggcacctcccggaaccgcgtccttttcgaatacgtgaatgtggctgcccggcagttgcgcatctcgcaccaggtaacaggctgcggtgagcgcggccaagccggtgccgatgatgtacgcgttcttgctgtccacgccttcgggcttcttcggtcgggcgaatgcttcgtaattgccgttggaataatacatgactgcctcctttggatgtcactgcacatattgtgccgcgacattgcgtaaaagtatatgggcaaaaaatagacagattgtttaatttttcttacggcttgacgaaagtgaaataatgcgggagatagtgcttgacgattcgtgctgaaagattgcaaaaacaaaacaagaaggcggcttcagtggggaacggaagccgccttctcaaaaagaagatgaaaaagaagatcgcaagaaaaaaatcaggcgatgtcggtgtcttcgtcgcgggtcggctccttggacgggtcgaaaccggagacgatgtacaccacgcggcgagccgcggacacggcgtgatcgccaagacgctccatgaagcggccgatcagcaccacgtcgatgagctgctggttggtgccggaccaatccgcggactgagccagttcaaaggtcttcttgtgcagttcgtcgagcttgtcgtcgttgatgatgatctgttcggcggtcttggtgtcgcggtcagacagcatggccacggtctggtcggcgacgtcgttcaggaacgcctgcatttcggcgaacagcggttgggcttcggccggcagcggggaagccgggtaggtgcggcgggcggcttcggcgatgtgacgggccagatcgcccatacgttcgaaggtggtggccaaacgcatggtggaaacaaccacgcgcagatcggtggcaaccgggttctgcttggccagcagtttcacacactggtcgacaacgctggcttcgagggcatcgatttcgatgtcgccgtcgataacggcctgggcggcttcaagattctggttcagcagcgcgtcgccggcaccgttgatcgccttgcgcacgcctttgaccatgtggtcgagatcatcggcaacagccttgagctcctcgttgaaaataacgcgcatgtgacttgcctttcaatgcttcatatatatctgggttcgatataacctctcacaagtctattagacaaacgccatattcgtaaccactgctcgtgttgttccgtcaaagttcaccaacgcgttcaccttgtgttcacgaacgagcggtggtgtcgcgagttggggagcctcaagagtgtgcaacaatgaaaccatggttgaatctttgggttcgtggtggcgttcgctgacgcaccgcaacgacgatgatgagcatgatgccgatgaggacacattggatgatgccaccaacgcgttgctttccatgctgccgttggcatccgtcgtagttgacgagcatgacgaagtgattcgcgcgcacccgtcggcgtatgcgcttggcgtggtgcgcgatgatgccatcgcggaagagaccgtgcttcgcgcagtgcatgaggtgcgttcctgtggcggcaacaaacaatttgatttgaccaccaccacccaatatgtcgcccagcaagtgccgaaggcaggcaaaccaaccacacgtgaaatcgcgcgccaggcactgatagggcagtcaaaccccaatacttccggcgcaaccgtttcccgacccaactggctgaaaatcatcgtcggcaaactcaatgagaatctcatggttgtgctcatcagcgatgtgagcgaaagcgtacgattctcgcaggtgcgcgattcgttcatcaccaacgtttccgaacaattgcttgagccgacgcaatcattggaacagctggcggacattgtggaacggggcggtgccagccaacaggacgtcgaacgcaacgccacgcagctgcgtcaatcctgttcccgtcttgagcatatgatttccgatctgctgctgctgatcaaagcgcaggagccaatcctgccgaccgccgacaatcgcatcaacgtgatggaacaggtacaagccgtggtgcaggcgcatctcgatatggctgcgcaacgcggcatcaccatcgagaccggcggtgacgaatcgctatgcatcaatggcgaagccgatcagattcaggcggcgctcacaaaattgattgaaaacgcgattacgtattcaaaagacggttctacggtgaatgtcgtcgccaaagccaatgaggagcatacggaagcggtaatcagtgttctcgatcgaggcaacggcatcgccatcggcgaacagaaccgtatttttgaacggttctatcgcggcagcaatcagaatgagcattccggtgacggcattggcttgggacttgcgattgtcaagcatgttgcgttgacccaccatggttccgcgtcggtgtggagcagcccggggcagggaagcacgttcgccttggtgctgccgttgggcggggaatgatgtaagacattcggcagatgttgcaaatatctcaaatggagataatgcgatgcccgtctcgctttgaactgcgccccgtttgttggacgttgttaattaggatacagccctagaccgcgagggacatgctccggaactcctccggggtgtgtccctcgagtcgtatctggcgccgtct

SEQ ID NO: 846 - DNA, 9919 bp, Unknown
  gut microbiota DNA sequence
ataacgaacaaatcgcttcttctgagctccagccccatcaacccgctgagcagcctttgaatcaggtcgtctcggtttgcaaacgagccgcacataccacggcaaaaacgctttccaccgcagggcacacggctgtaaaagcaaccaaagttaccggtcacgccatccacaccgctgccacagcagtaaaaaacgcatggcatacttttattaatttcaaagccgttcaactcatcatcaaattctttagaaaagcatatggcccgtggaagaagcgcatgaggttctcctatgcgttctacgccatcgtgttcaccctattgacttctgccgaggtcgtcttccttcagtggggaatgtatagcgaaccaacgtacgataaaggcgatgaagttgatcagacaaccaaaattctgaacagcgtcgcagggcaagtcaccaaattcgtcagtcaaatgtggcttgagcagaaatctctctttttggttaattttgtcgggctcggtcttatttatctcgcactcatttttgtcaccaacagattctggattgcgacacttcttttcggaacagctataacagcttttggcgtagcaaacagcataaaaatacaattacgtaatgaaccaatcattccagcggattttacttttatatctggaggagacgccggcaatattgcttcatttattcctgacaattcacagcaattcgtcgaaaatgccgtcacagtcgtcatttggataattgctatctgtttgttgctcttcctactcgatagacgtaaatgctttatctactgttcatggcgcaaaccattcgccagtgcgaaaaacaccgtcggcacattcagccgagccctcgccgccgtggttagtgtagtcatcctggcatcctatgcaacaaacttaggaactggtgggtcatggtcaaatatgtgggcagccaaacaaggttatacgcccacacttttcgacgcagcagaagatgcccgaaataacggtcctgcgacgaccttcttaagcctgacaaaggctcccacgatggataaacctgaaggttattcaaaacagaagatgcaggcaatttcaaagaaatattcaaagcttgcaaattccataaataagtcccgaacacagcaattgaccgacagcactgccatcatgatactgtcagaaacatttgccgaccccaccagactccctgatattacttttgatgaagatcccattccgaatattcgaaatatcatgggaaccactacatccggcaccatgctttcgcctggttatggaggtggaaccgccaacattgaataccaagctctcacaggtctttctttggcgaattttagcgattcaatgattgttccttatcagcaactcgtaccgactcaatctaacccatattcgtttaatcagatctggacacagaaatatggagaatccggttccgaggcagtgcacccttactatcaaagcatgtatctaagaaacacaaattataaaaagtttggtttctcgcacctttattctctcgacagcgcaacccctgtcgagcataccgaaaaaataggagaatcaccatatgtgagtgattcctccacctatcaagatgttttggatttgatcaagaatcaaaagaatccagaatttctgcaagtcgtcactatgcaaaaccacatgccttacagcaactactatgaagcggaagacgtcctccaatcttctgttaccgatgacacacctgacgatgagcatagtgcgattaacgttttttctacgggcctgaaatacacggatcaagcaacacttgacttcctcagccagttgaaccagatcaacaagcctattacagtcattttctatggagatcatcttccaggcatctatttaaaagaagaacaaaatccggacgattcgttcctacttcatgaaaccgattatttcatttggtcaaacgatgcgtcaccatctgcaaatgttaagcttgacgactctgaagcagctttttcttcatctaattatttcatgtcatccgcagctgagcatatgaatgcaaaaatttcgccatacctagctttgctaactaaactccacgaggaaatacctgcgattagccgtgtcatctcgaataggggcggaatcgggctcggaacagcaacttatcttcaatccgacggcacagtgactgattctaccagcatgagcaagacgcaaaagcaactactagcagactacaagcttgtacagtacgatcagacctccggaaagaactatctaaaagaaagcgacttcatgagtgtagactgaagaaagctttgagtccgaagacaacacgatagaaggaaacaatggataagacgccactcgtttcaatcattatccccgtttataatgcagaacaatatctgccattttgtctcgactcagtcaaaaaccagtcttggagcaatctccagattattcttatcgacgatggttccactgattcttcgccgcaaatttgtgatttatatgcttctaccgacaacagaattattgtaagacaccaagaaaatggaggtattgccaaagctcagaatgctggactggatttggcgaaaggtgattacatcgcttttattgataatgatgacataatggcacgagacaatattgaaattttatttcatgcgttagtctccaatcatgctgatatgagcaaagcccgttggcaacagtttggcatttcgcagatccaagaaatcaaaacgaaagcttcaaatggcacagctcttacaggcaaaacaacatcttttagcaatcctctgcagtcatatcaaactgttttcagcaagctatttcgcgttctaggaaagatggctggcaaaaacactgaagctcgttattttaatgaggcgaattggtgccgtttgtatgcacgaaaagtatgggatggagttcggtttcccgagggtatttacgctcaggacactgcaatagccggagagttatatcttcggatggaaacggtagttgacgttgatgcaaccctgtactactggttgcagaggcctgactctgttacacataagatgcgtagtgcctcgttctatcatgatcacatcgtcgcagctaagaaaaacttcattctgtgtcaagagaatagtgttataccagcgcgaagctactacactcttacgggcaatcttaaagatgagggaaaggctgcgaagagttctactgaaaagcaacagtttagaattgaccaattgcaagtttcaaatctaatcaagtctctttctcttaaagatagaatgatttgcaattcgcttaagcggatgagactgatagaaaaaagaatatacgatgcgaaaattaagaatatgaaatagtaaacgtgcggcaacttaatgccgcacgtttactatttctcttgctgcttttccaaagaatttgcatcgattgtcgcttgatcgtttaaatcaacagcaatagctgcccgcacgcctttccatttctcagcgacaaaaagtggattgactaccagccaatacaatttgcgtttccatgaatattgatgatcttgcaggatgaactttgagcctaacgtataggcacgaatcatctgtttaatgacgaatggcatggaaattgggtccattgttttgccaacacgtcgtacgccgacaatctcatcaaacatacgtttcttgtaatcacgtaatttgatctcattagtatgccacacattagctcttggcgcataagctttaacataaccgtgcttgacgagatcctcgccaaacttctgatcttcagcatacggcacgtcctggtatggaacgtctccaaggagcacagacttacgagccgccgaattaacgtctgaatagaatgtaactagatcaaaaatttgttgagagtcgataaagtcatcctcatagaaaagcgtcgttccgaagtctggaccaaactgcttaaaggtccgtattatctcctctttcagcaggggaagagcattaggacgaggatcttgcttgcccatgacaccggcaaccatcgggaaccgttccatcggctgaataatctcgtacagccaccgatcatgagcaggcgttgcatcttgagtcagatacacaacatactcgccctgagccatttgagccgcctgctgacgtacccttccgtgtgagaaatcaggctttgcaatggtttcataccgaaaatgcttaaacctgggcaaccaggctttaattatttcaggagtacgatcttttgagctcgtatcaatgacaagaatctcgtattcgaaatttgtcttttgcttaattaggcttccaaaaagctcatcaagattgtcttcaccataataagtaggaatgaaaacagtggctttaatctcgctcatggctggcagtagtcacctctcgcatgataattttcgcaaacttctcatatgacgcatcccatgatgagctttccgcgctcttagaaatgcgttggcatcttgcttcaatgtcaggatcagagacaacttcatccaatcctttggccaattcgattggcgagtccagagtgtagacaatatctgaattctcaccaattaccaaacgattgttctctccatcgttcattacaggaacacatcctgcagcaagcagttcaagaggaagaagcgatgcgttcgtcaaagaaagcaccaaacatgcctgagagtcatggtaaatcgaagaaagctccacaggactgacgattcctcgattttcgtacgggaatggaatgtcataatcagatacatcccaaccaaagaaaacgatattgtagtcaggatgtatttggtggaacttcgccaaagtcaagacgccaatttcaaaggcgcgtctctcagtcacaggtcttgcatagaaacaaatctgcttcttttttgaagtttttccagtaggacgataaatatctagatctgcgccaaagtcaaagaaatcagctttcatgccgtatcctccgacctttttcgtcagccaacgcccagctgtaataccgtaaaaaccaaaacgataagtgttctcagctaacaccgctttagagcccattccgtaaaagagcggctcgaaatcctgaacgaaatacattttatgggcaggattcttcatattgaaaacaggataagcggtttcccatcccgtcgcgaacaggacatcgatgtcttctttttcagcctgactcataggcagacaacgaacatcaatatcaaaatgctctttcaacaactggtgagaataatcagctggctgttgtgagatgctctcgtagatgaaaaaggtgacattatgtccgcgctcttgcaacgatttcgcaaaacgagcgattgtatgctgaccgccgctaccaatgctgatgggcgaaagaacccatccaatatttaactttgccttatcaaccttcttaggcgcaacatacggctcagcaacaaaatcagctttgacaacatcttccacagatgtcataacatcaatagggcgcttcgaaataacgctttgcaccgcatgagaacgcttcagcttacgttttataaaagaaatgcaccgctcaaaagtgaccttaactccgttagaccgaaggtattgaaaaaaaacgctgatatatttcacttctggttccccttgatcatatctttcagcttacgtccaggagcagtaatcgtcctacctatcctccaagaactagatttttccattgtctctatgcgtttacgcaaaatatcattctgaagagaaagatcgttctgcatttttcgagcgtcctgaagttcctcatcaagatgctgctgaattctgcgcaaatcatcacactgctcctggagccactctttatcaccttccaaaagaagtgcacgattcagggaatgaaaacctcttgtaaaaagccttatatacgattcattatctgcgatatgagaaaaatcaaccgttcgaaaagagctgccactatcataacctgtgaaatcagtgactcttttaattagttgttcacgtatttttagatacgatttaggattttccttcggtgtatcaacgtcaaaaagtgaataatcattaagatattcttcatcagtcgcactgtttaccagctcagctaatccggcataccttttttcatcgtatttattccgatccttgactaaaaagaccggcgtttcaagtgcaagtgccggaagcatggcatgcagcctcgtagaaatgacagcagaagccgattgatacaaatacaagaaatattcagctaactgaagacgatcgtcttgactcatatctgcatcaaaatacggagatgcctgtatgactgagcggttagtatgaccctgaaccatctccacaacaggctgaggaacatccaccgctaagacaaagtcgcctttgggaatacccgggtccctttgcagagttaaagtcatgcaacctgaaaaataagactcaaccccatgtttctgcaaaagctccaacgttgaaaggtctctcgctcctacaggaccatggtcattaagataatgaatgctcgtatcgttaaaaaaagtatcaagaaccttagagtcagcctgatcaatatacattgatacagtaaggggaatcactttattggacttcggaggccactggtacggcgcatgcataaaccacccattagtgattatttttgtctcctcatcaggacagtattcacccagcctgtctcggtctatataagtatccaccgatggcaaaaaacgccttgccgctatgctctgaatttcatccccgatgttctcggtctcatatttgaaaaggccgtatttcatattatccctccattggagacagaacgaaatcgaagtcaggcttccaattctggctcacgtcgacaggagcatgaacctcgaacaacaatgcattgtttgccattaaatagttttcgcttctatcttcctttttcactgctacttgcactgaaaaaatgccgttaggaaaaatgttatctacagaaaggcgtagatgcatatttttcccctcggaaaacacgattttctgattaacgttcttatcatcgctggcgacacggaaaacaatctctccgacctcgctattaataacaaaagtcaaaaccgcatcttctaaatttctcttcgggaggatatctagattaaagataagctcgctgtcagtaatctcatgggatattttgaaatcaacattctcccttcgttgacgagtttcctcctctttctcggagatcgacatctcagtgtcgccaccagaaaattgagattcaaggttagcgagatcaagacgctgactattcaactcttgatatgcttgcgcgacttccaaaggagtaccgtcaattttaagatcaccatcatgaatcaaaatagcgcgattacagaaacgctgcaccgagtccatggaatgagtaacaagtacaacggtctttttctcgcgacgcaatttagcaaaatacgcataacatttacgctgaaaagcctcatctccaactgccaagatctcatctagcaggaggatatcggactgagcacgaatagccatagagaacgccaaacggacaagcatgccgctggagtaattcttgatcttctgttccataaattgaccaagttcggcaaaatcaacgatatcgtcatacattgcgtcaatctctttggttgaaaaacccatcagggctccgttgagataaacgttatcatgtccggttagttcagggctaaagccaacgcccaattcaataaatggcaccaaaacgccgttaatgttgatgcttccagaatcaggatagtatatttgcgccatcaacttcagcaacgtgctctttccgctgccattacgtcctacaattccaataaaatctcccttgttgattttaaaggaaatatcacgtaaaacctgatgttcttcatacccctttttcccacttacagcgttaaagatcgcttgtttcagactagaggccttctcaagcggcaacttgaagcttttggaaatatctttgacttcaatcgcaatatcgtcattcatcgctaccacttacatcacctcagcgaattgcttggagctcttgttaaagtaccaagaaccgattgccagtactatcacaacaagcgacagcggaaccaggccaataagcggattgttccacatcgaccaaagcgtctgcgtgtagtctgtaactaggttataccggatgtcttgaattatctgagccataggactcaacatcattaattttgccatgaaaggatgcgtagcactcaccatcgttatcggataaataatcggggtcgcgtagaagaacagctgcaaagccacttcccaaagatacccaacatcacgatacttcacgaaaagagatcctaaaaagagacctatgcctaatgccaacagatacatctcaagaatgttcaatggcaaaagtaacactgtccagcgaaacttaacccctgtcaacagggcaaagacaaagaccacaatcaagttgaagaaaagattaatcaacgcagagattgttcctgacagaacaatgatgtatttagggaaattgattttcctaatcaaatctccacgcgagacaatcgcctgcaagccctgtgttgtggcctccgcaaaaaaagtccaaaaagaaataccagccaaaagatacacagcgtagttagggatatcccctcccatcgccagaaactttgcgaatactatatacataaccgcaaatagcatcagaggcttcaggatagaccacaaatatcctaaagcagattgctgataacgtaatttaaaatctgtaacggtgagctcgcgaagaagcacacggttacgcttgctaaacaggttcaaacttcctccaaatcgtaattgaactcagacactgatcatcagcttaccgaagtctttctaaaataaaggaccacagtttctaatctttctttgacttgagaatgattttatcttcagcgacatccttgagatgcttaccatatgggcttttgccgtatttctcggcggctgccatcaactgctctcgagtaatccaaccattctcgaatgcaatttcctcagccactgcgatcggcagaccttgcgccctctgaaccgtacgcacaaactcgccagcctcaaacaggctatccatcgtgcccgtgtccagccatgcataaccacgacctaacgtttgcacattcaaagagccatcctcaagatacatcctattgaggtcagtaatctccaattcaccgcgtgcgctcggcttgatctgcttggcgaattcgaccacacgctcgtcatagaaatacaggccggtcaccgcatagttggatgccgggcgttccggcttctctacgatagagatagccttcttgttctcgtcgaactcgaccacgccgtagcgttccggatcatccacgtaatagccgaacactgtagcaccatgctccactgcgacagccttgcgcagggtacgccccaacccgttgccataaaagatgttatcacccaacacaagcgcgcacggctcgccgtcgatgaactcctcacccagcaggaacgcctgtgccagcccgtccgggctcggctggaccttgtaggagaaagtcacgccatactggcttccatcgcccagcaaacgctcgaaattaggcagatcatgcggtgtgctgataatcaggatgtcgcgaatgcccgccatcatcagcacgctcagcggatagtaaatcatcggcttgtcatacaccggcaacagctgcttcgacgtgaccgtggtcaacggatacaagcgggtaccggaaccaccggcaaggatgatgcccttcataatcgtcctgctttctgacgtgtctctgatcgataagcgtttctagcttagtaggtcaatccaatattgaaaaaccgcgcagatga
